United States Patent Application Publication US 2008/0039413 A1 - sequence listing, part 15

SEQ ID NO: 1930 - DNA, 110163 bp, Mus musculus
  misc_feature (1)...(110163): n = A, C, G or T/U
tggactgctttctgaacttccattctccatgcactgaaggaagaagaagaaaaaaaggaatatatgagagataagagatagatacaggatacagatagatacagccttctgtatagaaggctgaaaatttcaaggaaaaaaatgtccttatgccctgagcagttatactgcttacaggttggcatctaaggccttgacattttgtgaccttgattagactgagcctgacaagcttcggatgtattgaagaggtgtgggtaaaagccatggattagtgtaaggcctgtgttgatgttacaaggcagactttatgcacacatacatgtgctctatgtgtctgtatagctagagttggtccagtcgctcatgcgattttgaggccccctttaaatcatcctttgtgctgaggtcatgagtgatatacagattatttttaaatgtttttttaaagatttatttattattatatgtaagtacactgtggctgtctttagaagagacataccagaagagggtgtcagatctctatcacagatggttgtgagccatgtggttgctgggatttgaactcaggacctctggaagaacagtcagtgctcctaccctctgagccatctctccagcccccagattatttttgtgctctgtagctcggctggcttctagctcgacatcccttttccttagttcattaatgctgggatcacagacatgcaccatcagatctgggtcagatttttaaaaacaggtcctcctagatccttagtgttcatatagttttgattttactcatgtgtgtttgcacataatcttgtgtatgaagttcactaggtagagcgtctatacactcatagaccaaaacatttatgtgtgcaataactcaaggttacaaattcataaatccaagtcaaatttcatgtagtatgagaaatgctattctgatgcactgaacttggggtctctatgtgatatgttgaatttaatgaacctgatcaactgtggcttataggctaatccagttgctatttctgctaattactacaaattactacaaacttatgccattttgccctgtacctgggccagggagtcatttgcatgttagttcagcctgtgttttctccttgaccaatgggtcccattgtgtttgaacagacacttgtgacagccctgagtgtgcccagggaatttttgcttatttagtttttttttcttaatttatttatgtatatgagtacactttagctctcttcagacgcaacagaagagggcatcggatctcattacagatggctgtgagccaccatgtggttgctgggatttgaactcaggacctctggaagagcagccagtgctcttaaccgctgagccatctctccagccctgctcctttagtattttaaaggcttatttccccacagaagtcacagaatgaaacacttctcataaagaactcctgggtcctcaagtgtttgtgcactctcatttggagaatcgtccatgtagttggcagagggtgattgggtgaccagtgtactgactttgcttactgcttacagcaggcatgttaactgatgggcaggcactgcagtgatctagataacatttcttcttagcctgtgtggagcttcagctgctcacgttatcacggccagtcactgggactgacttgaacactactgagggtctagattagcggttctcaacctgtgggtcaggagtcccacagacgtggctgatcagagctttgcactacaattcacaacagtggcacaattacagttaggaagtagcaacaaagtactcttacggtttggggttaccacagtataaggagttttattaaaaggttgctgtattaggaaggttgagaaccatggccctagattttggagaattttttttttcccaggttgcttgcttcagcttcctcagaaacagtgtgaaaggttttgtttgtttggtttggcgtggtttttttcaagacagggttactctggctgtcccagaattttctctgtagacaaggctggcctcgaactcagagattttcctacctctgcctcctgagtgttaagagtacaggtgtgcaccaccttgcccagctagcagagaggcagtctggagaaggaggacctgcccattgtggtacctagctgggatctcccggtaaggagagggaggagagaggaggcaggtcagcctgggaactgctgctgggttttgaatgatttctgtgctgttggtaagttggatgcttccagtacagttaatggactgtttatgcgaggtatgtgatgggggtttgacagtcttcttagtgtgctcactagtactgtgtctgtagtgtgtgcctggggctcctgtggttgcttgggatgttgtatgagcaagcaacagtgcagactgatgggcgttaagatctagtgaggaagatatttaagaagtaaggacccatcttggtgaatgttataaaaaggaagtagctggagctctgggcgtgggtagctcgaagtctttgccattatctgaatgtctaagggatctgtgggaatggggagagaattttgggatagatgtggaaaggcaatgagcttctggcagagtctacggtccagcaggatgactgggagagagatttgaggtgctggggatgccacaagggtcaggttgtagatgtgggatttgggacccgatcctacagcaatagtaggccattggagaggttgatcccggggggatctgtatcttcaaaggatccttctagcgagaatctaagaggaggccatggtggagaaggtgttctgagactgtacagcaagctctggcagggctgggtggcattgatagttcgaacaggttgatgcttacaaagtgtaaggagctttggaaacgccagcaaggtgagagggagaactgaaaatgatcccaggcttcaggcatgtcagggtcctggaggggcaacactctgaaatagcagggtggggctgtgaagagaggctgagtttgaggcttctaagccgtaggaagcatgttctagcaggctgttgtctctagggacttgcgcctcaggaggggaggctaggtctccctcctgtttggagctctttggagtttagccacaggagatttgatgcttagggagagttttgagaccacatactacaggtaggggagtgtagtttagttggtagggtacctgaattgagtgctccaagtcctgagtttgatcccctgcatacgtgttagtggctcataccggcagtcctagcacttgggaagttgaggcaggaggatgagaaatgtaaggtcattctcagctacacagggtatttgaggtcagctaccctatttaaaacaaatgaccctccagccccacaaactacaaactgactggtgaccttcaccctatttttggctctctgacatatttttattttgttttcccaaaacatgtgtatgtgtatgtgtgtctgtgtgtgtctgttttctatgccagtgtgtacctgtgtctgtgtgtgtgtgtgtgtatctgtgtttatgtccctgtgtgtgtgtgtctgtgtctatgtccctgtgtgtgtgtctgtgtctacgtttctgtatgtgtatctgggtctatgtctatgtgtgtctgtgttcttacatctgtttaataagggccagtaatgacccttatgtattgtacattaaatgagatcttttagcaacgtctgcctcacatttctttcctttttgattaaaaatatttatgtttttattttatgagtgctttgcctgcatgtatgaaagtgtactacgtgggtatctggcactcacacagaccagaagagggtgctggagaacctggaactggagttagggctagcttgtgagctgccatggtggtgcagggaaccaaacctgggtcctctgcaaacgcaggaagggctcttgacttttctctgtccgtgtggtgtgtgtgtgtgtatgtgtgtgtgtgtgtgtatgtgtgtgtgtgtgtgtatgtgtgtgtgtgtgtgtgtgtgtgtgtatgtgtgtgaggcctgtgtgtatgtgtgtgtgtgagtgtgtgtatgtgtgtgaggcctggactgcaaagcatctttccttgctgagtcatcatttgccacagatacccgccatccctatgtcgtgcctcatgatgctccagattgctttagtgacttagctcccctatatctacttgactttgtccccctgctgtaaagtgaagtgtgaatagggcccggaagccaaagagcccctgccatttcaagggaaggtagcgggaggggaggcgaggcgcagtcacagaaggctgaagagcaattagaacagcaggagagaagccaggagcccagtgaagaggaggggcacccaccgctgagccagcactgctaacatcagttaccactgcgtgtgcagggtgctgggtgcaaggtgggctgtgaggcctggggagaggcctgggaagagagggagagtgcggggaaacttgagggtactatgcagtcaacagtgaccttgaccccagatgctcctcctccctctagaaagctaggatcacaggtgtgtccccatcactggcttagacagcactgaggactggactccaggcctcttgtgtgtaggcaagccctctcccagctgagccacacccccagcccacaccatttgctgattttctgttaaaacaaacaatggtgtgctgtagacgggtgaagcctttgagccaagagtagagggaggcctgggaaggccaggctcaggttaaacctgacggctctctgtgccaggcatgctctctcttctcttgttatctcaggcagtcttcaaagtgacctcgtgctttatctgtctggattttctagcatttgggggggggggggtgagtaaacccaggcttagagaagaatctttacaaggctgctaagggcagggctaggacttgactccgggtgtcacattggctatctgtatagtccctagtaaaggtgtgtgtgtgtgtgtgtgtgtatgtgtgtgtgtgtatctgtttatttttgttcgttcgttctctctatcacacttactaatcttttctcctcctccacctcctgggactgaagctaagaattcttacatgccagacaatgccctacctctcagccactccctccccctaagtccttccacagtagcacattagatgactatagctttatacaagatcttaaagctaataagtcttgtaaattagtccttcttaaaaattactttgaaggtctgatatattgcatatgccagcaagattttgctgaagggaccctgatatggctgtctcgtatgaggctatgccagtgcctggcaaatacagaagtggatgctcacagtcatctataggataggatacagggccccggatggagaagctagagaaagtacccaaggagctgaaggggtctacaacaaccctataggagggacaacaatatgaactaaccagtacccccagagctcatgtctctagctgcatatgtagcagaagatggcctagtcggccatcactgggaagagaggtcccttggtattgcaaactttatatgccccagtacaggggaacgccagggccaagaagtggaagtgggtgggtaggagagcctggtgggtggggggagggtataggaaactttcgggatagcatttgaaatataaataaagaaaatatctaataaaaaaaattactcctagagagatggctcagtggctaagtgtgtgtcctgctcttgcagaggacccaactttggttcccagcatccgtggctaataactggccatcactccagctccaggggacccggggatcttttggacttcgtaggcacctgcactcatgggtatatattcccctagacagatatacacatatgtacatatttcaaaataaaataaacatttaaaaactttctcctgacaagttgggtcatttgcacttacataaattttagaattattttgctcttgtcaatttataaaagcaagcctggggatttttatagctgttgtcttttcctgttgctggagcttgagtccagggctgtggaatgctaagctggactcggccactgagctacacccccagctccctgatgcggttttgattaggactgtgttgaccactgtgagacttttccagaaaggaattagtgtggcttctatcccatttatacagtcattagaagaaattttactgaagtatgtgaccttatgtcaaattttgctactgactacttcagggtgaggtaaataaggaagatgaatactggaagggccagcaatagatggcaaatggtagctagttcttaccatagtggtggatagcagggtgtagcgaggcctggggcaagcaggacaatttaggccgacggtatggtcatgcaggaatatgaatttagggctaataaaatggctctgccgttaaaggtgctgtgagcctcctgtctggaatccattcctcaggactcatgtgggagggagataagcaactttcataaatcgctttctgacttcttttcacacacacacacacacacacacacacacacacatacacacacacatacatacacacatacatacatacacacacacacatacacacacacatacatacatacatacacacacacacatacacacacacacacacacacacacacacacacacacgaatgggtttaatgtggtttgctctttcagataagaaagttagaaatctggattttacgtagtctctcaagttctaaagttgaaattgaaaacactgcccgagtgagagatccctgagggctgtcagcctgtgacctctgccttaacctgcttgtattttagtcttcattttcatcatgtgtaaacatggaggtgttaaattcaggctcaagtttctttctagtttaatgattcagattttcaaaagaggaaagtgtcaaaataaccgagaggttttagaggcagcagagaaatcgtagccaggctcgtgcaggtctccgtgcttcacagaacaccacccagtctttctcttcatccttctatctgctgtgacttagctaaccacaggagagctagctctgggtcacgtggcggtctctgagaactctgaggctaggctcctccagagggcgggtgggctgccgtgagtggtggggtccttggagagggaggggctggcgttcagttgaaggcatttccctagctagctttattttccctagccaggctgatggggtcaaggcttttggtaagggttgaagcctgtgtgggaactctcagaagagagaaactttggcacatgtgtatctttgtaagcttgtgtctggctggcatggtatgtaactcgcgattaagattttataaatgaataggtgggctgagagattcattgaagaaggaaagaaaggctttagatcaaggacatgtctgagcacttcaaggactgcaagttcgatgcttccttctagtaagtgcatttagaatcttaaaagggaagctgacttgactcttaaacttggctcataggcagaaatagcatactgagtcttcaagtttaactctgaggtctgagtttgatgaatatatgataacatataattaatgtgtctccctatacagcatgcttgagagatcaagtgttgtgcttataacgacgttaaagacgctcaagggctttaaaacttacaaacaaacacgtgcacttacttttcgaatatgcatattagattaaggaatattgtcatatctgagatttctctctgggtgccaagggtgtggaggaggcagtgaactaggcttagtctcagttggtaatcacagaggctgagaatagatggacgatgggtcttatctcagtcatctctagtttttgtgtatctgaaagctttcatagtaaatagtagcaaatcagagactaatggggtccacaatgtatctgtctttcagaatgtcaatagcttggtcattgaattttttcttgtcataattttattaccatactttcatagtatttacgttgtattagatacattttagtaattacttttaaaattttatgtgtatgtgtgcctttgtgagtttatgtacactatgtgtgggcaagtactcttggaggcccgagaactgaaatcataggatggttgtgagctgcctgatgtaggtgctgggaaccgaacctggatcctctggaagagcaatccactttcttaactgctgagtcttcactctagcgcctacattgtattagatattttgaacaataatagcacttccctgcatgattgtggggaaagctagggctgaagtgaaccaagtatctgtggacaatgcctggtctaccctaagggatcaggtctgatatattttttaattattactttaaatttattatttaattattttttaattagagaaggacagagtaatggaagggtaaaagtctgtctcagggatctctatggcctttcttgcttgtatgaactataaagtacccagtttatataaatacacagttaacattattttagaaggataactcaagaaggtcaggctgggttgctgtatggcgtttaagaactatagccagctgactggcctctgaagagtaaagaacaaaggctgttaattctgtgggatactgtggatacctggtggcttggcctcctttattaaatatttttattacaaattcatgtttgtgtgtgcgtgcgtgcgtgtgcatgtgtgtgtgtgtgtgtgtgtgtgtgtctgtgggtgcgtgcatgctcgcgtgcactcttgcacaagggcgtgtatggaggtcagaggacaccttgctagagttggttccaccctgtgatcctggggaccaaactcaggtcatcgtgtcttggtggcaagttctccactccattaagtcatctcatcagctggctgtggtttcacttaataagcccgtatctaagatttaataatcattccttagaataagttataatgatttcaggaaaagaaatgttttacaaccattaaaaacaaccattcgtgtgtgtgtgtgtgtctgtgtgtgtgtgtgaatatcatgtaagataaggctcatgatgtgacccccttgtacatagttataacacatttaagtattcagggagatagtgaagcctgtggagaagaaaggaaaacagtgactttggtttttagataggagcttaattttctttaagaaagtcttttattgttaaagattgtgtctgcatgcctacatatcatggtgtacaggacatttggaatattcataaattctttctaaaactagtaaattaaaaaaccagaaagaagataggtggtgtgtgtgtgtcacctcagcacttaggtgttagaaggatcagggtccctagctacacagtgaggttggggccatcctgggttgttcaagaccatatctcaaaaccaaacccaaacgaaacagaacccagaaagctctggaaacctgaaggttgtgggcacttaagtagaaaaagaaatcaaaaccaagagttttgttttgttttgttttgtttggaaagacaaatgtgaatcatttttatcagtaatgcatacatcaaagtatatctggggatgtgttctgatacccagattgagaggattcggcagttacgccgtcctggcttactgttaacctatatcatgtttattcacaagacaatatatttaacttataccgaatatacattctagaactcatgtcttttaaagcagcacatctattaacatacgttttccagacttgtttcacaaaattctccttctttttcttatttagtttaatttttttatttattcactttatatctccctcactgtccctctcctggtcaccccctcccgcagccctccccctgcccgagatgtttgttttgcagctttctgtaagacactgtctgtctgtactgggatgcctctttgagatgttgctgaacattctcgacctccttctgtttccaggttcagtttcagaagcttcagcagctgcgccttacccagtaccacgggggatccttacccaacgtgagccagctgcggaacagcgcgccagagttccaggtactccccttgctggtttgcgcgatgctgcatggggtgtaaggtgataagccctgcacagattagttagaagaatagcctgggtctgaacgcagttcagacttctgggaagtccctcagtggagtctttcatggtgtccgcccatgcaggtgatgttactccacaaggagtcagaggctgaacatccagttgcaatgtgtggagagaacttgcctcccatgtatgggactctgggctccttcgtcagatccccagaaatcaaaacacagaacaccccaaactgtaacgtgaaccacatgtttacgttagagtttttttactagtcacactaaagaaaaaaaaactggtgaaattaaaatgtaatataatttaaacaaaaggaatttattttaaaacatattattactgtatggaagcatatgatgtatgtctgtgggtatgcttgtaccttggcatgtgtgtggaggtcagaggacagctttctacttcactcctgagacagggtttctctgtatagccctggctatcctggagctcactatgtagaccaggctggcctcaaactcagaaatccgcttgcctctgcctcctgaacactgggataaagggagagtgtcacatgcccagcttcagaggacatctttgaagagtcatttgtctcctactgtgggttctggcactggaactcaggcctcaggctttcaccagtgctcctgcctgtcaaggtcctgctggcccttgtttagcttgttggagatagaatcttgctagacagccctggctactctggaacttgctgtaaagaccagagtggcttcagacttggcgagctcccctggctgtacccctgctgggtgctgagacgacactgtccacagtgtctggcttgtttgcagacacggtctccctgtgtctcaggctagtcttgagcagctaagctacatagctgaggatagctttgaacttcttgccctcctgcctctgtctccagagtgctgggattatttgaggttctggggatgggacctagggctttcgtatatgctatattaggcaaacactacagctgagttatatctccagcctcttcttaagatcttcatttttctcctgtagctctctaaatcctgggattacaggcttgtgtcagcgtgcccagcttcatttaagtaatttgaatacttattgaacccaagatataccataataccatttcaacatgtattcaacatagaaaacatacatcagttcccatgttgtttttgtgctgagtctttgtagtctgttgtgtattttaacttaaagcacatcgtagtcttaactccccatgtcactagatccatgtggctaatgatggcctcaccgggcaggtgggtcagaggaatagataatagtctcgctgccccgagattagtgctggctcatagctgtaatcatttaccagaaaagccttatttaaaacaatgtggaattagtgtttcagacaatagtgccggctgctgcagttaaggtctgagttagacctactctgttgtcctagccacagaaagggtagaagcctgctatttctttttaatttcttttgattttatgtgcattggtgttttgcctgcatgtatgtctgtgtgagggcatcagatcttgtagttacagacagttgtaagttgccatgtgggcactgggaattgaacctgggacctctggaagagtagtcagtgctcccagtcactgagccatctctccagccctgaagcctaccatttccaattaaatacgttaggatttgatgttagagctgagatgtggactttgtgataaagcaccataacttatgcttttggatactcttccattttatttttgggatgtgactgtgtgtgtgtgtgtgtgtgtgtgtgtgtgtgtgtgtgtgtgtgtatgatggtcatgggcacacagaggtgttctcagctcagggcttatgcttgcttgcactgtcttcttatcccctgggctgcccttctagccacgcctcccccgagttttaaaggtagatcttctttgttgaggaaactggggtcactgtttttataatatccaaaatattgtggagcattttggacttctttttgtggatctgtgtgtggaggtgtgcacctgtggtgtctgtttgcatttggatgttagcatgtgcacagcatgccacagcaaggcacacgtgaggaagtcagagggcagcctgggttgttagtcttctgacatttttggcaattccatgccaattattttatagagtaaccccagttgttccagttgcctttgacaccttctggtgcttgagattgaacctagggcctcacacacagcaggcaagcattctccagcagccgctgctggctttggtacaccccccaccccgcaccccaacctccaacactggggcttacgtctgtctttgtgatgagattcagatgatggatctgtggcaggaatagctcagaagtgatggttggatcctattaggcatgtgatttcagtttgtcctgtgactgtgggtgtgccttttatcaactacaatcggtctttcagctctcctctctgaagttgctcttttcttctctgtagtgaacaactcttccatgcatagctaccttaaacggtcataaacttctttaaacttcgcattatagacacacactcataaatatttatatttatcaatatagaatatatataatataattcataatatgtgattttatgaattcccattttgttcagtggtttatggtctgtaactattatttcattttgatgatgatatagtcacttattaggccattaggaagtcctcttccaaatagaaagttttttaataaattaatataaaacagagagtcttggagcacaggttttcttctgttaccttctttgttgaggtatagttggctcttttgggcatacagctctatgccatgggactgggtcatagtcactgaggtatgaaatggacccttcgctgcagagtggctgtccctgtcatcatcctctgtcctccctgcagagtaccctgtgagtggggtcagaaggatgtggtcctctgatttcttgttgcctttaacccatcacagtggagcctcattcatggtgttgtgtgccctcgttccctgtggctgctggtaccaagtaccatagcttggcttaaaatagcagaaactcactttcttacagttcccagcccaggagtctgaaatcacgggattggcagagccgagttcccctgagtgctcagggaagtctttccttaacctctctctggtgttttcgttagtaaaacccttggtttgtagctctgttgctgccgcctgcacttctgttgtcatgtgaccttcccatgtgtctgtgatttccctctttccttggatgcagggccacggaattctagtacgagcaccttctaaattaatgagtgacatgcaaaggtcctgatttttctctttcccttttcttctccctccacctccccgtcttcttctgaggcaaggttttattctgcaatccaggttgacctggaactcactgtatgacacagagcagcctcaaacctgggacagtccttctgcctcaaccctggggtgctggaatcccaggcaccacgacgtccagcttcttgtgcagttgtgcgctcctgtaaatacctagcagtagaattggtggacggtgtggtgaaagtgacctttatctctctccctctcttggtctgtgtctgttgctaatgctggagcctggacttagtgtttaatatgctaaccaagccctttaccactagtccatatcccccgccccctagctttacctttataggaggttgccgcctggtttgcaaagtgactatagttttccattccaccaggaagacataagaatcccacagcccttgtcttctccagctcttgatgtttcaggcttaaacacaaaaagtcatctgggtgtggcagcatatgcttttaatcccagcagctgggatgcacaggcaagtctatctctctgagcctgaggttaggtcggatggggaggtatagaaagatgtctcaaaaaatacataaaaaaaatttaaaaagtaaaaaataaaaataaaaaaaaaccagccacatatacacacgcgccttgccatcttaataatttttttaagtatataattcagcggcattaaacatatttatatgaggcaggggtaggtggatatctgtgaggccagtctaatctacaaagtgactctgggacatccaggactcaaacaaacaaacaaacccaccaaaaaaacaaaaaaagcaacaacaaaaccctccccattattagttacaaggaaaatgcaaactgagccctgcgttatggacgaaacacaaagaacagctgctatagaaaccaggcagctcctgggactcacatatgatccagcaagcacagcaggaaaaccctgtcttgaaaaaccaaaacaaacaaaaactcaaccaaccaaacaaaaacattcatatgattgttcagtccatctccaggactttttcaccttctaaactgtaagtctgtacttgttgaaaaacaattctgttttccctttcctggcctggcagccaccctctgctctctgctcatggatggggctgtgctacgtgcctcatttaatcaaacactgcttgtcttcttgtgactaagttgtttcacctcacacgatttcctcaagtttcatgcatattgtaacaggatttccttcccttttaagggtgaataatattctattgtatgtgcataccacatgtgtttatctgttcatctggtggacactgccttgctctgcctcttgactggtgcataatcctgttgtgaatgtgctgtggtaggcagctctctcaagtctctatttcctgttttgtgacagggctcaggtgtctaggctggcctcaaactagctagtagctgaagataacagtggacttctaatcctcctgcctctacctccctccggctgacactcactctctctcttccccagttaatagccatcctaatagattggatattttagtagacaaggcttgggtgtcccatttggtcttcagtttacattttcctgacaactaataatgttgagggtcttttgtgtttgtcttttgagaggtagccttttgactgggctggaattcactgtgtagcccaagctaaccccaagctcagagatctgcctgcttctgcctcctgagtgccgggagtgctcgccccagttgcagcatctttattggacttgtgctgtcccttgtcccttgtccctcgtccctctctttcctccttttcctcctcctccctccctcctgctacactctccttccttctccccttcctccttctgataacaccaatagcaacagctatcactgctgttgtttcatagacaaggtctcactttgtagcccaggctgcccttgaactgctagtgatccccttgcctcagcctccctagtgctgggatttcaggctggggaccagggacatcttaataatatagagtctttatttttgagtatggttctatttccaaacattacagaaacacagattttagttgtttcttataatcacttacttacagttctctttttaaatatgttttcctcttgttatattttaattaacaaagtatatatttataatgtacagccttcctcttttccttctgccgggattgactttaggatgtaagttggtcaggcactctcccactgagctccatccatgctttggtacctgggactggtatctcaagctaattagctacactgactctcatctcatcactcttcctgagactctgctcttagacgtttttggttctacaatatgtagttagtaattatagtcactaagaagtccagtagatcctttggacagttcctcctagccattcatgtttatgttttgtttgggaacagggttggctggcctaccactcactgcgtagcttcaggctggcttggaattctgttctcctgcctcagtctcctgggtgctggattaaagattgtaccaccacccaagcacagcctgtgactttgtttgtttttgctataccattggatgttaagcagactactattttaatatgattaagggccagttctttatcccagcggccgatctgaaagctcttctcctctagtgcagaggccctcaaggggatgcggagtatcagtcaagtaagccaaagcctgctgtccaggcctcttctgacttccttagcatgggctccactgtcaggtcaaagttgtccacaaatgggactggcacatgcgcactgcacgcagtgaggaggaaagggacaattcctgtgagggctagggctgtgctctctggatagaaaagaagtaatccttccactgtcatcttcagtctgagtcacagctcgggcacctgttggttgtgtgtcctgcttattaggcaattacagagcaggagcctaaaggcttccctctatactgggctctctgagtgtggaattttagctttttgtagccttcatataacatacatagtcctttcagattgcatcaccaaagccagctgcgaattgtatcacctaaggcttctatgctacattataacaaagggtagagtgtgcatcatcctgtttataaatgtttactaaattctgaagaagttaagaacaatctggtaagccagggagacagtgctcatcacaggagggtctaaaaggacgactttacctcgggcagttggtaggttcactaccaatacatatggatataatgaagccagagttggcatcacatgtgttagagagccaaggcttgaagccccaggctttgaccctaggtcagtctcagtgggcttcgtttactaagtttctgtccacagtttcaggggggttctaaggaaaaggaaagcaaagcaagaaagtggactggcagagcctggctggcacccacagctgtggatacagggcttcctctgagggccaggaactgggcagaattctctccatatacacttagtttctacagaatcccctggaggttggtctatggatttggtagttgtcaaacagcatagcaacaaattgtccaaagcaagaacccctaataaataataatggaatggtagcacagttgtagactttaaattcactgtaatgccttgactcaccacacaaagataatgaaaagggtaccattaacaaattagagtctctgtttaccaaaggatgtgcatttgtgtgtgtgtatgtgtgtgtgtgtgtactcgagatttattctctaaaaggaaaatacctttttagatattcgtagaaaaattttaaactatcttcctgattttacatgtgtgacttgcttattataggagtacgtggcatcctttttgcattctgactttctcaatagctagcatggcttcagtaagtgcccttaacacagaagccccatagtgcatgcagtattttgtgcctcccgtccttctgtctcgaacagtgccccatgtctaagcagtctcctaaggaaatgtccagttgctcatagactttaccacacacacatagcacagctctccagggttggacatggggctgctctgctgccagttcagccggcccgtgcttgtgcatgttgctgtatgcctgcttgggttatttttacaagactaggaacttctcaggagaaactgaacctaaatggtataaaattataaaccaaaattaatttaaaatccaaccacttaaaagaaatgaaatccttaaaaaaattagatgtgttgttagagactagtcagactgtgacaaaaggacagcatttgagtagcacacatacacataccaagtgtagcacatgcatagctagctactcgagttaacagactgtgctcctacgtcaggaagaactgtctgacacctggtggcacacacagtcgtcctaacacctgagagtcatggtcagcctgaatgataagactcaataacagaacaagcaaacaaacaaaaactcaggattgtgtgaataaaaagtaaactgtgagggatgtgtatatcagagctagaagagacatgtgtgcacatgcaaccgtattcccttctctgaaattatacttaaaaaaaaaaaaaggttttggcataaggtcttattgtgtatccctggctagcctggaactcctatagaccaagctggccttgaactcacagagatctacctgtctctgtctcccaaatgttgggattaaagatatgcactaccacacctaactttacaattttattactactttaaaattatgaatatgtgtgtatctttgtgtagatacgtgcatgtgggtaggggtacctttggaaaccagaagaaggtttgaagtccctggagctggagctataggtggctgtgaactgcctgatgtacgtgctggaaactggacttggtttctctggaagaacaggaaatgctcttaacctgctgagccatctctttagctgctccccacaaccccctccaccccaacagccctattttaaaaagacagggtctggccagatagcttagactagcttggaactctaatttctcctacttcagtgtctgccccaagtgctggaattatggatatgtaatccctttgcaaaaatatactttttattaggtaaaactttaatgtattctcatttttgtctatgtttttattccgtgtcaagagctcttggcctaaaatgatttactttgtaagttgtattaaatggaaaatattatcaaaaatggtggtgtacacctgtgatctcagcattcagaaggtggagtcagaagattgtaaagctcatggccagcttggcctacaggaaaaacaacccctaactaccttcccccaaagaaaattattctgtaggttttctgtttgtttgtttgtttttaaacctggttttctgggctataaaacatgcctaaaggaaaatggcagaagatactgcagtgattcggtgttgtgaccagcagacagacaagtagtcatttcaaatacctgcttctccatcgccccattgacctctttagcagcttttgaaatccctcccatcctcatctggaaaatccattcctccctgcgtgtttgcatgtcagctctttaaacctttgggttttaaactttagggtcatagcataagtggcacgaatgtggcaccaagcagctgtagaacacccttgctttccagtttggaagctaacttctcagttctctggccccttggcttccaacatttccttttcttgagacaaagtctccctgtgtaagcctggctgtcctgattatttccaggatgtcgacagggctggctcagcccagagatccacctgcctctgcctccagagtgctgcgattgaaagcgtgtgccaccaccatgcctggcataatctttgttggtttttgttggtttgtctgtttggtactactagggtacaacctatagcctgtaccactgagctgtggcctcatctggcaaatgtttcttgaatacctattgtgtggcaggctcagtataggacctaggaaacatggaaatgagtaagacagcttccccctcccccctccccctagtctcaagttccattatttttggtttaaaacccttggctctgattctccccatgaagaaggctctgcttccagccacaaatggccttaaaatctcagaggaacatctgtggggaccacctagaagatttgttgttgttgttgttgtttgtttgtttttaaccatctcagaaaccctttgcatacctctggggtcagctcctgcttcctcacctctcccggcagctctcgctgctagccagacttcagtcttctgcagctggacctcggcctttgctctcagctgctgctcgtctgggtactgccccagatgaactgttctgcgaggccctagacggcactgccatctgcgagcctgtgctttgggcatgttctcaacctctttaagtcggtttgtagggtatgatactgataattgtatgtagggtaaaccacaggaagcacaggcattggcaagggggttgggaactggtgtgtgtcaagggaacgcgcatatagagataagaggttctttccaacgccactagttagattctgtttatatatgttcaccgctcatagcttgtggcttttgtgacagagtcgtttgctcaaaacttaaaagcgagagggaattttatttccagggtcataaggcttaggagtcagccctgctcttgggcactgagtgctctcctccagtcctgaaacaacagtcattcatccaagcacagtttgagagaatgagaaaggacagcgaccttgtgtccacatgagacttagaagaccattttacaagtcattttagcatgaattatttccaggaaagacttccactggtcactaatatttgttttatgtcgtgtcttactttcttttgcagaaattgaccttatttctaagttctttgtgggagtctgtcccttgcagaccaaatgcattttgcaactgggattcctctctgggtgctttgctgctgtttgcctgagttttgctttcggccgtgtgttctcttctgctgaagggaggagcaaggagcacagaaagttagtggcttacttaatgcttgtggaatgcgtatctgtcccagcataggactgtgaccagggagatggctgtcatattttcatataaatatgaaccgtgcttttcttcttcttctttctttttatctaaccatatgtgataaataagagacttggagaataagagagagaagttgacagctcatgaatctccagtggtctgcaattagcctttgcttgaaattatagaaggagtaagggaacactggcccccagcactgaattaggaacatctgtgtctatgagaacttgagcaacaacactgaacgactggaactgagccatctgcatcctgcccttccatgtggttccaggcgtccctgcaatgaggggtcagcaatggcgcagatgcctgagaggctgggggtgtagctcaattggtatagtgcttgtcttacattctcaaagcccggggttcgattcctagaactgcataaataaggcaagatggcacacacttgtaatccaagcattcagaaggtggaagcaggaagagcgtaagttcaaggccatcctcagctacagaacaagttcaaggccagctgacacatggggttttgtttgtttgtttgtttgtttgtttgtttgaatactccaatgttttaaaaaggcaactgccacaacaatagccacctgtagtcctgacttctcgtgaggctaaggcagggggttcttcggctcagtttgtctacctttaacctgcggataatcagtaatgccagtgccattggattgttgcttgactggggggtataaatgagttctcatatataacactgcttgaacagtgcttggtacaaggtgagccaggcaggcgttgtctcagcattgttctgctgcccctgccattaccacagcagcagttactgccagcatcatgctccctgtggcacggtgcacacgcgcagcagagtgctgcccctcagcagctcagagtcctgtgcaggtctagaccatatgtctgctgctaagacccacgtcccaggactgtggtgagggtgaagcctgcagtctgcctagcggtgtgggtgactgcagtggtggaagaaatacttaaccctgatgttaccgatgtgaccacagcagtttctgacaaaggagctgttcacaccagggttttattctccattgtgaattgtgccccttgtaagtcatttgttcttactaatgaagttctggtacttgacaatgaacttttaaagaatgactagaggtgatggactcagcagttaggagtgggctctgcacttgcaaaggacccaagttttggtcccagcacccagactggacagctcacagctgcctgtaacttcagctccagggtcagtgttctcttctcccctcttgaacctgcagtcacatgcacatatctacacacacacacacacacacacacacacagagagagagagagagagagagagagagagagacaattaaaataaaataatccttaaaaagaaattaaaaggcaggtgtggtgtatctgccttttatcccaacagagactgatgggcctctgacttcaaggccattctgattaagtccaggacagctctgactacacagggagaccttgtctcaagaagccaaactaggaatgagcaggactgcggctagtggaagctgtccccaccatcacctcactacacttccatcttgaaaagtaggtagacgtttggaagagagtcatgcaacccccaagattgctaacatgcagctacacttggaacaccttggtacaaggttcctacagctgttgctgagttatttgtgtgggcagaaaacaagtctgagagttacaggtcttggggtgctgttgggatggtgggaccccatccatctgctgcttccatgttcacattcatctgtgtggttgtcaggctaaggcgctgtaatcctccacaacacagctgcacttatcttgtccacacatactcatgtgccagcgaaatacttcttccagttattaaaaaatcacttttctattacatcaaccagctattgtttctagccctgaatttatttattagtattattgagtacctgttatgaatagatatcctggtgcttatgaagataattcaaacaatatctgttcaaaaagtcttagctgggcatgatggcttatggccatagtctgcacttgggaagcagagggagaaggatttccaggccagcctgggttacatagtcacaccctggctctaaagcagcaataaagtcacttacaatcaagtctgacaaactgactctttgcataactctagcacaaaaccattgactttaatatactttctcttttttatctgccagccagcccgcctccttctcttccttcctttcttccttccaagacgagatgtgatagggtttcatgtagcccaggctggcctcagacttactaggcagtcaagtctgaccttagactcctgatcctctgactcttctgcttctacctcctaagtaacacctgacattattatttttttaaacttaaacacacacacacacacacacactactgtcttaaatttttatgtatatgggtgttttgcctactttatgactatataccatgcccatgcctggtgcccatggaggccagaagagggtataagatttcctaaaagtagaattacagataattgtgaaccaacatgtggatactgggactctatctagtccaggtcctcagaagagcagccatctttccagtcccctcatttttaaacttttctgttcactaagggtgtgctggtacacatgggtaatcctggaacttgggagggcaaggcaggagaatcaagagtttgggatcagtcagggctacatagtaagactgtttccaaaaacaaaaaacaaaaaaaaaaaaaaatctttcacattcagggaaaatgataaatatattgcatttatgtggagcttggttcttaagtctaggtttttaactataaaaataatatatgctcataaaatttaaaagatatttaaaattaaaaaggaataagttgtgtgtgtgtgtgtggcacctgggaggcagaagtaggtggatctctgtgagttcaaggcctgcctcgtctatgtaatgagttctaggcaagccagaactatatagagagaccttgtctcaaaaagtggggagggacagaaaaactagtcacactcacacacacacacacacacacacacacacacacacacacatattttgcttttgagacaaggtcttttgtagcccagaatacctgcaatttgcaatgtagctagagatgaccttgaacttctgcccctcctatctgcctctcctgactactgggattgaaggtgtgtgccacaatgcctagtttataggtgaaactcagggcttcaagcacttcaccagcagaaccacatttccaggccccagccatcctgtaggaactgggaaatgtcattttaataatttcattttagttctcctatgtcttttatacaggtgatgtgattttccctccccgtctcatggtttctgtctcccttcctgtgacccttaccataccccaagtgtgtgtgtgtgtgtatgagtgtgtgtgtgagtgtgtgtgtgagtgtgtgtgagtgtgtgtgtgagtgtgtgtgtgtgtgtgtaagtgtgtgtgtgtgtgtgtgtgtgtgtgcgcgcgcgagtgtgtgcatgcgtgtgtgctgtgcacatgtgttcctggacattcaattcaggctttctgcactgcagtcagatagtttgcggctgatcctcctgcttcagcctctttagccctaactttccaagtttgtattctggcattaccttttgtttcagctattatataataattattttcccacgtcattaacatactttgtaaatgcagttttcaaagccaaacaatatttcatcatctttgacacataatccccacccattcccaaaatgtcagacactgattttcttttattagaaataatatagtagtaagcaaatttatgtgacccatctatatttgattataaatttctgccagtaaatcagtccaagggaactgtctgcaagggttggctgcatgtggcctcactgcttttggcaatggtgtttagtctcacaaaagtctggtgctgactggtgtagatatttattatttagctgcaggagaccctcagcttttctggaactcacacttgaagtgtttcatgtttactactcaaaatgattccaaagtcttatgacataaagacattttcatatttattgaagctcacgattacatgggctaagcagctgaggacgactagtactgcctagcaaatgtgtcactggggcctcctagtcctatgcagaacctcttatacattggcttaaatacttaccttttctgagtatagaggatgtctgtggggactggagaggtggctcagaagtaaagagcaccagctgctcttccagagggctcgagctcagtccccagcacccacatggctagcagccctatgcaactctagttccaaatgatctgatcccctctgttgggctctgcaggcaccaggcatgtggtgcacagacatacatgcaggcagaacaccttacctcataaaacaaaaataaatcaacctttttttaaaaagaggacttctgtgaaaattgggaaggctattagtttatggtatacagacctgtagaagagaactgtatctgccacagaaatgtactcaagagaaagctcagaggacattgacacttccagctgaagacctacaaatgccatcttgtttctacttgttagattgcatatattaatcttttactcctagcaaataaagctgtctttctttttttatatataaggttttttttttaaagatttattattttacatatgtgagtacactgttgctctcttcagacacaccagaagagggcataggatccaattacaggtggttgtgagccaccatgcggtttctgggaattgaactcaggacctctggaagagcagtcagtgcttttaactgctgagccatctctccagccccatggctttattcttagtaccaaccaaagtaattattttctttataaaaagtcatgtgtacatgcatgtaattaaacatgagtgcatctatgaagctgccattgtgttgggctactgagcatgttcctaccacttacatactttagctttaaaggaggctctttaggaaagaaaatatatgggaaataggttaatcagtttctgagaaaaactaagcaagaggggcactgcctcggccaaccgcaagtgttactagcacatatctgcttattgcagtcttttctgcgccagtgtgtgtgtgcacactttaaagagaaccacccatcccagcagtccctgccatcacagacttagagcggcttcctcccttccctctgctgactgggagctgtggtagctatagtcacctcctgtctggtcccaggaatgttcatagcttttagtttatagtctctggcaaacttgcaccccaagtccttcctttgagagatttttcccattgaagattttaaactacacaaagtaatgcccccatcttgtattggacagcctcacacttcttcctgtctggtcctttcatacaagctctgttccaggcatgagcattacctataatgtgccaacccccagactgttatggactaaatggcataaaagggctcaggtctgattggcgttggtttccattgttgccttattccccagcctcttggtctactcaacccccgactagccttcagctaggccatcactaggttccagccagaactgagccagagggactcagggcgctgctgcacattctgtaatttggcctccagtccccatttttggccgtgtgccttagctctgggctcttgtctgggtcctctgtgccagaatcccatggtaacctgcctcatttctctgtttcttgtttttatcagcctcattcccagggactgaaacccagggaccattgccctccctcccttctgcctgctgtttggggtcacactctggagcagtttctccttgttttggtgctcacactcaggaagtctctgtgctggacacttacctcaccagagggcagctgcacccttccagttcttcaggccagaattctggggtcatcacttcccctcttattcactcttatctaagcctgcagcaaagcacactcagtgctggacaggtagctcagttggaagaatgattatctaggtaggtagcatgcaccaaaccctagctccagacccttgtactggatgagcacggcatggcgacacatgcttgcgttccctgtgtttgggaggtaaaagcaagagaatcagaagtgcaaggtgatctccagccacatagtgagttagaggctatcctggaatactcgagactctgtacctccccagagctccctacaataaaagtataaccttgtaatcctagcacgtgggaagtgaagttgagaggatcatgaatgcagggccatccttggctaaatagctggtttgaggccagcctgggctctatgagatcatttctcaaaatgagtaaatgaatttgtaaacaattgtaaaaaccctttagaatcttggctactccgtctggcccactgtcctctcctccctggatttttgcagtgaccttcccactggcttctgacaggagagtcctgtctctttcatcgtattttcagaacagcctctgaatgaacatggcagggatgctccgctttcagccttgcagtggcttcgtggtgttcagtgtgtagccaaaggcaaatgaagcaccccagtgccccatatctcccgtcacctctgctcctccccgctcactgcctcagcctgacatccttcctcaccacgaacacttggccacacttagattctctgtccctccagcctcctctagttctctgaaggggccattcctccagccttccaaaagctcacctcactttcctcagttcttcattcccatcagtgggctgccatcttgaagttacaattccacctcagtcattgcaggtcgcttatctcctcagcctgccactctcccatacctgatcgggttcttccttcctttcctttttctcttctcttctcttctcttctcttctcttctcttctcttctcttctcttctcttctcttctcttctcttctcttcttttcttttcttttcttttcttttctcaagacagggtttctctgtgtagccctggctgtcctggaactcactttgtagaccaggctggcctggaactcagaaatctgcctgcctctgcttcctgagtgctgggattaaaggcgtgcactactactgcctggctacctgatcggtttcttgtctgccatttatcttttatcaggacacaaactccagaaggcaaaagtgccacagtctagcatagtctcatctcatgagtagcaagcagttcatagttactgactgctgggaagaatggaaagttgaaaggtttctttacctgtgtgttaacacattttatgtgtattataatacatcttatatgtatgtacagtctcgtggtgaccttatatggggctgctcttgcgattcccactttataggtagaaagctgaggttaacaacctacccaaggttgtctgagccaacaggtgggtgttcagatggggtggcagggctgcaggagtgtaagctttagatcgtcaacaactacatgtgtccagtctcagccctgtcgcaactgctgagtttaagcctccacagcttcagttcccttacatacaaactgtgggcagttgactttctctcggattgcatgaaggcttatgggagatcttgagtatgtcattttcttttctttttttttttaagatttatttatttatcatatgtaagtacactgtagctgtcttcagacacgccagaagagggagtcagatctcattacggatggttgtgagccaccatgtggttgctgggatttgaactccggacctttgaaagagcagtcgggtgctcttacccactgagccatctcaccagcccccccccccttttttttattggtggagttgaaattttttaaaaaatatttttattggccttttggaattcttttagatactttctgtttataactttttccagctttctttttggtttctttctaattaacttgggaggaattctttgaatagtagagatctgtgctgttttacaagtagtctttctcatactccctcactgtttaatgatgtttttgttaatatcttctcttcatgttgttaaaggtccagtgttggttgatactcaagtcaatgagaatacagattcattcactcagcaaatatttccttaaagccggatcatttgggggtgcctattcagctaggacagccctaaaccctgactttcagtctgtgccactgataatggcccttcacgctggcttgagcggattcctgaaaaagaatgttttctcagaggcaaggagacccaaacatttcccagattttggccacataatcagaaatttcaaaagagttctggaatttatgggctggcctccaagttatcaggcatctgtcgtcttctccgagggcagtttactctgagctcagtccaccctcctccctcagctgtgcagagcaaatggggcagatgagaaatacttcagacgtccccgtgggatgaactccaaagacagcctcagcagctagacgcagaattcatatggccagggtttggcaggctcttctgaggtaccgtggcttcctatcagaccaccggctctgcagccctgccaaggcctgggtgctgcagacctggggagtgagtgtggtatccagatgctgcctccactggctcaggtttgctttgaatctgaactgaaagtcttaggccttcgactgctgccctgaatggccagagtggccttcctggaccaggttggatttgtgcagacatcttacacaggacttcgtatcttgtaggttgagccacttggtgttcagtaaaatgggtctctcagataccttgtttcatcatttcacttttaattatgtgagggtgggtatgtacacctgagtgcaggtgctgatggaagccagtggtgtctctggagctagggttacaggcagttgtgagctgcccaatgtaggttccaggggccaaatttgagtcttctgcaagagtagtatgtgctcttaactgctagctctccagctcctcagatatctttattactatacaagcccatctgtcccccacccccacccctgggtatgcatctctctgcctctcttttgtttatgccatgctagagatcaaacccagcccttttgcgtgtgctcagccactgctggctgagctatgtccctagtgtcccaagtgttttctttcttagatttttatttttattggtgtgtgttttgtgtgtgtgtgtgtgtgtgtgtgtgtgtgtgtgtgtgtgtgtgtgtgtgtatttctatgcttgcagaggccagaaagagggagcagaagtcacagatggctgtgagatgcctgctgtggctgctggggactgagcacaggttaggcgcacacttactgcagagccagccacagacaccatggcacacgtctgtaatcctagcactcaagacgtcgaagtacaaagatcacaagtttgaggcctacctaggctacctagtgagactctgcctcaaacaaaacaattaatacttgtcagccatctgatgcatgaaatatatacaattttcatgccctgatttggcatcttaggatggttgctgatcagaggtgttgtccctgaaggccaactggatctcattactagctgctcagtaactcacattgggaccttaggcaaggttattagcctctctgcacctaacttatgcatcagtgagctctggtgactaagagtacctaaggtagactggaaggattaaattagctaataatacatgaacatcccagaataatgcccagtatgtacttattgcttaatgaatattgcaaaattcctgtaccaacttctgctgggtgaaatgctagaaaccgggccaccttgtgtgatttcagtaaacgctgatcccacctttcctgtctgtgtggtatgctgtctagggctagagaactaagttttgctatttatataaagcttcttttgttttcatttttcaggtgaggattcatgtatccaaagctgcattagagcccagatgagagtggcctagaactctgtgtagggtgggggagaggagggaactcactatgtacccctggctggattgaaactaattttgtagatagaccaggctgatgtggacttcatagaaatccacctgcctctacctcccaggtatttggaccaaaggtgggtgctaccatgcctgacaaccttcaacttctaatttttctgtctttgcctcccaagtggtgggaccacaggcatgtgccactatagccagtttataccatgctggggaattgaacccagggcttcacaagtgttaggtaagcactctgctaattgtgccacagtcttaacctcttctgtcccctgccccacagccccctatcctttcaaccagatcttactgtgtagcctagactggcctggaacttgtaatcctgtgtcagcttttcaagtgctagagttacaggcgtgtgctaccacaccggccttacataaagctccttagaatctgtgcaggctggttaacatctgagtgtttcctcattggctggataaaaataaccttgctgaagtcttagctgccctggctggggtcatccagactgtatgtgaaggcactgagtgcaactccaggagaggcagggacctaggcagtggcagagcagggcaagggcggaagctgtttctccaggtgcccttacatttggactctgaaattcagttctcattcctctctctggaaccaggccctgattgttaggtcgctaaagagtggcaggtgggagccacaagcagcacactgcctgtctctaaatttttaagtcaccacatattttggctgtagaatcagccaaagttttgttccagttccttacaaaatttcacaacatttcaggcgttagaattggtccctgtgttgtgaagcagctgggttttatactttagacttgaagatgaaggcttagtggttgattattacgttgggtgttttccaagagtcaatgccatctgtggaagtttctctgttgtccctaatgccaggttctgtagcagtttctctgttcaaaaatacagcctgtgttcaggacactccctgggtacagaaattggtttccttggcaacagatagctggtgtcttagctcttttctttctttactcttggggatgtaacttcagaaagctttcccctcccattttctcctgaaaacccgttggaggcagtcacagtagtagctgttcgatacccatctctcagtaccagggactgaacgcggcttttgctaagtaggcactcatatcattgagccgtgtcctcatccctgtttaaatggtttattttgggatagtgtctcagtgaggtgcctaggctggcctcctccttgctctgtaactcagacagactgggagctctcagccttccagccttaggcttgccccagcaggtccagctcacacttcccatttttgaggggagtaggaggatcctaggaattgaacccaggactttataagtgctggcaaatacactgccactaagctagacttccagagattctagtttgtttattctttgtctatgtgtctgtgtgtgcgcacatgtgtgtttgtagatattggaagccacagggtatgtgtggaggtcagagaacagctttcaaggagagttggttccctgctttcaccatctgggttctgagggtgtcatcgtgtttttaacacatgtattttttattattgtgtgtgatgtgtggatgtgtgtgcgtgcgtgcccgatccccacctagcgtgtgttagtgtatgttagagtttcttcttctttcatgggctccagggctgacctcagtcttgggcagcaaacacttaatgcactgagtcacctcaccagccctggtgtaatttccgagtgcagagggaaacacttccccacagtgttagccaggaggggctcatttgattgagacagcctactatctcgtcccaactagcctgaaactctcaacatagaccaggctggccttgagcttgtactgattctcctgcctctgcctcctggattccaggactcctgcacctgctggtctcaggttggctctggtactgcgggttgaacccacttccctaagctacactccagtctctaggcaggagtccggtggtgctcggaggacagaagtgttgagtgtctgagctctgtctgtgtgctctgccacttcattctcctgctggagtgcaggttggcatcttcatccccattatactgatgctttcacagtgacataccaaaggtcgcacagtggcaagtgacggtgtcatgactctgacccagtttatctttcccaggcctttgctcttatttagcaaataaaatagaatacccagaatcaatcatgtgttttattcttttccagtctgtataattgctttacctttttttttttttcccctcctggacccttcagctagtcacggtggcgtcacttttgcttggctcttctcttagattatgtgttggtttttcattccctcggccacctgagcaatctttttattaatctaagcctaccttcacccctcagccaactttccctccctccctcagcttctaaggaagtgtgtctctgtggcggtcccacgctcgtgcactgagcatttcacgctggaacctggtcaggaaaggccagagctagcagtctgctccctgaagtggtctctccactgggagggggcagccaggccaggggtatgagctacccagcaagagcagacatggccactctgagcatggtcttccctcccctgaagtgtccatgcccgaacttatctcttcagtatctcaccgacatcttggcattcatgaagttgctcaacagatacattggaccagtctgtgcctgtttagcttctgagtagtttttgacagttgtttaaagttaattaatcagggtagtcatctaaaagttttaatacatgcagttattatatgataattaaaaagaaaaaaaaataagagcttagaaaagctccagagttaaatgtaacttaaaacagagtggcgagcctgctaaacaaagggcctgggagcgcttgtgtagccttgactgggttctggcagcagcagcggccctctttgtcacagtcctctgtccattttgattacttgcccttgaggaataacaaaattgtagcggcagagcagactgcactctttcagtacataggtggaaaactggaagcgagagagatctagccgtcagccgcagctgctgttgtctagccgcagttgtgcagcccagtctgaagctttgcagcccggtgcaatttgccacggtatttgcctttgtttctcaagtagagaggaaattcacttctttcttcttttctctttttcatttttctttttatgttttgtgcctttgagacagtaccttgctgtgtagctttggctagtctggaactcactatgtagaccaggctggtcttgaactcacagtgatcctcctgcctctgtttctctgacaggtgagcttcataatacctgacttccttcccttctttcaatcaggtttctaccaggaatagtttgtgcttctgctacatctgtctctaccaatactgggcgcatagaaacgaccacgtagcatacacggtggctagggctttgcatatgttatttatttcttccaggaaccccagagtaggtgctattactgtccccagctaatgtatgtgggcaaagatggaggctaacaaggctcaaggaccttcctagcccacagagctgtgtaccggcagattaaagccaggctcttttgttctagagtttatgcttgtaaccatagaggtcctggcaatggcttttcttcttttgttggttttctgaaacagaactattttctctgaatgcagaagttgaaacctgttaaggaaattcaaccagagtatttcttgaagaaaaaaaaggaaaccgtttcctgctttcttcatttgttaaccccatgacatcattggggccgaggcactctggtctcccagcttcacaccgaggaatgaagtggacataatgcctcaggagctccaggagctgtgaggggcgacacttggcactctctgactgtttggtaccctttgtttgatttttctctgcctacatttggttcttgacacttatagaactgtgcatccaagtcacggagaaaaggcaaacgagcccctgccaggactgcagcttcccagctgtgctgggcaagggctcccctcgctgtgcccctagctgggcaagggctcccctcgctgtgtccctagctgggcaagggctccccttcgctgtgcccctagtctcatgatctttggattcagcaacctctggcactttgagtttgttgtgttttcccataggtagaccatcaggacgtaggaaactaaagccatgtagacatttggaagtgtttgttgtcactgtaatcagtgaaatgttgcacctccggtggggtggcagttaggagttccagagcccgggccagaccctgcctcttctcttcctgagctttgcagcacatggagtgcttgagcctcagtttcctcatctgtttattggggtagtactagtccctcttcacagagttgctgtggggattaaataagacatttgtgaaacattagcattgtgtcatgtgcactctaagtgccagttcaggctaattattattaggctaacagttcagactttttaacccattcagttaggaaacaatttgagttaactctttgttgttggtgagaatactgaaatttgtgcctagtataaagacattgaaatttggtacatgtcttttaaaagcagtttaagatcatgtttctcattaatatagagaatattaagatttcagctgggccgtagtggtgcacgcctttaatcccagcacttgagaggcagaggcaggctgatttctgagtttgaagccagcctggtctacatagagagttctaggacatccaggactacacagagaaactgtaccatgaaaaaccaaaacaaaagatttcttcgattgattatataaagggagactatcataagagagtaaaccattatactcttatggaggggttctctgtaaacatgagtagagaagtggaacaggccatgtgggatctcctgtgcttgtgtgtgcagcaggaatgaatgcccaggccctctgcatgctagacagatgctgcactccagctcttgatctcacactctgggctgcaagcatatgcaaggaaacttgtaatagtttcttaagtaatacgtatattatgctactgtcctaatgacaccaagtaatgactactctagctaacccagaaggctataatttaaatcattattttttaagttgttattaggctagagatagtaggacatagctgttatttcagcttttgggagactgagacaggagaattgtggcaaggttgagaccagccttgactacatagtgagttctaggccagccagggctatgtagtgaaactctgctttaagcaagcaagcaagtaaacaaacaactgggaaggttaagaaacaagccaagtaggcatgttttaaacccagaactttggaggcagagacaaaacaatcagaagttcaagactgtccttggctacatggcagatctgaggctagtccggactccataagaccctgtctgataaaacaaaccaaaaaaaagaagtgatttgaagaagaactcaaactgtggttatcattctagcacacccacctgaggtctcagcaacacggtcattactgagggcagcattagcatctccagcggtgagcaaggcagcatgtctactctgcatgtacactgctcaaaaataaaacaaaagttttggtgcagcaaagcactcccgaaccagaatggccctgtcacatgcccagcttcggggacactaagaaagaacacagggaacaaaaccactggacacagcagcagctgtatctggatggaaagagcatcatctgcctccctgtcctgtgtccctaacctatgtgtaatgtgctcatgccacctggtagttttgttcagttcattgtaattcagcacttgggaggctgaggcaggaggattgttaaagtttgaggcctgcctgggcaacaaagtaaaccctttctcaaacacaacaagctgtggaaatgagaaaccttcacatattttttgaatacagtttatggtctagacaccctgcttgatgctagagatatggtcatgacccagacgtgccaggtcattgctaggtggaactttagcccagtgggacaggaagatgatcttacaatttttaatactatgtgataaacctgcaattgaggaatgcagagctggaacacctcagagtgctgcctaatccagactgcagccaaggaagccttcctggaggaggaggaggaggaggaggtgttgtactgtgacccacaagaagttggagcagaatgttctatcgagaaaagctgtgtttggcaaataaatccaggaggtagaagaaagcacgtgctgtctgagcagccgaatgtttgctaagtctgaacctgccatccctgtgaggagggtcgggaagagcctagagtgagaagcagaacacagaccttattcttgtcttcaggatgtcaagtctgtcttaggacagtgcaggacgactttaagaatgtctacttgcaagccgggtgtggtggcgcacgcctttaatccagcactcgggaggcagaggtaggcggatttctgagttcgaggacagccaaggctacacaaagaaaccctgtctcaaaaaaaaaaaaacaaaaaaacaaaaaaacaaaaaaaccaaccacaacaaaaaaccaaaccaaacaaacaaacaagaatgtgtacttgctctctgctcgtttgttggctcctccactttgtttaaatacaaagataatctatacttaaatataaacaggacagcccggcctacatactgagaccctgtctcaaagcaaacagacagaaaaacaaataagaaaccccaaaaaagcaaaagcaccctgtcttagtcagggtttctattcctgcacaaacatcatgaccaagaagcaagttggggaggaaagggtttattcggcttacacttccatactgctgttcatcaccaaggaagtcaggactggaactcatgcaggtcaggaagcaggagctgatgcagaggccatggagggatgttctttactggcttgcctcccctggcttgctcagcctgctttcttatagaaccaagattaccagcccagagatggtcccacccacaaggggcctttcccccttgatcactaattgagaaaatgccttacagttggatctcatggaggcatttcctcaaccgaagctcctttctctgtgataactccagctgtgtcaagttgacacaaaactagccagtacaattgaccccttgtcaacttgacacacaaaaacatcactagtaagcttcaacccttacaatcttattcatccccaagatctaaataactttaaaagtcccacagtctttacatattcttaaaatttcaatctctttaaaatatccatctcttttaaaattcaaagtctttttacaattaatagtctcttaactgtgggctccactaaaacagtttcttccttcaagagggaaaatatcagggcacagtcacaagcaaaagcaaaagtcaatctccaaccgtccaatgtctgggatccaactcacgatcttctgggctcctccaagggcttgggtcacttctccagccatgccctttgtagcacacgcgtcatcctctaggctccagatgcctgtactccactgctgctgctgctcttggtggtcatctcatggtactggcatctccaaaacactgcatgaccccttcagtcctgggccttcaattgcaactgaggctgcaccttcaccagtagccttccatggcctctcacagtgccgagcctcagctgctttgcgtgaccccttcatgccttcaaaaccagtaccacctgggtgacccttacatattaccaagtcccgctgcagcaggagtacaaccttggccatctctggaacacagcctctttgtgctttcagaaaacacttcccagaagatgtcacctcaatgatgctggtctcttcttaatcaccgctaatttcttagctccagctaaccggcatcaatagtcccagtaatgcaaagtttttgctttagtagttctggtatcttgttaatcacagctgattcttcagccccagctaaccagaactacacagaatcttcacaatcaaaacagcaatggccctgaaaagagtcttaaattttccctctgaaatttcacaaaccagacctccatcttctgcagtgttctcaacgttatcttccaagctcctacacaacatccgacagagctcttaacaacggatggatcttcaagcccaaagttccaaagtccttccacagtcctccccaaaacatggtcaggttgtcacaggaataccccactcctggtaccaatttgtcttagtcagggtttctattcctgcacaaacatcatgaccaagaagcaagttggggaggaaagggtttattcggcttacacttccatactgctgttcatcaccaaggaagtcaggactggaactcatgcaggtcaggaagcaggagctgatgcagaggccatggagggatgttctttactggcttgcctcccctggcttgctcagcctgctttcttatagaaccaagattaccagcccagagatggtcccacccacaaggggcctttcccccttgatcactaattgagaaaatgccttacagttggatctcatggaggcatttcctcaaccgaagctcctttctctgtgataactccagctgtgtcaagttgacacaaaactagccagtacacaccccaaaccctcaaataatattgaagcattgtaaaatggaaagcagaagcccgttctctcactcacttcatacccaactccagtccccagcagggctcctactgccaagtactgttctcctctttctagaggtgtctgtacacatgcaagcctgtcagctcgcatagatgtactctccttttacacaaccgtcactgtgttacctaacacacatgcgtgcacacacagacacacacacatcacacacagagacacacataaacacagattgcatgcttttcccctgagttctctccccaacccctttatattcattttccatatccagtgccagggtcggctccaggtcctagaacattttaggtacgttgtcgaccacactagctctcatgttcagttagtgcagcacttaataggctctgtagtatgcacctgtattcccacacactcagtaggatgaggtaggatggctcacctgagcccaagttcaagtctaacctaggcaacatagtgagtctctctctctctctctctctcacacacacacacacacagagagagagagagagagagagagagagcagtatagtacacttttctatagtgtttcatttgctagacctgcctcataagagataaatctaaatagcttgtattctttcattattacaaggcaaaactggggcactttctgtaaactcagcatttggaagatggaggtaggtgaatcaaaaatgcaaggcctttcttagttacacagcaagtttgaagccaaccttagttacaggagaccttgtctcaaaaaccaaaacaagaaccctaaagcaaaactgcgctgaccatccttgatatcattcactttggatatttatctgactgtgtctgtagcacaggttcctggagggaaagcaatgaggtaagggctatacaggcaggtgcgccatttgtcatccagtgtgtggtaggctgaggtacaggttagccagtttgagactagttgacttgacagtgagctctggcccttggaaaaggtatgagtgtgagtgtgtgtgtgtgtgtgtgtgtgtgtgtgtacagtttagtgatgttatgtgtactcaattgttgggcaaaattgatccccagaacctcttcatcttagagaataggaggtctgtactgatcaaataannnnnnnnnnnnnnnnnnnnttttcccctcccccagaagccatcattcttctctctgcatctgtgattctgactaagcttgacctcataaatgaaatcatacaaactttgcctttgtgtgacagtctctctcatttagcatgatgccctcaaggctcatctatgctgtattgacaggattcccttccttttaaaggcttagtaatattaccttatgtgcatatatcatccaattacctgttcatcttatgatggaggcttgagttgttttcaccctttggctattgtacgtcaagcagctatgagaatggttataaatatgctcttggatgtgtccccagaagtgggattgctagaccataaggtaggtcacatgcacatgctggcctggaactccttgggggctgggagcgtaggagtgcaaactgcatcccccttctctggtgtttcacgcgtttctgtggcactagggattacacccagagcttgtgcgtgctgtgctctgctgctgagcagccacagccggatcctagccttactttcagtttctgggcgcttgctctctaggcacttacaccatgttatagttccttcctgccaacagtgtctgccctggtttcattcctcttgctgtgataggacactccagctaaagcagcctaaggagagagggtttgacttagcctacttctctgttttctgtttggaagctttgaggtcttttatggtctatggcagtcactgtaacaggtgtaaagtggtaactcatgacttcgtgcttcccagatcgatcgctagagaggcagcgtctgtctcttcatgccatccccagccatttaggtgtcttctatggggaaaggcttatttaagtcatatctgtcattgtctttgccaagggtgtaacaggcaaaagctggagaaggtttctctttgttgaagtcagcaagtctcttactatgagtgaaattaattcattcaacaaataaaattgagtgagcctcatgtgtacagcattctgagatcctggggaggtgtcacacctaagtcaggctgatgcccattctattatttatttatttatttatttatttatttaggttttttcgagacagggtttctctctacagccctggctgttctggaactcactctgtagaccaggctggcctcgaactcagaaatccacctgcctctgcctcccaagtgctgggattaaaggcgtgcgccaccactgcccggccaggctgatgctgttttatgtttctgtggccagtagcagttctgagtaccttatcttttggtagcatataaaaacactttatctgtgttgagcaaattggctttttgtgtattggttgtctgttgttacatttcagattgccttaagtgtggtggttaaagcagcacacatcttatcatctggagtttctgtggtgaaggcccagacaaggcttacctgggttgtcagtttcaggggctcaccaggttcaaatccaattatgggcagaggcatggcctcatcggggactcaactggggattatcttctgtgtttccccagggtggtcagatttactttgtgcttaaagcactgtggtaactgcttggggcagcagctactctgagctcctacaggccatttcacaccatgtggtcttgtctagcatgtccatcagccacacggcagctgactcctgtaagccgggaaggctttccagtgcttctgctagtaaagcaggagcgtcattttgggagtgctgtccatcaccgtgactgtatcctgtcagtagagctgtgtgcaggccctgtccatcaccgtgactgtatcctgtcagtagagctgtgtgcaggccctgtccatcaccgtgactgtatcctgtcagtagagctgtgtgcaggccctgtccacagttgggctgaggattgtgccaagcagtaaagaggaggagagaggtggggactgttgggggccccttgctttgtttattacagtcttctgtataatccaaacactctctccattcagaatgtgtctgggggttttctgctctgtatattgaagacattggtatttgtaatgttgagtttcaactttcagtatgtttagaatagtcttcactttaagatttctcattcactctttttaaaaattcatcttctatcctaatactattactattttggaatttattttctcctccctcaccccagttttgagacagggtcttgctttgaagctcaggctagcttcaaaataaaatatccactgaatatttaattttattattatatgtgtgtatataacatgtatttgtgagtgtggacatgcatttactacagtgatatgtgtggaggtcaaaggataactttcagtaactaatagctttcacttagcatggctaacactttcaccagctgagcaacaatgttagtacatagctaatttattttatttttaactatgtgtacttgtatgtgcctatgtgtggtggcattgaatgctagaagatgttattggatctgctagaactgaagttacaggtgattgtaagctgtctgatgtgaatgctggaaccaaactcaggtcctctgagaaaaatatgtgatcttaattgctgagccatctttctagcaacccctccccccatttatttcttatatagttctttctaagttttctttttgttttggtccatttcgtagtttgctttgtatctgtgtgctactgtgggtttaaagtatagcctttgagtttaattttagttttatgtttttaagttaaatgaatatatgtccatatggtctggagttaagggcatgtgaaagcaggtccagtccagagtttcccttgagtctctgctgcagctcctaggtcccttcccatgggcaatgagtgttttcacatttccttattcctttagaggcattttatatataatgaccaatggtcccctgactctgactcttttatcgtctttctttcgtttgttttttctttctttctctttttgttttttcaagacacagtttctttttgtagccttggctgtcctggaattcctctgcagacaacactgaccctgaactcacagaggtccacttgcctctgcctcctgagtactaggcttaaaggtgtgcactgccactaccacctggattatctctagttcttaacctgacttttttccactcaatgtattaagtatcatttttttctaaagtgtgtttgatgtgtgagtctgtatacatgtgtgtacatgcatgtgtgcatggattacgtgtgtgtgtgtgtgtgtgtgtgtgtgtgtgcatgtgtgagtgtgttcgtgtctggatgtgtaggatgtgcaaccacgtgtatatggagatcagaggtcacactcaggagtcagtctccacctttctctttgagacagggcctcctgttcatggctgcatatgccaggctagctggctcatggcccctagggatcctcttgtgccccaccctgccatgttgctgtaggaacactgggctcacagatgcttgataccatgtccagtttcatggaggttctggggctttgaactcagttcttcatacttgtgcagcctggtgagccacctccacagctcagcctacgttattttttaaggcagagtctctcactggggatccaaatcaggttcttatgctcaagtggcaaacactttacccactgagccatctccacagcccctctttaaaacaaatcaaatcaaaacaaaccaaaacacagtcttctattacatgaacatcgcacaatttattttattatacacatacagttttatacagacaggtatagctgcaagaacactttctagaagcgagtttctggaacagttgtaattttacgttgtattttgtcaggtcatcctctctagaatgtctaccagtttatacccatgtctgttctgtcagagagcctggctacccaaatcaggcccaaggtttcgccaaaatttgtgatctttgctaatctttcttaagcttgtaaaatgcctgtatgtaggatgtgtgtccatgagagagagagagagagagagagagagagagagagagagtgcttgtgtgtagcgatgctaagtgtgtgcaggtgcacagttgcatggaagcctaaggtcacccgtaggtgtggtttctcaggagccatcaaccttgtgttttttaaaaatctttttttttttgaaacatgcacttgtatgtgtgtgtattgtgtacgtgcatatgtgttcaagtatgtgagtacaggtacaccagtgtgtactgtataacagggtgaggtcggagacagccttggagatcagtccttaccgtgtttgaggcagggtctttggttatttgcagctgcgtataccaggccccctagcccactgagccaccttgccagcccctctggttttgttcatttgcctgtgtgtgtgtgtgtgtgtgtgtttgaggcaggctctttctctctagagtgctaggctggctagccagcagatgtcagggatccccctgtgtgatttcctgagagttggggctgcagatgcctacatcatgccagcattgcacgtaggcgctggggatctgatctcttgtgctttgccctctgagccatctctccagatcttctgtgtagttttcattcgcttttcttttataaatgcacctcccccccaacccccgcctgtggttttgtactatctttagctgcacgacacatcttttacccttaattttggtggttgagttgttatgttttagaaaatgtggccagttttctgtgatttgagttgcaagtattttcacagtttgctatttattagatttttatgatgggattttttttcatgcaaatttaaaaacatgtggggtgtgggactgtcgcacagtggtgcagtgcttgagttgcaggcatgggccacccctggcttcctcttcgttgatgtgtctacccctgtaccagtgccacactgtttgactaattactataggtttatattacacttatacatattgatttattttcatgtggcttttcagtccctagctcccacccccaggctattgaatgtttatttccacgatggtttttaagtttatcttatttttattttaggctcatttggggttttagaggtttgaatgagaatggcccccataggctgatgtatttgaatcctgggtccccagttattggagcagttggagagaaggattagatggcatggttttgtttaaggacatttgccaataggggcagacttggaggttccaagagcccagacaatttacacttaactctctgcctcctactgtggctctaaatatactcttagttactgatctagcaccaggcctgtctgcctgctgccgtgctcctggccaagatgggcgtggaaccgagccctctgaaactgaaccaccagtaaacgctgtcttcttaagttgccttggtcttggtgtcttatcacagcaagagaaaagtaaccaagacaaaagtatttttaaaagcagtgttgttaataacgtttgcactgctaagcagtgccattagactcatgtttcaggggcttcttctgactgcagtgtggaagcaatgtagaggtgacaagaataaagaccaaaagtctgttatagctcaccatggtgtcacaccatgtggatccggtaagtttcagaccaacctgggctacacaagtgggactttgactcaaaacaatcaaaaataaaacagcaaatcccaaggctttttcagatacggaggggaaagtggatggagttaaggaggaagggtgtgggagacacggggtcatcggggacaccataaccagcatcgcgtgtggcccagggggagaggggaaagggaaagtgctcaaggggggccccaaacactgggcttaggcagccccatggggccagtgcctgaggaagtgcaaagtgacaagttagtgccaggtgagagggtggcgcacagtgacctccactgaagtgccaggcacccagcccttggggcgttgactgcagtcggcagctctggagagatctgggctgttggtagagtgtgtgactgaccacttcctggagaagttagcatttgaaggatggctcttgtgttcagaagtctgcagagacaggaatcatggaatcatggaacaggttctaaaatattacacataatcccagtttcagatacttgagatatcagtgacttaggtactgaaaagtccatttgtatttagtgacaaggaaaggctgtggtgccctgggagtttcagtggagtggacagggctgggagttgagagctgagcagggtactgaggaggtgtggctgctcagactgcttggagggagaatggtgaatccttctgtcctgcccctcccccagcttcacgcgtgagagccttccttggctgggctcatgtgctcatgggaagagccaatagaggagaaagaggaagaagtgtgtgtgtgggggggtggggggtgagatcctggccctgtcaagggcttagagaaaccgtggtctgtgggggaaactaccccactgaggatatggacaagtgaaagatagcaaagaaacagtgtcgcagtcccagctctccagaggctggagcagaaggattactgaagaaaaaagaagacaggaggaggagcagctgtaaacaaaactgaaggtggaatcagcccagggatttagtgaaagagtgagaatgtttaaagagcaagaccaacaaggtagcccagctgttaaaggattgctgccatgcctgatgattgagttcagtcagcagaacacgcatggtggaaggagagacctgagtcctgaaagtgctctgaccactacacgtgggctgtggcatgtgtgctgccctccacactaccctgtcctaccttcacataaaagtaaatacctatttttaaaaaagtaacattaaaaagcaattgctgaggacatggactcagctcagtagcaggaccctgagtttaatccctagtattgaaaaaaaaattaaaaaataaaaagtgggttggagtaattcagtaaacccaggaagacgtgggttcaatccccggaacactcataaaagccaggtgtgctgtgcttgtaatctgggccctgaagagctggagtcactggccagtctgcttagcaagttccagagcagtgagaaagtctttcagaaaagagcggtaatggaccagaggtgcctcctcacatgcacacacagctgcatcagtccatatacattatagccagctgtaatgtataccatgttactatccgtgctaaaagagaagagtagaagtaaggtccgctcccacttgctgtgcttacacagtcgttcattgaagggctcatgcagccattaccctggctgtctatcaggaagcaagaaggggaaatgggatcagcggtgtctcacactctcaatctttatatttttcatttgttgagagtgtgaataaatacttattttctttttgaaacagtgtctcgtgtagctcagactgccttcagtttgctgtgcaattgaggatgaccttgaactgttttggggtccacctcctacctctgtgtgctgggagtacagctgtgtgaccaccatgccctgttacggggtgctgagatggaaccaagctttgtacatgccaggcctgcactttaccgcctgagctgtcttcccagctgtggaccaggattttcccagttactcttgaccctaagtgcccctgacttgtctgttcagcagctaagaaacaaacccttgcttttagtctgagagaactttgcctttatttgactctgcctactgggaccagcatcctccgggaagcatttctgcatccctgggtcagggaggaggtgtgcatgccatctgctgcacctggtcctctgcttcagcttcagcttcagcgaatgggctttaaggttggcttatagccccagaaagaagagcaagccaaggttagcatcctcattaagctgacactcaccctggctctctccacagcccagctatgacacaaaccagtgacagtcagtgcgtcagcttgtcaccccatcactattacaaatgattcccagaaactataaaacctcaaatattcccccaagtaagcagaagtaagaaacacagaaagtcaaagtgggggacagggttctagcttcctcatttcattccagtgttggaacaaatggtgaaatggttgcacggattagcgcactttatatatgtcacacaggttagcacactttatatatgtcacacaggttagcacactttatataagtcacaagggttatagcacactttatatatgtcacaagggttagcatactttatatacgttacaagggttagcacacatcatgttcttcgttccatgctgattgtgactttcacttgaagcatcagatgaaataataataataaaatcacctcagagcattcagatcctggatgagggaataaagttcaggggcagagtccttgcctaaaacttgtactgagaccctggtgtccccactgtcacaaagaagagaaaggaaaacagctcattatataaacaaagacattgaagttccacaaatataccagctccactctccgccatttctctgtacccattttcagtgtagcaagcaaagtagatggtctgccccccgagggctgtgttagggaggacaccgcgtcagcactcagctttccctcatgaaaatccctgggtgctagatgtttcaacccagactgggggccttatacaccactgttctgtggtctggacggtcactgctagtgagcctgtgagaagtcagtgaagggtcacttgtcagctttccttacggtggctcaggagctcctaaagtctgtgggctggactgtgtgacaagtgaagccagttgtactgggctcggttctcccttccacgtggaggcagaagccggggcttcagataggaggcaactccgtccaggtcctacacgtttgcctatttggcaaagatttcaaaccaatttaactcagctataagtaagcaaccagatccagttttggttaaatggagaattcaggaaagagggaaggaggaaagaaggaaggggaaaaaaaaattaaaacagaaacttacattcccaaaagaatctggttctccagacctgttctctctgggtagcttggttcctcgtggggacaactgactgtaaatctttagcagcctgtcatctgagcagatgccctccggagacagggactgctttgaggacactgcagctgggctagaagctgtttaacagaggaccgcactctgaggatatagtatatcctcatgtccatgggccctggaggaggcaagatagctgatggtaagggtgctttgcgtgtgggttggctgccctaaacagtcatcacaagttgtagtgacttgtgtgtctcacgaatcacaagcaagcagccgggcgaggacagtatccgatgctcttaaaccaaaacaggatgcgagggttacagggttttatttagcccaatatctgtatttagaatgatcatgtgctacattagctgactgttccagactgtattctttcccgacacacgttttcttggactttactacttcctttgtgaaagtaaagacttgtttgttctttgttcattgttttcccagtgatgggatcaaacccaccgtgctgggcgactgccctgcccatcagctgcatatccttattttgagtcagtactgggccagggaggtggctcagtgagtaaaggggcttcctgccagatctgacgacctgagttccatcccacgagcccacggggcaggagagaacctgttcccacaagttgtcctctgccctccacactcatactgcagtggtgtccatagacaaataaacaggttatctatcgatagtaaaataaggtggcaatagataaagaagaaaggaaacaaagcataacaatatacatactggtgagggcaaggcaagtgttctttgtgtagccaactgtatatactgataactagtttcagtatcttccaaggtttaatttttgtttttttccccctttgcttggcattgaacttaggaccttgtgcattctgggccaacggtctaccactgaattgtatctccatccattttgtacttttaaatttgagacaaggtttcactaagttgcccaggctggctttgaacttactctgtagtccaggcaggccctgaacttttgatcctctctcttcagcctcttgaggagctggcatcccaggcctgtgccaccaggcctgtgccacagacctgagatgggatcgtccacattactgtcttctacagtttgctactcttgtttcatctattcacctattagagggttttttttcctcattgtaatctaaattctaaatctctgtgaaactcagtgaagtgtctcaccaagtgtaatcacagcagtgaatctggtgtgagtcagaatgcagtagggcttaggaacaggagcaggccagcaatggctgtctccactaccatcttctgtggtgggtgctttggttctcttcctgaaagctggcctaaagtatcggcctgtttcttacacttagaggatcctttggctgtccttaggcatttgtctcatactgacccagcctctgggtctggctccctcccacccatggcagcaccgtgtgggtgctgaagagaggagttagaatcctgagtgcctgagtcccctcctcaggatggaagccgggagccaggccagagatgctgcctccccctcttcctcctgtcggttcggctttgctggagactgctttgggtgttgttcttcattgtgcctttgtaacttctttcttttttgagacggtcttgctttgtatcctgactggcctggcacttagctgctgccttggctgcctgagggttaaggtgacaaacacgtgccaccatgcccagcctttcttgtttggacagattatttggcctggccctgtgtaatcataccagttgtcttgattttgaccttagctgccaaaacaaataaccaaacaatcaaaaacatgtttcattttatattttgtaaagtactcttttagcttggtttatctaattaagcttacacatcccttttacgtggcatttaagaggaaggacaaggaagaggtaactctgggagcaaagcacggctctgaaacagttaagagcgtgtaagcgtgtgtgaaatgagagccagctctctgctgggttacggtgctgcagagggcagaggcacgcgggtgctgcagtcagggagcctcggagggcattggcacatctggctgtgggcagatggtttgtcatcacgtgtcctgcttgatttttgtcaacagaaacctaaacatacctgggaagagggaggcttaattgagaaaatgcttctgtctgagtgacctgaagccgtaaacagctttcctccatggtctctgcttcagttccttcttggcttctccaagtgacccaggatatgcaagccaagtaaacccttcctccccagctcctttggtcatggtgtttatcacaggaagatgagcgctaaggcgtcacgagaaccaaaggagtttctgtgggtggctgttatcacgatctcctgttgggtcctcaagagagacgccgttgatcttggttccatgtgcccttctaagaaggggcctgcagcatccttcaggttgtagcccaagtataaacgaagcctgctcagagaacttaccttcactcaaccttttctcttcctcagctgaagtaggttcaatatcaggagtcggtctttacagatttaccaaaatctagagaaacaaggtaaagaacttcaccatgacaggctaaggggtcattctgtagggctcagtgatccacttaagtgtgacctctggccgagcattagctcaccctgtctagcgtcttaccttctagccagacttgccggcagactcctcacttacccttatcagggaagtaggggacagctgtgctgggcgcagaggaatgcagggctgtccaaggagctctgtcagcctgcagcaggaagtgtggcctgaccagcaagcagctctagggcttttagccagctgatcattttgaaatgttaagttggttacctacctcaagtgaggtcatagatgactgtcaagccattaggaatgttgcatgcactatagcataatcgggtatcttatagccattaggaatgatatgtgcactgtagcaaaatcggggatcttacaccaggctactattgtcacttgaattgtagctctgcagtagatttacaaacacagtaacagataagcgtgtgcgtgtgtgttgctgaggcttgaattaatgaactaagggctttctgtaagtgtgttctactactgagctacagcctaagggatacagatctccatctgcccatcccctggaaacagaatcttactgcacagaccacgctgactttgaactcgtgagccttctgcctcagctccccagtgctgggattttaggcaagtacacctgggcagacggagtctaaataaagactgtatacatcaactagaagtctcccaaaatctcaaaagcaggtgattgtttacagagcatttggcaaaggtggccaagtgataagaccaggagtagagctcggggactcagaggtcagggttacagactgcgagcgtgctctcctgtaatctcagcacagggaggcagaggtaggaaccttgacaacatagcttagggccagcgtgggctgtgcgagaggcagtctcaaaaacaaaaacatattttagctttcctgagaaaaatcactctatctgtctggacctggtctccatctctagaaggaagatcagcctcttgccctctgggggaattccctggtgtcatttgtctagcgcacactgatggaccagcagccccgctccctttgcttccgctgttgcaagctgaagagaagagggcctctgtgcggatgaagagagaatcccaggagctctcttcttaatgttctttggctcccatctgcttctgtcattgtccattgctgagatggttgaagcagccacgtaaatgatactgcatcgtgatataatgaagtttccggccagcatggatcactggcacagacggtggctttctgtggcttttgcagttttatctgttctttaatctgtactcatcgctgtgactatacagacagtgagagctgcctatggagattggttctgcttgacagtatcaattgagcaatgctctgtaaagatctgatgttttggcattataagccagaattttcaaaagattcgtttatgagctaaactcggtcttctgtcacttttaaaacagcggactttaaagttctgtgcttaagcagttcccctgcctcagcctctggagtagctagagttataggtacattccaccaaggctaggttaatataaacacctagatgtgtatgcatgcttgcttgtgttctctctctctctctctctctctctctctaggtagcattaattatcagatttggggtttcatacattctagacaaccacagtatatttttaaaatgtcaatagaactccttacattcgagaatgttattttgtcatttgattagtgtttagacaaaaacaaacaaacaaacaaagcctggcagtagtggtgcctgcctttagtctcagcagttgagaggcagaagcaggcgctctatgagttcaaggcctgcctgggatacacagaaaccatgtcttgaaaatgtctgcccctcaaaagactagtacttagaagatcttattttacttgaaaatgtaatcatatttttctgtttttaataattttatataaaagtataaccttaagctgaattgatatttctattttgctgtagaaataaagtatgtcttggttaattataattataaataagtcatatactattacctatgtgtaatttaaattttatcattactactattattatctttctgaggcagggtctttctacttagctctggctgtcctggaacttactatgtagaccaggctggccttgaactcatagaaatcctcctgcctctgcctcccaagcactaggattaaaggcatgtgtcactatacccagccatttgtttgtttgtttgtaagattcctttctttttattttatgcattttgcataagggtgtttttttccatataatgcatatatgcagtgccctctaaggccagaagagggtgtggattctctgtcagctgccatgaggttgctggaaactgatgtagcccaggttaccctcaaacttgctacttagctgggtgaccaggaactcctgatcctcttgcctttacctcgcaagtgctggattgcagaacccaggttcttgggaaaagcagccagtgctcttaaccgctgaggtatctcaccagccccacacagacctataataatgataacacccttaaattaacatatagctctctggctctcagacttcagctcattgaatgaccaaatggggcttagtcggaatccctgtatgtttgccaataaagtttgaaagatgtgggatttctaattaaccacaaatggaatgatatgccagcagtattgtcagtgcaagtataagtcacagtggtgagcagtagcatctatggtacaggccgtgtattcctctagtcactggggggtgaggaaaccagctgcaacagctgtagatttcagaagtgatccgatgaggatgcctgtgtgatcatgcatgtatgatcacctgcacacataaagagccctcccgggctggggatggaactcagtggtagactgcttgcctggtaccttggtggcatgcatctgcaatccagcacttgtgaggtgaaggcaagagcatcaggagttcaaggtcatccagctaagaagcaagtttgagggcagcctgggctacatcagaatctgcttaaaaacaacatacaaacaaacaaaagctagggtatccctaccttggaaccctctcactcaaattgtttcttacttttccctaataaatctctctctgtgtatatatgcccatgtgcacatgcgtgcacatatgcacacacataaaggggtgggagagattgattcctacccagagtctagggagagtgctctaagattataatatagtgagctattagctctagatttcctcaatgaaattcacaactcgcagagacctagtgctgtaagcctataatttgggccactgggggaggctgaggcaagagaatcacaagttcaaaagccaaccagaacaacagtttagcaagaccatattggaaagttacaaaatgacaactaccaacaatccaaccagggctgggaatataactcatggtagaatgcctgcctagtactgaagggatggacaggagagggtggggtgggacaagcacgtgaacagtcacattctgggattgagaagagtcatctcagaaaggttctgccctcagccacagctgtgtctcccataccttatccttcactgcaaggccaaactaattcgccgccctggtagatgtatatttcagaaacattcagtttgcaatcctgtatgataaggagcctgtttgaacgactttgaatatccaaatatcccctttgctcatagcttacttaccaaagcaaagggagaaatggtcttagccgcctcctcggccacctgttagcctcagcctgccctcacccctggagctccttgaaatcttgtttctttttggatcaggctctactctcagtctgccctcccacagactagtgacttaggcccagaatccttctcccttggtggctacccagacatttccctgtgctcaccctcaataattaggtcatcctgtaagacagaacccagcaggccagccctcgactgctaaggtcctttctggctcctggtgttaacttgcacttgcgggctgttgatgttttaggttgccacagtcagcgttgtgtgctaccctcctcttctggtgctcatcaaccaattgaagagcggttctagctccagaccccaggagatgacttggctagcccccttttattgtttcagaaaaagctgccaaattaccccaaacaaacaaaagccacggaaggacaactgagtttggatttctcccacaatgaatgcttggaattgttagaaattctttcagacaactttgctcctgttgcccatgctgtgcttgcaacatgctgggctgccctgagcggcccacacggcaccccagataactctgaaatactgcgtgaggtctcctgcgtctcaggttctgaatctttacagtgctcctgggagctgagctgaggtcctcctaacagtatatatgaacagtttgtggtctttgggctttatggccccccatacccccctgttctcctcagtgcagccctccctgccatcactaccacagcagagggtttgccacaggaagtcagcctaaaccctgtggggctctcagcacacatccgcttttctctgggattacacaggtcaatggcttcagggcagccagggaagctctcctgtgtcttcctgcagtccaggcagaaggaacatccatcccagcttgggacttagcattctcacagcagaaagaaaagagtgtgagagtttgtttgcatcacacatacatctgtttgctcctaagtcattgaccacggccacagcaagccgtgtggtccacttacctctctccaatccttcacccagacggtcactgaaggctacagctagctctcagagaggtggtacagcatgcgcagcaggcggggcctcgcagagcctcacagaggtctggtctgttgagggggatgtaggatgcatatggtgacctctcatgtgcttcccagcatgccagataatatgcacacctaaactcgcctctaatgcccacactcagatgggacagagcagtccacacataagggatctcatgctattgtactttgtcttatttttattacatttatttacttactcatattatacccgtggagttcagagaacaatttatgggagtcacttttctctctccaccatgtgggttctggggattaaactgaagcatgggtggcaaactaaaaccactgagccatcttgctggtcctttatttcatgtccttaacaagcctgagtggaagttatcatccccatcttatacaccaggaggacagaggagcttgttagcaagtggaagatgttgagggatttcatacatttttgaactacaatatagattgctggttttttgaatactagagatgaagtactgtgtgatttctgaactaataaataggttttataacatatttatgaaataatgtcacgcataaaagctatatatcagaaatgttcactctgaggtgcaacaatataaaagttaatataaagttatatacagttatataatgtaaaggttatatacagttatataatgtaaaggttatatacaggtaggcttgttaatataaagttacatacagttatatacagttatatacagttatataatgtaaaggttatatacagttatataatgtaaaggttatatacaggtaggcttgaagagcaaaaggagcattaagtactgtagggcaacagggtttgatttctttttgatatttatttttggttttgtttatttgtttgtttcaccctgtggcctaggttggctttgaaattgtgattattctgcctctacccttcaaattctgggattactggtgtgtggcacccagctcgatattgcagttttaaacgtgtgtgtgcgtgtgtgtgtgtgtctgtgtgtgtgtgtgtgtgtgtgtgtgtgtgtgtctgtgtatgggggcgagtgcgtctggcatttgtgtagagatccgagaataacttcatagagttggttctttccttccttctgtttgtgggatcaggggttgaactcagactcggggttggtgaggcaggcacctttacccactgacctatcttgctggcccaataaacacatcttagaggagaattttagaagagcaagaagagcttgaagtcgtagtcccccggattctccatttcctaattgtgacaatttttgtatagaatctgcctgcttccatattaacacattaaaggctatttttgatatattctgtaattatatagaaacagagccatgtgtgacattttatttactttgacgcaaagcaccaacatgcaatagtaaagttagaagctccggcttttgtctgttaccagttgctcctgagggtgagtggcagttcatggttgaggctaactgttcttctttctctctgcagccatcacttcatcaagccgataatgttcgtggaacccgccaccatgggctggtggagaggccagcccggaaccgcttccacccccttcaccgaaggtctggggacaagccagggagacagatatcctttttccctgtctgaggagagtgtgttttgaaatgattgagaaatggccgggatttatctccctgtggttcccctgtggcctcagagcttcatctgatctgcagagaggaagcaataaaagtaacagagtttaaaactgtaaacatccctacagccagactgggaagagctcggtcgttggttatgagagcgtcggtaaagttccgttgactagaacagaacataagcattcagttctggtggacaaggcatctttgacgttttcttcagaaatcagcagtattaagcttgactttgaatcaactagagagatgtaggctgtctagccaaacccaggcagatccatgtgtttgtgttttgttgacctgatgacctgcttttggaactgaaagaggaaatcttacaagactgtctgtctgtctagtctcagactcagtaaatgacaggtaagatgtaaagtgggcgtttaggaagcctcctaaacagagatgtaccagcgcactctgtgtggctgagtaatgaagaaaggagctgtgagcccgaccggctgagctcagcactgtctgttgggagtcggacaggggccaggctagggtggctttctgagtggggccagcacagtgctgagggttggggcagacaaacctgagcctgctggttaggacaaggagaggcagaagtgaggaagcttctctcacttcactgagctcaggacaagcctggcggaggaaggagcagatgggcggggcgagtctccctgcagagagctgattcctggcagtgatggcagagttggcttcataagcttagaaaccaggaagtgggggagggcactcatgtttactgagcacctacccatgccagacactgtgctaggcaatttatatgtcatttagtcctcagaattcaatgagtcgtttgttttttaaccctcagttttcccacgagaaaactaagatatcagagtaagttgcccaagagtccactgctgcgactcatgtagcccaggctcgtccactcagtggccatgctaacatatgcaggagaatactcctgtgaggaacagcagggatgtagagaggaagcccagctttcctggccatcatggcctctaggtctctctctgctgagaggtgaggacagtggttctggggagtgttgacttctcccagctctccccactggacagatccagcccacagggctgcagtgacttctagttctctctgttacatggtgtccgtcagggcacataagaatgatgtaggatcgtgggaattccttcccacacttcatgtagaatgtagagggtaaagggaagcagtttatctaacgagcacatctgatgtggagtggcacaccgagcgattgtccaaatggcttggaatcctctagcaaacaaccagatgtttctctgcctgattgaactgtgcaggggctggagtgtgcagctcagtggtaggtgcttgcctagcattcttgagggtttgggttcaagaaaaaaaatttccctggtagcgtggctcagtggcagagccttatggcttgtgcacagcctagggttcattctcagcatgaagaaggaaaagactggaaggagggggaagggaaagagagaaaagggaagaaaaggggtagggggagagagagatggagagagagagagagagagagagagagagagagagagagagagagagagagagagagagagagagagagagacggacgggagagagaaggggattgaggcttaaaggttaagaaagaagtagggtgtgatgtgtccactcactaaacacacatggagaccctttcctggaccaggcaatgtcttaggcacagagctcaaagtgatgaaggggatatcaaccctgtatttttgagttttacagtcctttgggagacggtggacagctaagaggcaaatagtaataattaattaattaaggaaaataacttcagatggtatcttagttacttttctagttctgtgataagacaccatgtccaaggaaaattatagaagaaagagtttattaggggcttagagtccatgacatcattgtggggagcatggcagaaagcatgctggcaggcatggcactggagcgatagctgggcactcacatcctgagacacaacctcaaagcagagacagctaactgggaatgtcttctgaaacctcaaagtccacccctacccagtgacacctcctacaacaaggccacgcctcctaatctttcctaactagttctaccaactagagaccaagtattcaaacatgagaggctatgagggctgttctcattcaagtcaccatagatagtatattcaagaacttagcagttcccaggaaatgttctgacattgggaatggaacaggtaaagtcctaggaaggactgtactgcgtgttcagggaacctgtctcattctgggcaatacatcctagaggatggcctggctctgaatcagtttgtaagagcattagcaaagcttgccagctcccagggaaaggaaaaaccaaacagatatgcagagaaagttgttgagcgcagagtgtgatctgattcactgatcatgagctgtctctctgcgattgtttcctaagcccctagttgggattctgggcctggacctgtgctgatatacagaagttcgctagcctaggggcgtcactaatgaactaataagtcctgtgtgaggagtcaaaaggctgggcagcaagtgacaagtgacaggaaggacagtttgacacctcagctggtgacttactcagagtttgcagggagacagaggccttcttggcttttctggtgtgtatgctgttagctatgaaacagctcactttaaactcctgcctttcatatttgtctatggtaccagtctaatttttaagaattatctttttttaagatttatttatttattatatgtaagtacactgtagctgtcttcagacactccagaggagggcttcagatctcattacggagggttgtgagccaccatgtggttgctgggatttgaactcaagaccttcggaagagcattcagtgctcttacctgctgagccatctcactagtcccaagaattatcttttatgcatattgtattttgcctgcatgtttgtctgtgcacatatatgtatctggtccctatagaagttagaagatgtgagatttcctgaaactgtagtcacagacagttgtgagccaccatgtgaaaccaaattaggttctctggaagaccagccagtgctcttagcctctgagccatctctccagctcacaagttttaccattttaaaagccagaaaactggtttgaatctttgttggtataaatagaagaaaaaaagatgtattcaggattttcttcttgtgggtattgttttggggtcggcagacttgctaagataagagattggtcccaaataaaatgagcattgtcaacaaatactccagcttcctgccagagtgggcagccccgtcccgcaggagattccttctgcagtaggccaagttcttggcacgtacggctaccacaaagccagggcttgccacaaggggaccctggttgacccctgccacatgcaggcacagcagaggcaccacaaaggctattcctggcctgggagcttagtccagaagttagacctttaggcagcagtccatgcccttagcagccaccctacccccaccccacctctactccacgcccttcttctcaatggtagcaaacttgctccaactcaaacaccattttatcgagtttctgaactatttccatacattgacagcacgtgactattctctggtctgtaagtgatgtattaaaagaggacacactagcaatgccatcttttaagaggtgtgctgtttgaaagggagaaacacgtgttaggaaagttctcaacagagttgggcaccctggcctgagtagtctagagaatcctgcctgtggccctgggagttgggagctgctctgctctgcagcgggccttgctttgactgatcttgtcacacaggatggacattttacaacatgggacattgttctttgagatcataacctgttaaatcccctacctgctgttagcgtcttatggtatataggaaggctctgagaagctctggagttaataaatgtctatcttcatcaggattgcaaaacttgtgctgccttaaaacccaattcttatgtaacattcctatcagaggcagagacactggccccaacaggcctgacgtcatggtgccacatgcagcctgtgtcccttccacctgtgtgaagacttaggaagatgttgtgcatttcttttaaattttggcttgagggctggcaaggtgatgcagctaaaggggcttgtcatgcaagcttagtagcatgacttccaccccctcgaacctacgccaagacagatagaacttactccagtaaactggccagtatgccttggcattcatgccccgcccccacaccatgcacacacacacacacatacaataatatgttaaaatttttgacttgatatattctttttataggagcatgtttgggcccaacatggtggctcgccagtgcagtttcagcactcagaaagccaacataggaggatgattgcagttcaaggctaacctgggctacacagcaaattcaaagttgcagttcaaggctaacctgggctacacagcaaattcaaagccactgtagtgtagaatgagatcctgtcttaggaagagaaaagagaaaaggaaaggaaaggaaacagaaatcagaggacacagcatagccaatgggaaggacccacatagcatcttctcgtagacagggaggcctagcccctccctcagtcagtaaggataaacctaactagatgagatagaattaagaagagagcccataagccacagcctagctactttgaccctgaacttcacagacattaagcctaatcagatcgaagaaaggtgtctctggaaaatatctctgtctcatcatgtcggctcagagtcagattaagaaataagatagagacgtgacaaagaaaataagtattatcggaagacacacttgcagccatagtgattttcttggcacaggaagtcattaagatcccattagtgccgggcggtggtggcgcacgcccttaatcccagcactcgggagacagaggcaggcggatttctgagttcgaggccagcctggtctacagagtgagttccaggacagccagggctatatagagaaaccctgtctcggaaagaaaaaaaaaaaaagatcccattagtgcccacatttctctagttccatattttgtattcacatgatgcccagcctgtgcctccacagcaggcccccattccattaagacccatttctcctgagcccaagcctttctaggctccatcttcttttgaggacaccccaaagtacatgctctctcttctctggggcccatggtgccagttcaccacctcaccagaggcgggagggcttgctgtagtctgaagccttggagtgagtaaatggtaggtttgaccccagcccaccatgccagccgtggagggcagagcctccgttttcttcagctgtgaagtggtgatgatgtcatctgccgcctaagatttttaagattaaagggatgctgtcaggtggtggtgcacgctttaatcccggcactcgggaggcagaggcaggcagacctctgtatttgaggccagcctggtctccagagttaaattgcaggacagctataactataccatgaaaccccatctcaaaaaaaatgtttattggggtaacatgaacttatttaacacaagggagacacatagtagggggtaacatgaacttatttaacacaagggagacacatagtaggtgcttattatctccattttcctatttctggtgtcttcatgtatacttgcatttcctatattattatttctcccttaaaaaagaaataaatattcttttttatttatttcttcaaatataatacttcataaataatacttcagagcagtattggtgattgtaaagtgtgtatttgatcaggtcagtgacagaagagacaaaaagagtgggtgtggtgatggtagggaggagagagccaagtcataaggaggccgcatccaccagatggcccaggagaggagcctggcggtgctactgaaggcagagccaggagaggccggcatggggagtgggctgagaggagccacactggggagggatacaggtataaggtcagcctttcagcaagaagagaatgctcaacgaccgtttgggctttgcttttgtttgctgcttgttagtttgtttaatttgagttttttttagattnnnnnnnnnnnnnnnnnnnntagtccccttttaaaattaattagttgttcaattgatttctttctgagacaaagtctcactgtgcagccccgggatggcctggaacttactatgtagacctggctggtcttgaacaaacagaagtaagcctttcactggctctcagtgttagggtcaaaggcatgtgctaccatggccagcttttaaatgttttttaaagcagaatgagatgattttaaatgttttgagacagtccgccctctgagtgcagttctctaaagctgtactgacagctctgcttcactctgtggaggcgacgtcccgtttgtctccatgtatttggagtggatcttcaggtttgcccacccaataagcaacccagaacctagaaaacaaagcctttatactaggattcacatcctcttcagacctagtacagctcgagtttgactcagaaggaacaggtcctcacctgaatttggggaaagaattgtctttagacagatatggttgtgcggtctgataatctcagcactcatgaggctgaagtggaaggattgctgagtgaggccagcccaggctgcttagcaggagagctccaaagcttcccccaaacaaactcaaacaagaagtgtctcccctgggactgaggattgacccaggaccttacacatactagacaagtgctctgccattgagctgtatgcccaccacttctggtttttactttctttgagagagattctaagttgccaactctgctctcaaactttccatttccctgcctctgcctcctgaggaaaaaagaactggattggcttatgtcactggaaacccaagggcaatggccaggagaccatatgataacattaagactacgtctgtggtgttgagttctttcatagacaagcattctctaaggggagccgcctgacctcaaacacctcgctcccgcctggaaagtactctccatggtccagtcttaaacgtatccctaagccagtcacggttggcgggagagtgagatgggagataccgtgactgaaactaactgggcctgagtccatccatcccatgagaaaggaggcctgcatagcacgacagcctcgccactgtctgtgatgcaagtcgacaaagttcttgaaaacagatattggacaggagacacacgcacacgcatgcacgcaagcacgcaagcacttgcagagggggagagagggggggaggggaagggagggaagctgcagcagtagcttagtgggcaaagtgcctaccatgcaaactcagagacctgagtttgaccccagaacccatgtgacaaaacgagacaggatggcacacacctataatcccagcgctgggaaggcagaggcaggcagtgccccagggtttgctggctactcagcctcctctgctcgccaagctgcaggccaaggagaagctccatctccacaaacaatgagccagcatgtggcacaagcctttaatcccagcgctcggatggcaggtagagctccagttcgagaggccagcctggcctacatagtgagctcctagatagccagggctacatagggagatgctgtcttgaaaaaacaaaatcaagcaacaactgaaaaagcagatggcttctgagagtggcatccatgaatgacttctgacctccacagacagacacacctgcaaacacacgtttactcactcacatacacacacacacacacacacacacacacacacacacacgccacaaaaagcagaggagcctgctacaggagtgtggtgaaggctctggttagaaggtggaagcctggaactgaccaggagtgaagagcctgtgccatcaggtgtgggatcagcagccgcaggctctcgctcagactccacttagcttcataattctgcttcaacacccatacagtttgttttcctttattaaaatttctactttgatgggaatgctttcgcagccagttattcttcacagcacctggatgagagctggccacggtaagtgagctgtatacatgtgatgtgtgtgttctgtagaactattttcacagatagggagagcctctttttaagatggttttactttattttaaccatcttcaatgctggtttagacttatttgttattttagttgttttttttaataatcaagacaaagtctcttctagcccaggctggcctctaatttgtgatgtagccaaggatgaccttggactccagattctcctgcctctacctctctaatgctggaattagagacatgttctactatgaattttttggggggggaggggctgtgtctctatgtagtataggctgtcctggagcttgctatgtagatcaggctagccttgaactcacagcaatcctctcatttctatctcctaagactctagcctagttagatatttttaacatcaattttgttttatcttcaaattttaaatcttgagctgggggtgatggtacatgcctgcaatcccaacacttcagaagtaggagagtcacaagcttgaggttagcttgagtgacatagtaaactccaggtagcctaagctaagaaaggaatctctgtctcaaatcacaacatcaaaaccccctcaacctttctgtgtataattctgagcttgtaagaaaatatagaacaaaaaattacttaagcaaatctagattcaaatagaaacatattatgaaacatttaccaacaaaatgtctgatttggtagtcttacagtagacatgaaaaaataaaccccttctctggcatttcttagtcagttcagaaaagaatggaagactcctgagcggaccctgtgtgccatgaatttcgtttagtcttgagcacgttgtatccatataaccggtggccaccgtggcattaatgcagcacttgttatgggcgtggcattgttttacagcaccacatctgacagaagagattcttaaaatgtatatatcaccaggagtgtggcccacacctgtaatcccagaaattgggatgctgaaacaggaggattgccatgaattcaaggttagcctaagatacagtatgagatactgtctcaaaatgaataaataaataaataaataaatgaaagacatttaaaaaaataaactatctgagtctcaactctgaatttccttatcaattctttggacaaatactggctgagcccttatcgggaataatgtagtctggatccaagaaaggggatcaaaatggccgacagcagccccacctcacataggccctcagcctcctcaggagtcctgagtttcaagtctgtaagataaaagaataatatgttttaagtcagaaaaagcacatctctagcagatgaatttcatctctgtagccaagaaaatgactttacttctcagaggcctgggattggccaggtgaatattttcataggatggctagcaagtacattgcatttcgtgggcttcctcatgagaaagcaaagtgtttgcatccaggattaccaaagcgcctctgcacacagactcaaggcacatgacgaggggtcacttttttgtacctagaataagacccacagtccctctgagaggggtcagcctttccttgaccagttccagtcagcattcaagtgtgcccagctagctgatgttgtgggatggattcccttagttatcctgggaatcagagctgcgggtcctgagagatcattcagtcaggcctcctctgcacagtgatgagaaaagggggcctgtagaactcttggcttatacactaggctagaggagccaactgtcaagcgctggcctaaagcactccgttggtcccatagcttaagtttctttcctttttatgttgttctggtttctaaaggcaacagcctccttggaaagaagagaagcatcctggattcaggctaacatctgcacttaacaggtatgtgagctgattcatgatggaagtacattttccaggagacagatttgattagccaggtaatctttacatattattttgctccccaatctgtttatatcacttgtgtttatatgaaacaattaaaaagaaaaaattgactatgtaggagatagtgtagtcagtaaggatatgaggtctagaggggaccacaaaagtttgcctcttagcatgtgatcctgggcaaagtgatttctttctcccttagtttgcacatatgaacgtggaggtacttgtacccattatggggtggctgtagggactatgcatgaagacacagagcacaataaatatcaactcttcttgaggttactttgggccatactttaggaaggacctgggtcacttttcaatcccaatatgacaagaatgagtgtccttttctgctttaagaggatagatggcttgccccagagccctttagctagtattcaaggaggctggaatttgaaaaaaaaaaacaaaacaaaactaaacccttgaatcaggcaataatcccagtactccagaagctgaggcaggagaactgcaagttgaaaatcagaatgggctatagagttgaaccttggggaaaaattaaaaaattaaaaatgttttagtggtgtgcaggaaaggtagagttgtgagcaatccctgtgcccactggacgtggttctgtcttgaccagcattctgccagtctgattcctctcttcctcgtatgtcattccatgaccagctagataaagcctgtctcacctgtaagtaccctacagtcagacgccaagaggcttgaaaaatgataaccagtgcaattaacaaaattaaccatcattttctccacatggtcccatagccagtccacatccccattttcagtcatctctgtttgactgatgcctcctgggtctctgtgactctgaaggagcctggagcccccagggctcacaactgtttctgctggatcccagggtcttcccctttcacctcttccctcctctgaagccatgtggtttaagtcacatgaagctgttgcctggagcagaccatgaagaaccattttaggctaacgaagttgctcatgtgccccctttatgatagacagtctgatttgaccttgagtagagtaaataagtagttgccatcttttggagctgaagttgtgcacacactagagctctctgggagtatttgagattcttgatattgatcagcagttcccaaacttttctctaggagtatttacactctgaaaatccaccaaaacacccaaagagcatctctccctgtgagaatacctattgatcctcagctgctgctaagagaaggctaatgtagagccatgaaaaaatatacctactggtgcgtttcagcatacaacaatcaacccactacatgccagtgtgtgtgtatatatatatatttctttttttaaaaaagaaacacaatatcattttctaaaacaaacaagaatagctgcattgttatacctctggcacgcagagtcgttgtctgcattcagtctgttgtgttgacgtcacacaactgctagaccatcccactgtgccatcagagggcaggagtgaagatagggtgtggtagtattttgatctcacattctccctgaaaaggcttgggaaccactgtttcagacacaagaattctcagcaagcctagtatggacacagactagcctggcctgaggctgagttctgagttacagagaggaaaagggtggtcttagggaagctgtgaatctgaggctggccttgtacagttagcatcagagtgtaggctatccaaatacaaattaaactccttttggacatatggtggtcctcaaatgcctttttgatgtaaaggactgcaggtaggtcctaaccctcaaggtatgaatatttgtaagtctattattctcatcttttctcctgttgataatatttagaaaaaaaaaatgcatttcactaaggaagaaatggattttcagccagactctctcctcacctccttaggaccaattctgattctgctcttcacacgagtgctctgagcaccaaaccccaggacccctatggaggaggaggccagtcagcctggcctgccccatacatgggtaagacacacaggcctctgctagctgtacccgtgcttcctgcttctgcgctgtatgcagtgcatgctcttcctgggtttggtggtcttccgagcagagctcgcctcaggggaagtgtgcgttcacagcagcgttaagattgctccttccatggctcctgctcccctgctgccatctcctggctctggcttcctcttccctgtgccacccgcgcttctctaggcattccagtcttttgcacagctcctgcagtagcaccccagctgctcttgtcctatgcaccgccttgcagcctaatcttatattgggttctctaaggcctccttttgtcactggtaagaccaggttagaaggggctccactttgtgggttcatggactttgtatggctgaccttccagatgaggcaaatcctcccagcggctagcagtactggtacaggcaattcctctggaaagaataaccaagaccaggggccaggggcgagtcaaggggacctttctacaggaagacatgtcccagagaacaaggcaagagagaggggacagagggcgagctgagtatcatcacctgctccttgtcccccacttctgttcagaacatgtttctgtggtccagagaaagtctgaaagagaaaggccaggaaccgtgaaagggcagacttgtgccacctcatgctctgcttccattgttaaccctctctgctcctcatcctctccagccagaaccttcactacaccccacctcaagctagtttggaatgacatgaaccatagcattacacacacacacacacacacacacacacacacacacacacacactgccccccaccccacccccgcactcacagctatgtggactcgccggtgttctgcagtttcatcctgttcccatggcttcctctcctgcctcaatgtaaaagcctgtatctatacttcagttggacctttcatgaccttcctccctcactggtcctgagctacccatgccctcccctgttccaacctcctacaagcaggtgctgtgatgactcttcttcaagtagatgcacatctatctctgcttagggtgaattatctgaaggcagtatcttaagtcttgtcctccctgacacagtgcccagtacagagaggcacgctgactgctgaagtgccaagaagtcacatagtactgagcacaccctgaaacccaccgtaggtgtttacatctagcctgcacccaaagtaaggatgcttcactcagatacttcccagcctgtctggccattctaatctagaacgagcatgggctggagcgatgttccgtacatagattgaccttgagtctgagggctggcctgcgtactagcttttccagttttccttacagttatgggctatttaaagcctaaaatatttgtttcttttgaggagagccattcatggcctttcttcctggcatatagtatgggtgggatttgatagtaattgtcatttgttccctttatacaattcatttatcgaaatgactctttgcttgtaaagtctgagagctttggaattggacggggacgtctgctatatttccacacatgggaatatgagagggaagttggcagaagttggaattggatatgggtcactgaacagtgttagagaagtggggtgtgtgggaggttagagattggctctgggataggtagagatggatatgtataaacaaagccttaaaaagcagagtctgtaaccagtggggtgcccatgcgcacagcaaggttgtgccatgctgactgggacccagctagcctagcagggtcgtccctggaacccctggatttctgcctcagctttgccttctgtgctgagattcttccttttctagaagggactaaagacctagagaggacaagggagtcatgggtaatttaaggaacatttgagctcctgtgtaaagagaaagtaactgaagaaacagaatttcttctaagagttcctgggtatctgagggaagaggtgagagctgtcagcaggtgtgggactgcgtggagaggtggagcaacccacatgcccacccaatccctgagcaatgggaaaccaggaggagaggaaggggcagggcttggacagctctttgagtgccttgggaactttggtggtctctccttttcatgccagtgttagatattgcgggtcacagtatctgccagctacagaaggtggcccaccccagcatggatgcctgcactgggtgcccgctctgcagtcgccttcaagtaccacagaactcagaaacacatccaaatatgggtgtgtttacatgggaaagccagtgtgtttaaaatattattcaagtctccaaggatgagaattatttctggagaattatatttgttggtgggagctattttaaatggtttttatgtattttccccctgtaattcattaaagtttttcattttctttccttttggattttaaaaatatcaactagcttcacaaaaagtatttctttttataggacccaccaaataaagtaaagatttaaaaagtgatgggaaaatataatcaaagcccagaactaggttctgtactgaggacaataataatggccctttctgggaatctgctggcacagtggtggaagcccttcgccgttgtcggtaccgggagcagatcttgagggagcatcagcttggagtatagctacaggagccgtcaagtgtacaatacgtttgccagctcagtttgcatccccaggaagcaaagccattagcctgctattggtagtgttcatgatggttattgagtcacatgacaattacacaagtgatatgaagccataaatgacagaaataaacttttatacaaccaaacagggtttttatagtttttctcttgtttaattgcccatttccctggtagcatgtgcagtttaattactgtttggtatacacatctggatggatcaacacagtagctctctgtgacatttgccctgtctcacagcctagctttatccccaaactgtccccctgtcatagtaattgaagagggggctagagtggcccttattagcagcctaggagttaagagcaaaagagtgcagactgtggttgccgacggccatccctgaggactgtagacccttcagtctcggctgaggggcagagatgtaatctgtatctcagaggcccttcaaccagcagtgagctctgacccacagcagtaaggagcgagctaagcccgttactgacgcttgtctacctgacacaagaccctcaggtctaaagagtcaccaagggctggggagaaggctcagcaggtagaatactggccatgcaaacatgagtctgtgtttgtgtccccagaagccataaaaaagtcagatgctgcaggatgcacctgaaatccgagtactcccatgggcaggtggggagtagagacaggagaacccctaaagttcatgggccaggaagcagggtgggtgcagcagcaaaggagaagagcgcctgtctcagagaaggtgggaggtgaggaccaacacccaaggttgtcctctggactccatgtgcacgtggatcatggatcatatcacacacacacacacacacagagagagagagagagagagagagagagagagagagaataaaatataaaatgaacgtgtcatcagtgtggtaggaaagtctagatgggagaaactatggatgcactgtggcaaccatatctgcaccccgtctttctatttcacattaagtctgtgaggagctatttaggcttgccagacatgagagcacattaaaggaattaaattaaactcagaggtactttgttaggtcagccctctaaggctccaaggtttcctgcaacacatgtgaccttggtcactgctgtcctgtcccctgtgggactgctttgaattaatgtcctctatttccagataactagtcagaactctgcctttagttttttaacccttttgttaccgttgcgctcgtcggtatttgtgtgttggtggtagtagtagcagtaatagaaatctaaatctggctattttattactgaaataaacctgtcaatcattactgccgctgtcctttggctacttaagtgggctgcctgagagcgatacgtaatactccctcactcttcacccctgcactgcagttaagccccgctctttctctccctgcagtgtgctctactgctttttgtccagtcgtttggttttctgtctggcttcctggcctcgaggctgtcccaaagcctcatgctctaccacaaaaacagtctctaactgggttagttctaacccaggcctctgttctccacttcatctgaatgactagcagactccttcacccacgtctcccattcctctagtccatcgctagactttgccgctccctgcctctgctcctgtttccttactcctgctctctgcctgttttcactgaggcagccctttaaccttacttcctcttgcctgactcctcccggcccagcacagctgctagggacatggtctttctgaaggcaccctgcccagaaagccagccccagaactaacagtgtgaccttgcgtgggataatagttcatagctcataaattgctccaaagatcccatgaggtcattgtgtaaggtgccaggtacacagcaactgtcaccatcttacctccctgttcttcgctgcctacccaggaatgaattctgcctcccgctccagtctggggaagagggcggcaccagcaggatgccaccccaggaattggctcgcctctgagatgcacatgctgtcgtagctctgtgtgtcacagggaatcgtcagccttagtacttaaacttggtgtctggaagatgaagagactcttagcataccataataaaccattgcataaaatgtcatttatcatttttaatataataatcccattttagtgattggaatgggcaagttccctaccctttcttaagagccagacctaaaaagccataagtacaaatgtcgctgggctgctcctcccctccttctgttggggccgactctgagcatcgcctctgcctctgcgtcctgcgtcctggcggcctgtgcaggcagcccgtctttgcaatactcaatcacagactgaataagcagtggcttagtccagctctggggcagcttggctgctttgcattgcttttttaattttccttttcaaaacaaggtttctcagtgtatccctggctctcctggacttgttctgtagaccagggtggcctctcactcagagaaccgcctccctcttcctctcaagtgcagggactgaaggtgcgcaccaccaccttacaccatcttactttcttactttgtttgtttgtggcgctgggctcaaatccatgccttagcatgctaggcaagcactcttctgttgagtgacatgcagttcgcacacatgcatcaacatctctaaaggctgtgtccaggaatcctgtcttaacagacttaccctaatgatctgatacagtcactcaaagcaaagttttagtcacttacttagattctgttttctggtggcctgggagagtcctgtgttttgtgagtatgcttaattgataagctcttggcaccttgggagctcttagtgtccatcctgctcctgggctccaggacgacgctacagcttctgccacttacaaaatctgctgccacactgtcttcctgtctgcacctgcacctcgtcacctgccccaaccctctgttgtacactgcagagattgagcaagtatctgctgaatggatggttattatgtgtttaagtttcatagactaattgggttatttatagtttaaccatttcatctagaaacttacctaagctgagctatgtttaaaggtttagactttaaacctttagacccagtccgtgtggggatggctcctcagttttcgcttagaggcgcagaaggggctctatgtagtcagctgcagtatgcttcctgagccagctgttattcagtcagtcaagactgataccaaatcagctttttagaatatttgtgactagctatcacataagtatatcacatatacttaggcttcaggtatgtattttttaaaacaacttgtgtaagagtccagaatgtgtcatagcatccatcgacccatggtcagtggcaggtcagtgacaggactcagagttcacctgccctcccctggaatcccacatttgggagtgtgacaagacaaactttttgctttgtgttttgaagacaggttctcagactttgtcagccactgctccttgagtcagcaggaacgtttaggactaagacacttcaaaggagagagcttgggcaccagctcgagccttggagtaacttcgtctccttgtagtgtgagtgctacagcactttgatgagctctgacatgtcagaactactgttgagtgttaaaacatccaattgcaaatcaaaaagccactctaatgcatgagtcaacgcgagcagcacatataaaagtgtgtgtttgtttctcttccctaccaggtttctgtgatggtgaaaacgacggccatgcggaaggtatgaacaggtgctgggtgggatgctgatatacacgtatatacacatgtgtatacacacatatatccatatatgtacatatagacatatgtatataaaacctcctttcagtgccttgaccgtcacatttacgtaaaggctggcaactgttacttggattatgtatctgagatgctctaagtagctggaaatgatcaaagccctgagaaaggaaatgtgggactagattacaatggtcccctgttacccaagtccattcaataccacagtcacaaggttgtgcggaaaagcaagagttgtagccacatgaagatgcgaattagtcaggcacttaagcagttgttccacgaccttctctcagcactgccttggcccatttagaaagtcactgtgagagtggctgagagatttaagcagttcaggggaaaggcaagcttgggctaaggatgcagctcagatgctggactgtctgccatgcctgcgtgaagcccaagcttcaccaaatgagcccagaaatactggtgcactcctgtaatcctccacttgggagatcagacattcagagatagccttagctacacatagaacttgagactagcctgggatacatgagattctgtctcaaagaaaattaagtgcaaatttattttaaggtaaaattacacattttactgacattgagcttcgtcaagccagtgagacccatgttagagatacgctggtatcactgaatgccatccacagatgggacccagccatgcttactcagccattcagtcccaggcactgttaaatctttataagctgatactcaattttcataatctgaagctgaacagctaagttagtgtgagtgtcagagaccaagcttgtggaagacataagcaaggatgtcccacaggagaggcagagccctctgacatcaccttgtgcactccttttctgcgcaaatcattttaggtgttgagtaaaatcataaaaacatgaaactgatctgtctgatctctcgggagaaatgaagaagacatggtctcagggctttccccagttaattcttcaaagactctccaacagacctgcatatgggaagaaactacagcgaattcctcaaaggaaacaaccagttaaggcaggcagcctgtctctgccacattcctgtagtggtctcttaggagcctttaagtcatggggccaccttagcctcccaccaagccttctctgtatgtctgtccttgttctcctgctgtcttgaactacagcggctcaaagcccgttgttctcgtctccagttgtggagagtcccagtgggtctgcgtgccccaggcactgtttattacactttacccagaagcagaccagtcttaggacctcacagggctcacagctctgaagcatttatttagtgattagaaaaagaaaaccgccgggcagtggtggcacacactttaatcccagcacttgggaggcagaagcaggtggatttctgagttcgaggccagcctggtctacagagtgagttccaggacagccagggctatacagagaaaccctgtctcaaaaaacaaacaaacaaacaaacaaaaaaacaaaagaaaaagaaaaccaataagattgtagacaaaatatacacttcagagaggagtaacccagttggagtggcccagagggagtgcaggacgccgtgtacacagaacaacacacagagagaaacagagaaaagaaggacaaggggcaagggctttgaagtcaggactgacggacaccaaggcacactcacaaagcctgcctgcttgtctcagcagaggcagcctttgtcgcactggtactgggaggttagccatgatgaggactgtatcgagctgtgccagtgactctaattatttcctaacctttactgacttacaaataaaagaaacttaattttttttaaatgcttttcttagagttcattctgaaatttggcccccattttgttgttggttgttctttaagctatggtatcacatagcccaggctggccttgaactcctggtcctgctgtttatgctttctccatgctgggattacaggcttgtaccaatgtacctaactttgatctcagttttaagtgacttcctgggatctgttaggcctcttgtgagggccaagggcaggacagtcaagacagtcacaggggagccctacagtccctggaaccctgaagcctccctccctcatgctgagcagtctccagggtctgctgtggagtatcttcctgacattagatcacatagtttctcagaactcgcctttaacctctggtctgtgtctgagaacaaaaagcctttacttgacttgtggctcagccttcttgctgtcgttggtatggctcagagcattaaagcagtcagggaacagtcccttgctgtagagccatgagacgtatgcggatgtgtgtggacatgggggaggggcacctacactgcaccatttatgtggaagcccaaagttgggtattctcccggattactctccactttatttattgaggtaggaagtcctgctgaatccaccacttgcctgtctaaacgagggtagctagcttgctccagggaacccctgtccctgcccctgttgctctgggattgcaggcacctgccatgcctacctggcttttccatgggtcctgggaatcaaactctgttcctcactcttacagggcaagtgctctatccactgggccatctgcccaggccacctcatctccatttgttaccttctttacgtagtcttttcttgattagtgtgtacttcaccacacccccttccccacacctgcagggccctggccaggtctcagacttgtacattgtttcctactgtttacctaacccatagtcagataacaagagcatcctggctggtgcttgccactgtttcttcttttacttatccctcagtcttgtgcttgactgtcctttgctgagtctaaagggatcccagggcactcaactccgaagcctcgatgcttgtctgctccgaagcaaggatgtttgtctcttctgggcttccttcaatgctaatacgagccatagatgtgctgcctttgtcccctggctattgatagatactgtcctcacatttgaatccatttcttaaccattccttcagcctctacactgacacacaaagggctggaaagatggctcagtgggtaagagcaccggctgctcttccaaaggacccggttcaattcctagcatgcacatggtggctcacaactatctatgactagttccaggagatctgatgccctcttctggtctccacaggcactagtgttcatatagtatacagacacacataggcaaatcgcccatacacacaaaataatacaataattaaagaaaaaagtatgttaaaaaatagtgtttgctaaggaaatcatgttcactagtcagtgtggcacatgcttataatcccaccacttgagaggacagctgagagcctgaggccagcctgagctacgtggcaggttccttgacagccaaccctaaatgctaactaagagacatttaaattttttcttttctcttcttttctctcctctcctcccctctcctctcctctcctcccnnnnnnnnnnnnnnnnnnnnnnnnnnnnnnnnnnnnnnnnnnnnnnnnnnnnnnnnnnnnnnnnnnnnnnnnnnnnnnnnnnnnnnnnnnnnnnnnnnnnnnnnnnnnnnnnnnnnnnnnnnnnnnnnnnnnnnnnnnnnnnnnnnnnnnnnnnnnnnnnnnnnnnnnnnnnnnnnnnnnnntatgtagagtaggctggcctcaaattcacagagatccatctgcctctgtccctgcctcccctggtatgggattaaaggtttgccacccaccccccctcccactccccgccctgcccccgccctgcccccgcccccacccccagcagttttaaacaagctaattgatttggcccaggttggccgccctcttctctaattcaatgaatatgcttcttctcccttttagtagccgccttcccgggtctgctgaaagaagagaatctgttaaatgtcccgaagccactgcctaaacacctgtgggagagcaaggaggtgggtgagccgtcctgggttgtgcttgtcagtcctggcagcctgccccgcagaggtggaaaccagaactggggaaaaggaagagaggatttgtctggacacagacactggaaagacagtggggagatctgtcccccacgggtcaccgtgatctgtcggcgattagtgcagtgcccctggggtttccaagcttttctgtggatttgctgattctcgaatggaaattgttaagctgctcaccttacatggtcagaagcccggagatttgggcatgaaagggcagatgtctctgctttggagccatctccagctcctgtcgagaactgctatcatgccagatgatcattcctaaaatcaaaggcctttgacccaagcagcaatgagtcatctgtttactactgatttctctgagctttgaatgttagcgtctgaaatcctagtcactggcctccctccacgacccctttgtaaacctcacccactgcggagcttagcttagcctctttctgtagagagctgtcttgtgagaaagtcctccatccacccctagtgatggccagatgcagttggctgtttggtctctgtgcttaactacccccgcaccccccctccggtttccccccctcgagatcccattggtctccacgtccctcccccttccccctcaggatcccattggacccgcttccctcccagcgggatcacattggcccttttccaccctaccctcccattggtcctactcctttcctccatcaaacttattggaagtctctgcatcagtgtggtcttgaaagctttttataaatatgtagttgatgttttaactttaggggcctaaaagaagacagataatggcgtgcaggtgcattcacaaataccatgagctgctctctctgagagacagttgtctcccttggttaatgcacactctagttccagggtccttttccctctctcctccctctccccattgccccgttttgctttttgttttgttttgattttgcttttttatttccttctttttctcccatgctaattgaaaaaaaatttttttaatctaaatatgcaaaacatttgcctttttgaaggaagtaacatttaactagaaggtaagttaataaggcatcgagctaagaaaaggtgctaatggtatatatacttcttttgtctggaaatttaagaaatttaaaattcctcaaaacttaaatggctgctctgtgcagatgcccttggtttgctccgtctctcttggcctctgactagggtggccagatccctacttttcaaacacttgaatttggctgtgcactgagtaagcccaactttctttgttcttcccagatccagtccctgtctgggcgccctcgatcctgtgatgttgggggcggcaagtaagtcatactccttctgctgaaggtttccagtctttcctgctctgtcacagatctgtttataagtcaaagtcaactgcatttgcataaaatgactgttctctttggtcctcatagttaatgtttttgagacagttcattatacagctgacataagccagtaaattaccctgcatgtgcagagggattgtgaggccgaggtgttgacacatcaaaggaggccgagttgggggactcggctgaggaccccaacaagctactgttagcggaacctttgaaacagccggaaggatggtctctagtctttggacatgtacccacacatgcatttaattaattgattaactcatcaattaattgaaagcacaccttggttgacacctcaaaccaaccaacacttaggcaatctgttaaccctggggagctctggagctagcatctgctaggtgaaggggctgccttgctgctcttacctgtagcattccatcagttcatacagatgggttttgactcctaattttcaggaccagatccagaaataaacagaacaagtcagtccccgcttgtagcgtgccagtgttcttagtgaaacagagagggaaagggaggcaaagccaaggaagacgtggatgagcagtggggggatagatgctgacgaaagccgtctgatagggtagtggtgacagaacccagcctgaggaaaggagatgagggacgcaggcagagagagcagcgagtgcagagcaccatgagcatggaagcggtatagttggagcccactgagacaggactcactggaaggatctgaaccatgaagaacattgcttgccttacagtagatctagcagggactggagcgatcgtagcaacatccgagaagtgaccgttcgtatttctcccaactacagaatcattttgatgtcactaatgcccacattgttcacatcacagtcttccttaacccacctggccattgctcttgtcccaaccttccttcctacctgccaacacaggaagctcttgcaatgagctacccactgtcccggttttctagtgcttgaacttggcctctgtagctagttctgaaagacagaatccagccatctaaaagataagaaaacatgcgtgtttcacggcctccctcctcacttgtccacatggccccatctacgccaggttctccccagccttcaggtagcctcactctggcccttttacatggagaagaggctgttacagagcggattccgctgacacctctccccagcctcttctgctatcaggtgtgaaggccccttgctgtcaaagtggattacttccatttcctggccctcccctgaactggcttttctgagacctctctccactacctagcattccctctgcttcccagaattctcagctataagtatatatatataatttatgtgtaagggtgttttgcctgcatgtatatctgtgaaccatgtgtatgccatgtgttgtaggccaaaagagagtatcatatcctctggaactagagccacagatggctctgagccaccatggatgctggtgaacctgcgtctcctaggcaaccagttctcttagctcctaaggcctctttctagctagccacactttttgaaagtgacccagcttctgcttccactgttacagttaaagtgtcccccagactgtgagtcacctcctccagtgcttccctccatgagggacatcccagctgcatgtcagactctgcagccaagctaaggacctagataggagttctgttcttacttgtctccatgcccatcccctagtctgtcatgggctccagggagtggcttccccaggccaggagccagaaatgttcctgagtcctgccacagatgtctccagcatccatccccacttcttcatccctgtgttcctacgacactgcactcttcagtttggtaactcagcaaggtcacttgtccctttacctacagcctctgctcattgcccctcaggtctgaccaccataccgtcctaaggaaactgggtataacttgttatcttagctcctcccctccccgagtccccccccccccccgccatatcgttgttctcagccctctatccagcctcgggtgttctgtgcctgcttcccctgccccacctccagtagtccccaccctcctaaccttaaccttcagtggttttcagtcatcacagtctctagatataccatgtgttttcctgcctccctttgcccctgctttggcctctgcctaaaatggctttcctgcctggctcacctgaattcctcagctttcaaatttagcttccgcagggaggtggtggcgcacgcctttaatcccagcactccggaggcagaggcaggcagatttctaagttcgaggccagcctggtctacaaagtgagtgccaggacagccagggctacacagagaaaccctgtcttaaaaaaaaaaaaaaagcttccaatggcctccaggaagcctcctcccatctgctggtcactccctccgttctagataccgtcaggctctgtgattgcaggggtaagctgatcatttcacacattgcactctttatgactgtctcctgctttatcggagtctcctataggctctgatgccaagagttgtggctggtcactctccacaagatgtgctgggttgagtgacccatttcttctctggttttctccagcccgtcctctctcatcagccacactgctctatcgtggattgagctgggaccctgcaagagctcctgacctggcctgctgcccctctctgttcccttaagccatctctcatgctacagccacagtaacatctctagctaacacttggttccccctctcctatagttcaagacttagtcttcccaacaacatcttcccttctgtttcctccacatttgcctctccctcttcacctctcaacacctgcactgcctgcactgcctcggccacaccaggcatctcgaggttctatgagcaccatgtcatgtcccacgagtagccttcctggacatgactttcctgtcttcagcatctcttgcttttgtgctcagtgttccttgtacctcttgattatactctaaccactcctagcacagcatgcttcctaccgcattacagctgcctgcttgattgttctgttgctccttctctggactctaagaacacaattccttcatgagtaccaagaagccttgtccttgagagggctcactcccaagctgccagagttctagaaactgcagggacccacagcacacatgtacgtgtgacagtcacatacccaccttccagtgcagaacaggactgggtattggaaggaaatatgaactaaggaaactgggtatatctgccagtcccagtgtatgctaatataaggccccaagaattctgggatgtctatatttgaatcgatctattataaataaaggtatgatttgccaagacaggaggatttattcctttgatttataactttggaagattacggcaggagccagggtgagggctcactggtcagagcttttgctgtgaaagcttgagaacccaagtttaaaatccagcacctttgtgaaaagctgggggtggctgcacacatggctgtaaccctattgctatagagagtggagacgggaggattactggggcctgctgcttccagcctagttccagctccagtgaggcccagtgtcacgagaacaaaacagagagtaacagaacaggatccctgccaccctcccctggcactggcatatgtgcacccctcctccagcgcacatagactaaaacagatgcagtgctaacttccattgcactcttgccctaggtgtgcaaataccaaggacagacccagccatgagcatataccttgcttgctcatcacttcttgggcttgcccttgtacctggtgcacaacgatcagtcaatggttttaatcaatgaatggcaatgttttccttattttcacgattatggaaacttgcctggagagatggctcagtgagaaagagcacttgttgcttgctcttacagaggaaccaatggatgacctacaccacttgtcactccagctccaggggtccaacacccttcttagttagggttactattgctgtgatgaaacaccatgaccaaaaacaacttggggagaaaagagtctttatgcttacagtttcatataacggtttatcatcaaaagcagtgaggacggaaactcacataggacatgaacctggaggcaggagctgatgcaggagccatcgaggagtgctgcttactggcttgctcccatggcttgctaagcctcctttcttatagaactcaggactaccagcccctgggtgacaccatcataatgatctggggcctccctcatcaatcactaattaagaaaataccctacaggcttgcctacagcccaatcttatggaggcattttatcaattcaggtcatcacctttcacaggactttagcttgtgtcaagttgccataaaactatccagcataactctcttctgccctccaaggccacctgcagtcccatgaacacacacacacacacaaatgcgtgcgtctaatacaaatataaagtaaatctttaaaaagtaaaaattgttatgtttttttaaatttatttattttatttttatatgaatacactgtaggtgtcttcagacacaccagaagagggcatttggatcccattacagatgcttgtgagccacgatgtccttgctgggaattgaactcaggacctctagaagagcagtcaaaactcttaaccaatgagtcatctctccaaccccaaattgctacgttttaaaagtttttgaaattttaattgaaacaatatatcctggaaggtatctagttgccccaaagatactttttgtgtatgtggtttgggtagcaaaaataatttagagagctagcaaaagggactctaaatatgatgtagtattttacattttatatagtgacttacagtttgcaaagtaatctgtctcatttaacatgtaaggaaatttcaggctggagagatggctcagcgggtaagagcactgaatgctctcccagaggtcctgagttcaattcccagcaaccacatggtggctcacagccatctgcaaatgtatatatctgatgccctcttctggtgtgtctgaagacacctacagtgtacttacatataataaataaataaatcctttttttaaaaatgtaaggaaattgcattccagagagggtaagctgacagactgcgttctcatgagaggcacccctcatgggtctcagtcatcagcaaggcagaggcagcatttgcatcccattttcccacagccaaatgcattgtacaagtaatgctttctcttctttcagtgctttcccacataatggccagaacacaggcctctcaccgttcctgggcaccctgaacaccggagggtcgttaccagatctaaccaacctccactactcagcacccctgccagcctccctggacaccagcgaccacctctttggtagcatgagtgtggggaacagcgtgggcaaccttccagctgccatgactcacctggggataagaacctcctctggtgagtaagggcctcagctgtgtcccctgctgtgtgtgtttggtgcaccactgaatgagagccaccacatccttgtactggctggcttctgctctaggggccccatttctgcttgtttgataagctctggagcagctctgtcgcgcctccttcttcactgtcgtcacgagcccatgtgtgcagagaacttggggaggaacgtttgggagtggagaaataggtgccaccccagagcgacgtgcagttcgtatcagcatatggtgatctctgatcatttcatccttcctgagctctccccagttccccactggacttcaaaaggacagtatcttaaattttagaaaatgtacagtgggtatgatggaaatatttatacttaacatgtagatgaagtagaaatctacaaaagttcaaaactattcaggtgttcagaagtgcttagggatgtggtactgtctgtagtcaggttccttgtaatatgatgtagtgttactgtgcaggcttgattgtccccagcccagaccctgtgtttccggaaagatgacttgaggttgagccaacgctcctcttgtcagcacccagagcaggtggtaccccatcctccatccaccccagttcatgatgcctgccagagatggtgctgaggaaagttccatctagaaaggcccctcagtggccggacgtcagtgggggaagtggttgctggtttccactctgtttcactgaggctcaccaggcagagcagagcctgcccacctgggaatggccccacagggttccctgccttggctgcagtggggctgcagtggggctgcagtggggccgtgggctcctgctgagcagcatggcttcagctctgcacagctggttgcagagcccactcttacttttatttcaggagggcatttcttgaaggaggtgccgtttaataataaactgtcttgtatctcttaaggtgagttctgatactttagaaatcaagtcatgtgtgtgcaaattcactgtcaagagtgagttctgaagccacatggcactgtctttgatacaagatatttcagagtgttccgaggggcctgggttgcactttaagaagacatcggtctcatgattctgagtttctttgatttatttcacaacagaaactcaaacccattaagagttctagattcagaattacccttttagatgaattctctctcagtgaacagtgatacccagcgtcactgaaacaaaacaccatcgccatagctccctcggaccttgaagaagctggcactgtaggctttgtttctagctgagaacctcgtgttcagtcattgacagttaccctcttccacacacatcattttatgtagaacaccacttagctttatagtgtctccaccttaaaaaatgtatggtacagaggctacagagatggcccattggttaacccttgcctctccttgcagaggacccaggttcaggtctcagcacctacacgatggctcagtattccctgtaactccagtcccaggagatctgttgccctctgttggcttctgttagcaccgggcatatatgcagtgcacatgcatacatgtaggcaggcactcatacacataaaataaaattatgtatatatcataaaaatatagaaagctatggcaggtccatcacaaatttcctgccagcctaagtgtctcttcttccctcccctgccctcccctnnnnnnnnnnnnnnnnnnnnccgttccccttcccttttcttttcttttcttaagcctggaatacatgcttttgaaatatatttagactttctttttgaatgagacttcttttataattgaattcagatctctagctctccttacagtttaagctaccgacatctcaccttttcttagactagctgttgttgctgctgttgctgttgctgttgctgctgttgttattgctattgttgttgttttgtttgtggttcaagagattgagcccaggaccttaggaattctaagcaagttctcagccactgagctatctatcctgaccccacagacaattttttttaaaaatcaacactaacacacatttctgcttcttttagcacagagcagtggactgaactaactgcgggtgtgacctgtcaaagcagcagcagcagctatcttgttcactaagaggtgctgtttgtgggtggcttgagccaagcaccaaggatccagcagggcacagggcagggtctctagcttcctggactatggagacaccattgcagatggtcttgctaatactaagattcatcccccttcacctcagagaaacaagagactagcagaaatgtccttccccctgagttgggacacacttttaacagtttataaggaagccaaaatcaaagagtggactttaaggctgagaggtctaggggaagtatgttctctgacgttcatagaggatccagatgctcgtagaggctctgagtaggctgttgtccagcctgaggttctgttccctgaggtgagcctgagctcactccacccgagcctccccagggacggttgtgtcaatcttcttccgctttgggcacagagattcttttctcattcaagctggctgcttggcggcagctctctaagtatggtttcttttccttgtcactggtccacctgagacattttcagtaagagagctgcccagaaactctcgcacatagagagagactgtgcagctagtaggaattttgcttgactttttggaaaaccaaagctttgatccaaagtcaccaaaagatccttgtgactccgttatctttcaggtctccaaagttctcgaagtaacccttccatccaagccacactcagtaagatggcactctcctcgtccctcaagtgccacccgcagccgtctgtggccaacgcctctgctctgcacccctccctccggctcttctcccttagcaacccgtctctttccaccacaaacctgagtggcccctctcggcgcaggcagcctccagtcagccctctcacgctctctcctggccctgaagcacatcaaggcttcagcagacagctctctgcgaccagcccactgaacccgtatcctgcctcccaggtgagaaagatgcttctgcagtatctccagtcagcaggctgggcagtcgacgacctaacttctctgggctggtcaggatctggtcagcgttgtcacactgcgcatccctgagatgcatgcagtcccttgcaagtgtacgcttctctttttcccagaataagagagaaggggtgtgcatttctgattttataatagcaggtttgtgatgtttatgccagaagtaaatattaaactatttttagtcattaactcataaacttgggtctggggaaagggctagggtatatagaatgaaaggcagttcaggctaaagttgcaaacgttatttaaaaaaaaaaaaaatcaatcactaagctaataactacagcaaatcacagagaaaaccccccaaaacactcggtgctctgacacttcaatagtggattaacctcttccctcagtccactagatacgtgaaaaccagtactcttattatataaaagcctagctgtaatgaggctgacagctctccagaaggagtctgcttagaaagaggcacatctggaagcctcagcccattgtggacgtggagggatgtgacattgggctcgctggctttgtttttattctaaactctcagggtggggccttcttgtcataacaactggtaaatatatttttgacccatttgccatacactagatccattataacttcagtaactagtccctgcttcgtgtaaatgagtaatggtttaccaaaaggacttgttagaacacaagggaagaagtctagatgatctggttagtcatcactctactagttactggccaagggatttcttctggagaagatgagagggcatttagtaagttttaaatttttttgcttttaaaaattattggatttgttttagtttttctttgtaagattatttcatgagctacaaaagtattcttgctttctagatacattttaaagtggagaacattagctctctaatattattacttgtttaatgtttaagtttagaaactgcacatggtttcaaatggcaaatggttctgaagggtgtgttttgaaataatagttgtctcccctaacccattaaccacatttttcactgcctggagttggccatttccaaccatttagctaatctctttggtataaacatgttatttcgtgcttattttgttttggatttttgctgatccacattggctaatgacatcctgccatccaagattgggcttcagttttctttcagcattcccaagctcccaccccccataccttgctcagtctgctcatattgtcatttcagtgagaacaatatgtgggtgtttgtgtccctgtggctgcagtgatgtggtcggactcttgaccccacagcacagcacaggaggaaattacaaagtgagcatttggtttgctccagatgttaatgcacgctcctttgagttggtcagctggttgagctagctgagcacctctagttcaggcccagactcttggcattggagcaagcttaacccgtgtcaaacagatcctctgtgagccttggggtgcagtacaggtgccttggcatgactgtaaactgcttttattccaccttccatttagtaactagctgagctagagaggggactccaccgaggccttcccatcaggtgtccatcgacttactccaggggtcggcctccgactgagtgacgtctcctccctctctggaggcttctggatgttctctcttgtctccagcatgtgagacttggagataatgggccttgggatgagtctggagggtttcttcccgctgctctcactgtgccctctcatttctcctctgcctgtctgtctgtctgtctgatgtgtgggacctggcgcaacacacagatcagaggacaacttttgggagttgattctttcccttgaccatgtgactctgggcagtcactccagggttgtgagggttggtgacactctagggttggtcactccagggttgtgagggttggcaacaggctttccctgctgagccatcttgctggaccctcttttttgtctttctggaagatttttgcactatttttcaaaagttcttttcttgttttgttaatgttcaccatgcctctgctttctgggccagcatcaaggagggaggctggttgccctcacagaaactctgaccagaccttcaggggttgatttcaaccattgctcatcctggtcctgcccctcacacctagagttaagtaggtactcagtcacgtgacttgtgactccggttacctctggccttccttgttggtggccttctttgtttctgctgttttacagatgtggcgccatctttttttcctcccatggtcttctctcattagtgttggtcatgattttggttttgtctggtagtgttcactgctgttagcgttttgttagtgtcttgttttagtataggatggttgcgccagctaccttttccagtcttctgtctctcaccagccgtcgtgactttagaaataaaacattatttgcgctgagaaagcagaggaaattggctgtattcttgtttgattcaacaatagaaatgatgctgataggaaatgctttccggggcacgaggtggagatgtgctatgaagggcttctctaggcatcacggggagagcccagcttctcctctcaccaggccttcctaaccctgaatcttaattcttggaagctaacaggtcatgtggtttgttccacagatggtgacctcagagcagagcccactttccttcctgcccacagacgctcaagcccaagtgtccccaccacccccttaccccacaccccaggagctgcctcagccactcctacagcagccccatgcccaggagcccccaactcagcagccccaggcagccccctccctgccacagtcagacttccagctcctcactgcccaggtaagccactgggagcgtgggggtggggcttatttcagtctgaactccagctctaaaccattacctccttacttcccaaagggctcagctttgaccagcttcttcccggatgtgcgctttgaccaacagcccatgaggcccagccctgcctttcctcagcaggtaagtggccgctgctgtcccatctcctttatgtataaaaggcacccctcctctctttcagttgtgttctgcagcccggagggagcgccttgcatcttccctccctcagtactgatgtggcgccccatgccaatgccttgtgcagggtcaggtctcagtagagggtctgtttgaacagtgagtggtggattttcatagcactctagtcatagagttagacagtttagtcaatagagcccaaagactaaagttccagccccaaaacctgcatttaaaaaaagaagtaggtgtcagatcaggtgtatcaatgcacacctttaatcccagcacttgggacataaagacagatagatttctgtgagtttatggccagtttgggtaccagttccagactaaccagggatacataataagacccctttcaaaaatggggaggggtgacaggggagatggctcaacagatatgaacactggctgttcttccaaaggacccagttgtggttcccagcacccacatgacagcttacaacctccgggaactccagttccagaggatctgacaccctcttttggccttctcagacactgggcatacgcatatggtgtacatacatatatgtaggaaaacacttatgcacataaaaataaaccttttaaaaacaaaagataaaagaaagaaattcctgatgtggttgtgcaatacccataaccctatcactgggaagccaaggacagacggtccctagggcttcctggcccgctagccaggcctagttggtaaattctaggccaatgagagaccctgccttaagtttaaatggtagatagcatctgaggaataacacccaaggttgccttctggactctagaacacacacagtacatgcacacacacacacacacacacacacacacacacactcacacacacactgatgtatatatgcacatccattcacagtgaccatagcagctagcttatcagtctcctatgttgggactctgaaggacgaggagacatacctggcccctggagcagagttagaaagcagtgtagccttgtgccagcaagcctggtgctgcacccagctcaggccgtggctctctaagagagctgagcccaggaccagggtaggggaagttcccatcacagtgtttttagtcagtcaccttcttttgcttttatatttttacacctcgagattttagtgtttggtaaggatagtcaggctctagaatgaattaaaaagcgaaggaaggacaggcccagctccagaacgtaataacagaaaatagtaaaacagataaagatgctggtgccaagtgggctctggcagggccttgtggcgagagcaggtagttctcacctctctgccattcccttctgttatttttgtaatttgtggtactgggtggcagacccagggtctaacacgtgccaggtaagcactctacccctgagctacccgcagccctacctcgctgtttcataaagatgtagccctagcaagctaggcgaagatcagcactctcctcaaaagtgtcagagacatttttgaggagacatttttttaatggttttaaaaattagtttcagcatagattcctcaatgagaccccagttgtaagctgccctcacataccttgtcctagagagacaaggatggcgggaagggaagggaaggcgttctctctctcttatccccagagccagagagcctactgtttccttgaccacagagggacctctgaggggctcgcacaggccttggtgaggctgaggagcggggatatctgagactcagagtctgaactgtgcccactgtgtctcttggggctgtgtagcaggcagagtataggcagagaaaagtcacccagtgtggtcctcacagacccacctgagtaccaggggatgttgtgcctatgatagcgcaccgcagagccctccaggatcctagatgggactgtgggacagtagggacagtctgcccttgctcacacacctcagagacagagccccttgaccacaatgtggctttcgatgcttccaggtgcctttggtacagcagagccaccgagaaccacaggactcattccacttgagaccaaacccatattccagctgtggcagcttcccaggcaccatcctgacaggtgagcatgggccccgccccagcttcattgctggtctcctctctgtgtgtttaccgctgtgcggcaggttaaatcacgcagcattaggtaaatgaaacccccgggtgattaaaaaccattgtggggagacctacaaaacgtcaaagagttagctgggcatggcagtacacatctgtcattcgagcacttgggaagctgagataggagggacccttgaggttgaggccagcctaggctacatacagagtgaggccctatctaagaaaaaaggttgatccaggggtaagagccatgggtctgggagtggtcagtagctgggtgctcactgtcctgtctgggcatgttggggactgtcactctttaaaagccttggtcctcctgtctccaaatttcctctctgctcctttcagaagatacaaacagcaacctgttcaaaggccttagcggggggctgtcgggcatgccagaggtcagcctggacatggacaccccgttccctctggaagaggagctgcagatcgaacccttgagcctcgatggactcaacatgctaagtgactccagcatgggcctgctggacccctctgtggaggagacgtttcgagctgaccggctatgagcacagtgcagtggaactggggaactgaaatggccagagaaagctggggtggagccagcaaacaccctgccggtggtcacagccagcaaacaccctgacagtggtcacagccagcaaacaccttgacggtggttacagcatagagggagccgctgccccgggctctccactgagctcagccaaggctttgctagacacagctgcactcttcggcccatggcaccagttgtactgctgcaggccagctgctttggagcttccggtgaccaggaagctgaccatgtcacccttaattctctttattggccatccagtcagtcagtgtgtaaatgtagaaaatgctgtgtaacacgtcagtgctccaaacctcagattcccatcagcactgaagatggaacgctataggaggcagttgggggcctcgggcccgtgtagttggctcagtgtcacacaacggtaccagagcaccatgatgcctttctgtctgaccgccaaggccaggcagccctccagctggcgggtattctgggcccagccatcactctgtccaatggctcacttaaaatgaagaagcttacccagccgtcccagggcaggcttaagttaggcaaactgaaggcagtttgcttcctcccggtttatgatctctttgctgctgcttcctgtatgcgcacctttccctcacagacaggaggagagggagacctgtttgctcactgaaaaaaatgtccttggaaacaggatgagcctaaggaggacagcgctcctaggagaatggaggaggaaagggaggctacaggtgtgtcacctgcacaagatgccctccctcttaggcctgccaccctccagcccactggaaggagctgctgggactcgtattagtgcagggcagctgaactgcccttctccccagctgccctgcagacctcaagtttaatgcaatgcccactagactgtaagctcccagagggcaggaactgtgccttgttctgtattgacccctagtgcccaccaagtgcctggtaggagtgcatgtacccagggatggaggagagagggactgtgcctcgtggtggggcggtctaacctgcagctctctctgtcccctgccttagctcagagcttcacctttcagactcacttgagtgtgccttaacactaggtgaccagacctgccactaggctcagcgccactcctcctagggaatatgtccctcagcagctaggtggacatcatccagtgcatccagcatggctgatcacaccaagccctaggagtgtggggcacctggcatccagactgggcccccacagcaaattcttcctctcggacctgtactttttttttttctaaattgcttaaaatagaggtgcaaactttgaggttaagaaataaggcctggctgggcgtggtggcacccgcctttaatcccagcacttgggaggcagaggcagtaggatttctgagtttgaggccagcctggtctacagagtgagttccaggatagccagggctacacagagaaaccctgtctcgaaaaaacaaaacaaaacaaaacaaacaaaaagaaagaaagaaagaaggcctggttcatgggactcttttattcattaacgccttctcacacagtaagtaatctgagcagattctaccagcacctgcctcctagccccacatgaggaaagtgatgtccacccagcacaagggaggagccggggtgggtgaggagggccctggaggagaacttttgcctgacgcctgctccccttcctgcgacatgggctgaagctgaggctcagtggctgtccccacccaggagagcaagggtggagtagaaggaagctgacccatctgtgcctgaggcgaggaagcctgggaatcagaggctgctccagctccccacaccgcggctcttcagacagccgggtggagctgtgcggccacgtgccccagtctctgctgtttaattggaaactaaattagaatcctcttcccctgaccatgccactggcctggtcctgagatcccagagcacccggggtgactttagttaaagtggaagcttttcactcctctgagctgcccagcgccccagcatacacactcaagccagctcccgtgtccgtcttcaggcagagatcgatgctgatgtaaaagttgagaggaaggggtttccagcacaatctgctctctgcgttgagcctgatccgtgggatcatcgtgtcggtgacgcccacacaccggggaagaggcaggtgtgaggtgacagggtcaggagggggaggaccctgaaggagaatccctgcttgcacagctgctgtcctctggtgaaggcgtaacgggagatctcaccaccccataccctacactgccctgttcctgaggctttctccagccaatgggaaagcgctggctgcgggggcggggggggggggagttgaaaaaaaaagaaaacccaaaaaccaaaagagacaatgtagcactgaattaaatctgcccataggcctatcagcctgatcttttcatgtgtgtagctttaagccactagagagcctaccggtctacatggtgttgagtacagcaggagactgcgttgccctgctgcagtcgtgtgagcctgcactcgatgctgcctttgtgactagcctgtcttaggcggcagcattgaagtggctaccggcttccccagacctctcttcagtgtcttctctctgtcccaccagctgcccttccccagcactgcagggtggtgggttttagcacacgagtgtggggagaagtgaggatgagctctcctttgccctgctcccttcccccaagtctactgtatattctctgggccgagaggtcgtgtattcatgctcgtgcacatatctgaagacatttcctgttgggctcttctgatttatgcacagatggttcccagtgttcccactgctccagaacggggccatcccagcagctagtcagacttccggccagtgtcctaactcccggccttttgttaagcaatattgaaagatcggactttgtataaagtagcttccaagttttataatgcatcattttacatctttcataattaaaagcagcacaatatggttgtatctgctctcggtgtttctcttcagccttgggtgcaacaaagggctcggtgggcagcttctccaaccatctctgcctccttggctggcagtcactgatctgcaaccatggctgagtcctgagccaggccttcctgagcctcctcattatatatcaaaggcgcacagtcctgttaaaactgggtaacaaggacagggctccctggatggatcagactcctgcctcaccctggcagttgccccaccccttaacccagttgttctgtcccagtccagcgctgacaccacttcccgtgcctctcttcagaggcatgccccctcagccacaccgagtgcttggattaggggtgactcctgaaatctccctcagacatcccacttctgaccagcgtcttcagagtccacctcagccctggtctctcagcatgtgtgacctcatccaggcccttctccctgactcctggcttggtctctgggatgagcagcctccaggaagcctgcagacagctctctttgctctgactgcccatacctggccttttctattcagaaactcagccagcccaccttgcccaccaacccgtcctctgctctctctgggtccctctggaaaccttgtgaagcactctctcccctccagccacccccagatcttttcctcctctgttctctgtctcatccccctcccctaagcttgtccaaatctctcactaccttattccccctcccctatggtgcatcggtctaacctgggttcatctttcctgtgtcattactctgttcttcctccaagaactacctgagttcccaccccaaggccctctacctcagcctttgcatctgcctcagtctcctccctaagacagaaagcaagccgcttctcctcaagttccctcagactacaggctatctcctgccttccccagagcgcagacccatcacctcccacacccagctgtgaactcccttggcctgtgcacactgaacacttggagcctttctcgggtcctgccttgttagttcctatcctgctgaccctcccccaacccagaagccctcccttggactacaccctttccctcaggcccacacactcccctatagtccttcatcatctgcttccgccaagcgtgtacccctcaccctcggtctcatccacgtgccaccccacctaccttctacttacaaatctgtgcgtgaggactgcacagatggctcagtggttatgagtaccgattgctttttcagaggacctgggttcaactcccagcacccacctagcagctcacacctatctgtaattctggttcctgagaatctggcaccctcacatgtaggcaaaacaccaaagcacagaagaagaataaaccttgttaaaagtgaaaaaatctgtgggtgagaaaccatccctcagtattggccttccatgcccacagttctcaagggttcaggtgggcgcgtggctgttgcccttatgccgaatccctgtgcctggcatagagtcggagctcagtcactacctccctgctgctaagctctttctgtggtcacagttgtcaccccagtgctccagctgctgagtaagccattctctccacactcaatccagcctgagccccagtgggacactcagaagcccccactctggctccctcctcacccctgctcacccagcagccccgtctacactcaacagagtggtgctttttttccatattttctgctcattctttgagaatttcatacatctctgcagtggatactggttaaacaacacaccccatgcccccttcacctcctagacctcaccgccacctccctccccccacaccaattcatccttttatagcccatggggttcagtgagcactgtccttagccactgggacacgggcatcctaaaggatcacgtccactcagagggacagattttacttcatctttctgcacctctgaaatgaaacaaacaccttccatgtcatgatactgggttgtgggaagtgaacttgcacaattcaagaatttagaattgttcctggcaccaagaattccatcagccgatgtcagtttttttaagaccctggctggcctggagttcacagggatcctcctttgcctctgactccagcgctggaactgaagccatgccacacctggcagtcaacatcattttttacaactatttgttacatgaatctgtccctttgaggacaatatgtactgatgcttagagtactgggcttgtacaacacttgatttgaaatgccaaatattagcactggagggttactctaaatgggcttcactgtgcagctctggaaagtaagatttgcagtaagatcttggggctgtgtccccatgtgaacactagatggagctgaggctgtacgagtggttctaaggacaggggaaacaaccaaagaaagagagccacttgatcccctgggtctctgaagattggcatcaggaaggactgacgcccacagtgacagaaggccatcagcatccttagtgaccactaccaacgatcagacactgcacacccacgttccttccagcaacctaaaagaactgcagagaggctcagggtcacctatctgccagtgggcacccaaggccctgaccctaaggagactgactccacgacctcctgctttctgtctctgtccttgccatggcacaggattcccaaggcttcaagctacatcctgaagccgggcaagctgctatacacatggaagccgaatgcttgggaggtgggacagatgtccacggccagcctcagctatatgacaagactgaagccagcctgggctacatgataccctgtcttagaaatacatacatatatatgcacacgtatacatacatacatatatatatggagagagagagagagagaggtgctggagagggaactcagtggttaagatcactgactgctcttcagagaacccagactcaaatcccagcacctgcacggcagctcacaaccattcaagactccagttccagggagcctatgcccttttctggcctttgtaggcactggatgcattttttttaatgtaaaattaaaaaaaaaaaaaggtgttttaaagggctttattggcctggggaagaaagtgaaaccctgaattgatctctaccactgtctggaagaaagagccttgtttttataagtgtgcacattcatgatcacagatgcaaaacagcgccgagccacaccccagaggctaggctttcaagtggttggaacctggaactcctagaaatcactggggctggctggtacccaggcagcttcggtagagaggtgtgcaccgtggatgatagagaaaggatcagcggtagggagatttgccccagtaatagtgtgcttttaagaaaaaaaaaaaattctgtttaacagaacaaaaggaaatctagacgtgatggggaaagttaccaagccacaaagagtcacatgctttttacgtcgctaatacgtttttcaaagaacaatactaagtgcttgacttgtgcttttgacagactgggactgcggacagacagacggacggacggcatctcccgaggacccaagtttaggagaggaaatgagctcgtcaccacttccgggctccttcccctcccacattttatgagtttgagttttctcattgtcaaggcttgcactatttacatcctgtctggtaaccttcgctcccaccattgttccgggtgtggactccgtgctctggcctgtccttgcagaatgggcttcccactcctcatccccccctccccattcctcctaagcctttgtcatcagggaatctttgccagaagggctgagctagtcccagccacaggtgtctggattctctgctgccaaccttgaaggttttacaacagcctgatttatgcctgatgcctgggggaaattgatagggaaaaacaaacaaacaaacaaacaagaaaaaaactactgtgctgctatgcctcccaatataagtacgggagtcctgactcggagttggtgatggatggttgaagtgttagaatttggaactaaagaaaataaccgggcagtcctgactctgtgtgtgtgtgtgtgtgtgtgtgtgtgtgtgtgtgtgtgtgtgtgtgtatgtgagagagagagagagagagagagagagagagagagagagagagagagatggtgctggaggctactgagctgggaactgggaagtcagaattgatttagacagtccttgcctctggttcacatataaccgtggggaagcaagacttccccattgtgatgcacatgcctgtagcctgagtgcgttggaggtggaggcaggaggatagtgaatctgaggctatcctgggctacctgaggctctgactcaaaaacaaaaaggccaagagaaagagaaaaatgcatctctggaactttccattttctatttctgggctgtgattgcccacccctaactacaatggcaacaccatggataaagacagactaactgctgacaacatgggtaaggacagactgcttttcccttgggagggagcagggagaaagttgaatggttttctgagtatcaacacgagcccctgaagtaggaaatcttagctgcttcatgaagcatctcacaggaggggcccaagagaaggagacccaggggccagaatccatggacacagcagctgtaggctaggctttgcaaactgtccaccagtgtcttcctgtgatagcaaaggacatgcattgcccaaaccagatccttctgggagtgaaaagaaacatcccgacatcagccaggaccatagaagcaaacagggcccccattcaggagcagacatggggcctaagcatatggactctctagtgagacactggggttaatgtctgccctccaccctttactgtgaaaaagaggcaagctggtggttgctctctgcctcagtttctttatcagataaagagagggacgcccccacctcccctccccatcactacaggatgagcatcctccatttctgctgttagtctttggattctgttgctattgttatttattgttagctattgttctatagtccataccagtctccaactgctgcattttgagaacaacttctgaactccccactttttgttttccacctccccagtgctggaattacaggcctatcccaccacctctggttattctttatattaaagtgagtcctttattacaaagacctcaaaccatgagaaaatgatttctgagaagcaatgggcccacgacttctgaagtgaacaccttagtgtttgggactactcagaaaggtctcatggctgcctctgcagctgtgctggctccagagcagctgggagccggcagctctgctctaccttctcaagataccaatacctacgtagcctcaggagcctccagaccaacctctaacaatgcttgcttgttacttgttccaaccctttaaaatcaggcttttcctctggtggtttcttcaggggctttgattctctccaaaaaacaaacaaacaaacaaacctctgcaaacatctacaggtcttttattgggcccaggacggagttctgcaagctggaggctacctgggccctcacctcccggaactgggccatgaaattccacaatgctggcccatccacgcagcccattagatgcactctctcaggagtctgaagcactagtaagagagacagagagtctgggagttaaaccaaattaatggccatgccccagagagaaggttctgggaggcctgatcgttgagcgattcctcagtccatgcaaggggctctgccgacattctccttggagccctggtgtcggcacatcagctggctagcttgccaacgcacactccctaaggacagcctgtggcgtccaaactctgcctctccacgacctgcatggctgattctgccctccctttgcaatcaggcagggcagtgggggctgatgatatgtgacttccagttcaggctttctgaagctgcttggcttggctctgaggaacttcctgtgtgaccccacagggtggcagcagccacttgctgctaaccactcctcccctggggggcctgaacgtcggcattcctgggacaagcactggtccttctgggtgctgaggacagggtgcacagatggggacctgtgtagggttagggtggtagctgcatagtgaagaggggtttgtgctaaaagacttctcagcatctttagagtgccagtccatctccacgtgcttggtgtggctaccagcagctttcagactgagccccgagtcctttcaggctccaacatcttgtggagccgcatgagaagttatgttcagaggtagatggagagactggaaggcgttcaaaccccaagggaaagggaaggaggagaccaaagccaagaaaaagacaggatgccacggaacttcaatatggaggaccacaggaggctcagggaccaatccatcagtgttttgttttgttttgttttaagttttactgtttttaattacgtgtaggtgttatgtgtctgagcatggatatgaacatggaatcacaagtgccctctgaggctctaatcccctggagctggtgttacaggtgattgtaagccacctgatactggtgctgggaaccaaacccaggtcctctgggaaagcagccagtgctcttaactactgagctgtctgtccagcctctccgttaatgttcttatcgtaacatcaatatgagtgcatagccaagaactcgtgtttgagggactaaagcagtggctcagtggctaagagcactggttgctgttccagaggcctggaagtcattccaacacccatatggtggctcacaactgcagacccacaaggtatatgaaaccttctggccctgtggggaggggagggattctcatgtggtacacagatacatgtaaaggttgaacacccagatacatatacactttttttttccttaaggaaaaaagaattttggatcccagtactgctcgaaaagggccccatcaccagtggaaaacacccactgatgattccatagccatgtggcaaccatctctaggcttctagtcctccagagcccacgagcagcctctgggctaggtttttattttattttatttttaaagatttatttattttatgtatatgagtacaatgtttctgtcttcagacacaccagaaaagggcatcaaataccattacagatggttgtgagccaccatgtggttgctgagaattgaacttaggacctctggaagagcagtcagtgctcttaactgctgagctatctctccagcccggtttttatttttgaaattaaaaaaaaaatgtatcccggtcatctcatttgtgaggatgacaatgggnnnnnnnnnnnnnnnnnnnnttcgtaatgagatctgatgccctcttctggtgtgtctgaagacagctacagggtacttacatattaaaaaaaaaatgcaggtgcctgctaaagacccttatttgcatacgaatccagacctgacaggttagggaaggttgagtttaaaaccacaagaaaggcgggtgcagttttacacacatgtcacagcagccattcaagagaactaatcaggaagttcattgtgctacccagagtgccaggccaggggctggggaggtgactcacttggtaatcacctgccatgtaagtctgatcttctgtagcctgctgcagaggtgcatgcctgcaagaacacgctggagaaggcagagacaggcaggtccctgagactcactgaccagccaacctagcaaaatcgatgagctctaggttcagtgagagaccctgttcaaagaataaagtagagaaagattgagatagatacttgaatacacacacatgcatttgataccatacacacatgtgcacaaactcacattagcacatacttacaccacccgcacccacatatacacacacaaactaagtcccaggcgaggccagactatagtgtctcaaaagccctaaacaacaacaaacaagctcccaacaaggaacaagaaggaaaatgctctacaggtctacaagtggcttcctgcctctgtacagcatgcacatgtggtccaaatcttatttaatccctcaagcccacctcagtggatcaaataaaggattcccttggaaaagagaagaccccttttcaactttaaaaaaaaaatagtagggagggaggcaggaattgggaaagagaaatgacgtcaacctctggcccccatatgtacaccaatacatgcatatatcttgctcatcagtaacaaagactttgaaattctgcctgtgctcagagctgtagcatgggtggaccgtcagcctctctgaaggacagtctggtccccactatcagccaaactgctgaggtcttggaaggaaacatgata

SEQ ID NO: 1931 - DNA, 3250 bp, Mus musculus
tctgtttccaggttcagtttcagaagcttcagcagctgcgccttacccagtaccacgggggatccttacccaacgtgagccagctgcggaacagcgcgccagagttccagccatcacttcatcaagccgataatgttcgtggaacccgccaccatgggctggtggagaggccagcccggaaccgcttccacccccttcaccgaagtttgatgggaatgctttcgcagccagttattcttcacagcacctggatgagagctggccacggcaacagcctccttggaaagaagagaagcatcctggattcaggctaacatctgcacttaacaggaccaattctgattctgctcttcacacgagtgctctgagcaccaaaccccaggacccctatggaggaggaggccagtcagcctggcctgccccatacatgggtttctgtgatggtgaaaacgacggccatgcggaagtagccgccttcccgggtctgctgaaagaagagaatctgttaaatgtcccgaagccactgcctaaacacctgtgggagagcaaggagatccagtccctgtctgggcgccctcgatcctgtgatgttgggggcggcaatgctttcccacataatggccagaacacaggcctctcaccgttcctgggcaccctgaacaccggagggtcgttaccagatctaaccaacctccactactcagcacccctgccagcctccctggacaccagcgaccacctctttggtagcatgagtgtggggaacagcgtgggcaaccttccagctgccatgactcacctggggataagaacctcctctggtctccaaagttctcgaagtaacccttccatccaagccacactcagtaagatggcactctcctcgtccctcaagtgccacccgcagccgtctgtggccaacgcctctgctctgcacccctccctccggctcttctcccttagcaacccgtctctttccaccacaaacctgagtggcccctctcggcgcaggcagcctccagtcagccctctcacgctctctcctggccctgaagcacatcaaggcttcagcagacagctctctgcgaccagcccactgaacccgtatcctgcctcccagatggtgacctcagagcagagcccactttccttcctgcccacagacgctcaagcccaagtgtccccaccacccccttaccccacaccccaggagctgcctcagccactcctacagcagccccatgcccaggagcccccaactcagcagccccaggcagccccctccctgccacagtcagacttccagctcctcactgcccagggctcagctttgaccagcttcttcccggatgtgcgctttgaccaacagcccatgaggcccagccctgcctttcctcagcaggtgcctttggtacagcagagccaccgagaaccacaggactcattccacttgagaccaaacccatattccagctgtggcagcttcccaggcaccatcctgacagaagatacaaacagcaacctgttcaaaggccttagcggggggctgtcgggcatgccagaggtcagcctggacatggacaccccgttccctctggaagaggagctgcagatcgaacccttgagcctcgatggactcaacatgctaagtgactccagcatgggcctgctggacccctctgtggaggagacgtttcgagctgaccggctatgagcacagtgcagtggaactggggaactgaaatggccagagaaagctggggtggagccagcaaacaccctgccggtggtcacagccagcaaacaccctgacagtggtcacagccagcaaacaccttgacggtggttacagcatagagggagccgctgccccgggctctccactgagctcagccaaggctttgctagacacagctgcactcttcggcccatggcaccagttgtactgctgcaggccagctgctttggagcttccggtgaccaggaagctgaccatgtcacccttaattctctttattggccatccagtcagtcagtgtgtaaatgtagaaaatgctgtgtaacacgtcagtgctccaaacctcagattcccatcagcactgaagatggaacgctataggaggcagttgggggcctcgggcccgtgtagttggctcagtgtcacacaacggtaccagagcaccatgatgcctttctgtctgaccgccaaggccaggcagccctccagctggcgggtattctgggcccagccatcactctgtccaatggctcacttaaaatgaagaagcttacccagccgtcccagggcaggcttaagttaggcaaactgaaggcagtttgcttcctcccggtttatgatctctttgctgctgcttcctgtatgcgcacctttccctcacagacaggaggagagggagacctgtttgctcactgaaaaaaatgtccttggaaacaggatgagcctaaggaggacagcgctcctaggagaatggaggaggaaagggaggctacaggtgtgtcacctgcacaagatgccctccctcttaggcctgccaccctccagcccactggaaggagctgctgggactcgtattagtgcagggcagctgaactgcccttctccccagctgccctgcagacctcaagtttaatgcaatgcccactagactgtaagctcccagagggcaggaactgtgccttgttctgtattgacccctagtgcccaccaagtgcctggtaggagtgcatgtacccagggatggaggagagagggactgtgcctcgtggtggggcggtctaacctgcagctctctctgtcccctgccttagctcagagcttcacctttcagactcacttgagtgtgccttaacactaggtgaccagacctgccactaggctcagcgccactcctcctagggaatatgtccctcagcagctaggtggacatcatccagtgcatccagcatggctgatcacaccaagccctaggagtgtggggcacctggcatccagactgggcccccacagcaaattcttcctctcggacctgtactttttttttttctaaattgcttaaaatagaggtgcaaactttgaggttaagaaataaggcctggctgggcgtggtggcacccgcctttaatcccagcacttgggaggcagaggcagtaggatttctgagtttgaggccagcctggtctacagagtgagttccaggatagccagggctacacagagaaaccctgtctc

SEQ ID NO: 1932 - protein, 426 aa, Mus musculus
MGFCDGENDGHAEVAAFPGLLKEENLLNVPKPLPKHLWESKEIQSLSGRPRSCDVGGGNAFPHNGQNTGLSPFLGTLNTGGSLPDLTNLHYSAPLPASLDTSDHLFGSMSVGNSVGNLPAAMTHLGIRTSSGLQSSRSNPSIQATLSKMALSSSLKCHPQPSVANASALHPSLRLFSLSNPSLSTTNLSGPSRRRQPPVSPLTLSPGPEAHQGFSRQLSATSPLNPYPASQMVTSEQSPLSFLPTDAQAQVSPPPPYPTPQELPQPLLQQPHAQEPPTQQPQAAPSLPQSDFQLLTAQGSALTSFFPDVRFDQQPMRPSPAFPQQVPLVQQSHREPQDSFHLRPNPYSSCGSFPGTILTEDTNSNLFKGLSGGLSGMPEVSLDMDTPFPLEEELQIEPLSLDQMLSDSSMGLLDPSVEETFRADRL

SEQ ID NO: 1933 - DNA, 72072 bp, Homo sapiens
  misc_feature (1)...(72072): n = A, C, G or T/U
gcactgcagagggcaaaggaagagtgttgggggctgctgtcagagaggctggctgggtgctggcaggtctgacgctggagatttgttatacattttgaacttctcttgaagtttctcttttcttttttttttgaatgatgttataatagggtatttaaccaagtatgacatccttttttattccgcttagtttgtaaggtagacttaaatgatccatttaaccccaaggcagtgtgaattaatagcagcccctttgttgtggacaggccttcacgactcccccacttgtcatgagaatcaaaggaggtgctggcagtgcctagaatgatctccagctgggttcccaagagaggcacagttgttcctttgttatttagacttgtcctttttaaaagaggggggctataacatcttccattagcttcagtctgcatataaataaagagccctgcaagcttcaggaacctgccttacttcctaaacttgataaatttccactcttcaccaacgcttttttttttttttttgagatggagtttctttcctgttgcccaggctggagtgcagtggcacgatctcagctccctacaccctccacctcctggattcaaacaattctcctgcctcagcctccccagtagctgggattacaggcatgtaccaccatgcttggctaatcttgtatttttagtagacatggggtttcaccatgttggtcaggctggtctcgaactcctgacctcaggtgatcctcctgcctcagcctcccaaagtactgggattataggcatgagccaccgtgcccggcccccagcagaatttttaaaaaagagttgtggtctcattatgtcgtccagggtggacaccaacagaaatttatttagtactggtggccaatctgtcgcacatttgtcaagaactaaagaagtaaactaaagaagaaccaagcagcatcatgggcaagctggaggcccagtagagctaagtgatgagtttaaggatgccgttagagccaagcattaacggcagatagggtagatagacactaccctatctagtgtctctactaccagctacgtttccaaccagtctcctctcctacccaagctctgttggaaacagatacaaacccaagtatacagaggaattaagaagggttggggtagcattttaattctatcagaggaagcattatcgtcaatgaatagctttgtgacttttagctaaccatttacataaatattaagttagatacttactccaaatgagactactggagccaacgtcaatttgtaggtgtgccgtttgtattgcatcatagtcaggtgtcttagcaagactgttaacctgtaattgaatcttaaatcttcagtggatttagaagaatgtaatacaatttatctggagaatttctttttcatttttcttttttgaaacaacaaggtctcgctctgtgccccaggctggagtgcggtggtatgatcatagctcactgcagcctccacctcctgtgctcaagggatcttcccacctcagcctcccaagtagctgggactacaggtgtgtgccactgtggctagctagtttttaaattcttagcagagacaaggtctggctatgctgcccaggctggtctcgaactcctgggctcaagcagtcctcccaccatgagctcccaaagtactgggattacaggcatgagccatggtgcccagtctggaaaatttcttaatatttttttttttaacttctgtatatatcagtacaaatctgtgtaaaatctcaaaaagaattgattttatgtaggctatatagcaaaggaggcaaagcggtgaggtaaagagaatactgaatgaggctcgggatcctgagttttagtttttaggctgctacaaactagctctgcaatcttgagaaaaatcacttcagctctctgtaccttggtttcccatctgtagaaggaaagagcagaattccactccctcttgcttttacttgtgttgctttctctgctaagccagcaactccagttcccttcctttgcctatccccaccttattttcacctactgcaagctggaaaatgagatgcctcagtttgttagacctgggtggggtgtgatgcagaactggaggggttcctttctaattgctgtcctctggggttcttatccatttttgttatttaggggctttctttgctttctggctcaccactgagatggttgaaattgccacataaatgacccctggctcaagctagcacattgtcctcatagcataaaataatggtgacatcacattccggtgcagtcctctgtaatattgaagcttcatgcaagtacccattcccagtgttgacgatggtattccaggaaaatatgtgttgctcttgcaggagttttatcactttttttcttgatcacgagtcatcatgaggtctgtcattgaagctactaagagttgtcttatgtagaattgcttctgtttgagaatatcgattaggcacccctttgtacagatgctgaggttgtggtattctggatcaatactttttcaaagtattaaccatttatatgcttaatcctggttttctgcatgtttttaatatattttttaaaacttggtagaacttctttttttttttttttttttttgagatggagtctcgctttgtcgtccaggctggaatgcagtggcacaatctcagctcactgcaacctctgccccctgggttcgagcaattcttctgccttagcctcccggtagctgggactacggactctcactaccatgcccagctaatttttgtgtttttagtagagacggggtttctgttggccatggctggtcttgaactcctgacctcatgatcacccaccttggcctcccaaagtgctgggattataggtgtgagccaccgtgcctggccctgtagaacttcttacatggaaggatgtatttggtcataccattagcatttagaaacccatatttcacttcaaggtatttggaaattacatttctcctgtttttaataactgtataaaaatacaactataagctaggatttattttgctacttagctgcagaagaaaaatgtatgtcttgattgttcacacataaagaatatactgtaccatatatgcttttgataatgataatcttcctagttgataataaacaacaactctccaattcttggacttcagctcatttcctaacttagcgtgggcttatgtaggaatctgcttatggtttaccagtcaagtaagatctggggtttctaattaaccacaaacataatgatatgccaacagtacagtacatctacccaaacagttaatgcaaatgtaggtcacattgatagatcaatagtgtctaaattagaggaagtaatttcccccctaggtgacgaaatctagttgcaacttttcagccattcatcccaggctgcagctttcagatgctatgtgataggtaggtgtgcacctacacgtaactgatatctcatctaactgagctctaggtcccttggggaagtactccgggagtatggtactgtctgccgttagctctaaacttctacctggaaatccacaactctgcttcttttggaagattcacacgtcctgtttcattacagaaagagttctgccgttagcattagccatgtcactcccctccccggtctatctagcactggatcccagacactgatgtggagaaccatttctgtatggaggcacagaagccttctcttcctcatttgatgtctaggtcccatgttctgaaacagtagagtgcttttcagatcctgagcctaaggccctccttaaaacacatagagtcctatttacaggttcgtttctttcttgcttgctttctgtatttatttactagagacaaggtctcccctctgtcacccagtctggagtgtagtggcaggatctcagttcactgcaacctctgcctcccaggctcaagtgatcctcctgcctcagcctcccaagtagctggtactacaagagcgaaccaccacacctgacaaatttttgtattttttgtaaagatggggttttgccatattgccaaggctggtctcaaacttgtgagctcaaatgatcnnnnnnnnnnnnnnnnnnnnnnnnnnnnnnnnnnnnnnnnnnnnnnnnntgttcttcaagaaaatggggccaggcacaatggctcatgcctgtgatcccagcactttgggaggccgaggggggtggatcacttgaggccaggagatcgagatcagcctgggcaacatggcaaaaccatctctactaaacataaaaataaaaaaattaaaaaattagccaggcatggtagcacatgcctgtaatcctagctactcaagaggctgaggcaggagaattgctcgaacttgggaggcagaggttacagtgagctgagatcacgccactgcactgcagcctgggtgacagagtgcgactctgtctcaaaaaaaaaaaaaagtaagaaaaatgggactctctatttcattcagtctctctctgtcatcactaccatattagccagctttgctttagtaacaatccaaaaactcagactctcaacaaacatttatttttcactcatnnnnnnnnnnnnnnnnnnnnnnnnnnnnnnnnnnnnnnnnnnnnnnnnnnnnnnnnnnnnnnnnnnnnnnnnnnnnnnnnnnnnnnnnnnnnnnnnnnnnnnnnnnnnnnnnnnnnnnnnnnnnnnnnnnnnnnnnnnnnnnnnnnnnnnnnnnnnnnnnnnnnnnnnnnnnnnnnnnnnnnnnnnnnnnnnnnnnnnnnnnnnnnnnnnnnnnnnnnnnnnnnnnnnnnnnnnnnnnnnnnnnnnnnnnnnnnnnnnnnnnnnnnnnnnnnnnnnnnnnnnnnnnnnnnnnnnnnnnnnnnnnnnnnnnnnnnnnnnnnnnnnnnnnnnnnnnnnnnnnnnnnnnnnnnnnnnnnnnnnnnnnnnnnnnnnnnnnnnnnnnnnnnnnnnnnnnnnnnnnnnnnnnnnnnnnnnnnnnnnnnnnnnnnnnnnnnnnnnnnnnnnnnnnnnnnnnnnnnnnnnnnnnnnnnnnnnnnnnnnnnnnnnnnnnnnnnnnnnnnnnnnnnnnnnnnnnnnnnnnnnnnnnnnnnnnnnnnnnnnnnnnnnnnnnnnnnnnnnnnnnnnnnnnnnnnnnnnnnnnnnnnnnnnnnnnnnnnnnnnnnnnnnnnnnnnnnnnnnnnnnnnnnnnnnnnnnnnnnnnnnnnnnnnnnnnnnnnnnnnnnnnnnnnnnnnnnnnnnnnnnnnnnnnnnnnnnnnnnnnnnnnnnnnnnnnnnnnnnnnnnnnnnnnnnnnnnnnnnnnnnnnnnnnnnnnnnnnnnnnnnnnnnnnnnnnnnnnnnnnnnnnnnnnnnnnnnnnnnnnnnnnnnnnnnnnnnnnnnnnnnnnnnnnnnnnnnnnnnnnnnnnnnnnnnnnnnnnnnnnnnnnnnnnnnnnnnnnnnnnnnnnnnnnnnnnnnnnnnnnnnnnnnnnnnnnnnnnnnnnnnnnnnnnnnnnnnnnnnnnnnnnnnnnnnnnnnnnnnnnnnnnnnnnnnnnnnnnnnnnnnnnnnnnnnnnnnnnnnnnnnnnnnnnnnnnnnnnnnnnnnnnnnnnnnnnnnnnnnnnnnnnnnnnnnnnnnnnnnnnnnnnnnnnnnnnnnnnnnnnnnnnnnnnnnnnnnnnnnnnnnnnnnnnnnnnnnnnnnnnnnnnnnnnnnnnnnnnnnnnnnnnnnnnnnnnnnnnnnnnnnnnnnnnnnnnnnnnnnnnnnnnnnnnnnnnnnnnnnnnnnnnnnnnnnnnnnnnnnnnnnnnnnnnnnnnnnnnnnnnnnnnnnnnnnnnnnnnnnnnnnnnnnnnnnnnnnnnnnnnnnnnnnnnnnnnnnnnnnnnnnnnnnnnnnnnnnnnnnnnnnnnnnnnnnnnnnnnnnnnnnnnnnnnnnnnnnnnnnnnnnnnnnnnnnnnnnnnnnnnnnnnnnnnnnnnnnnnnnnnnnnnnnnnnnnnnnnnnnnnnnnnnnnnnnnnnnnnnnnnnnnnnnnnnnnnnnnnnnnnnnnnnnnnnnnnnnnnnnnnnnnnnnnnnnnnnnnnnnnnnnnnnnnnnnnnnnnnnnnnnnnnnnnnnnnnnnnnnnnnnnnnnnnnnnnnnnnnnnnnnnnnnnnnnnnnnnnnnnnnnnnnnnnnnnnnnnnnnnnnnnnnnnnnnnnnnnnnnnnnnnnnnnnnnnnnnnnnnnnnnnnnnnnnnnnnnnnnnnnnnnnnnnnnnnnnnnnnnnnnnnnnnnnnnnnnnnnnnnnnnnnnnnnnnnnnnnnnnnnnnnnnnnnnnnnnnnnnnnnnnnnnnnnnnnnnnnnnnnnnnnnnnnnnnnnnnnnnnnnnnnnnnnnnnnnnnnnnnnnnnnnnnnnnnnnnnnnnnnnnnnnnnnnnnnnnnnnnnnnnnnnnnnnnnnnnnnnnnnnnnnnnnnnnnnnnnnnnnnnnnnnnnnnnnnnnnnnnnnnnnnnnnnnnnnnnnnnnnnnnnnnnnnnnnnnnnnnnnnnnnnnnnnnnnnnnnnnnnnnnnnnnnnnnnnnnnnnnnnnnnnnnnnnnnnnnnnnnnnnnnnnnnnnnnnnnnnnnnnnnnnnnnnnnnnnnnnnnnnnnnnnnnnnnnnnnnnnnnnnnnnnnnnnnnnnnnnnnnnnnnnnnnnnnnnnnnnnnnnnnnnnnnnnnnnnnnnnnnnnnnnnnnnnnnnnnnnnnnnnnnnnnnnnnnnnnnnnnnnnnnnnnnnnnnnnnnnnnnnnnnnnnnnnnnnnnnnnnnnnnnnnnnnnnnnnnnnnnnnnnnnnnnnnnnnnnnnnnnnnnnnnnnnnnnnnnnnnnnnnnnnnnnnnnnnnnnnnnnnnnnnnnnnnnnnnnnnnnnnnnnnnnnnnnnnnnnnnnnnnnnnnnnnnnnnnnnnnnnnnnnnnnnnnnnnnnnnnnnnnnnnnnnnnnnnnnnnnnnnnnnnnnnnnnnnnnnnnnnnnnnnnnnnnnnnnnnnnnnnnnnnnnnnnnnnnnnnnnnnnnnnnnnnnnnnnnnnnnnnnnnnnnnnnnnnnnnnnnnnnnnnnnnnnnnnnnnnnnnnnnnnnnnnnnnnnnnnnnnnnnnnnnnnnnnnnnnnnnnnnnnnnnnnnnnnnnnnnnnnnnnnnnnnnnnnnnnnnnnnnnnnnnnnnnnnnnnnnnnnnnnnnnnnnnnnnnnnnnnnnnnnnnnnnnnnnnnnnnnnnnnnnnnnnnnnnnnnnnnnnnnnnnnnnnnnnnnnaagtaattgagaaggttaagccaaatatagttttggagtaagatcagatactgcaggggcagagagttgagattaggccacagtgaagaagagaagaaaatatcaaatgtaagcagagattaacaccccacaactgaataccagcagtaatacaggatttgggccagcagcagggttaatgcaaaagaggcagctgttaaatcgaaaataagagcttttgttttgttttttgttttagagacaaggtcttgctctgttgctcaggctggagtgcggtggtgtgatcatagttcactgcagcctcgaacacctgggttcaagtgatcctcctgcctcagcctccccagtagctaggactacaggtgggcaccaccacgccccactatttttttttttttaatttttttttgtagaagtgagggcttgcagtgttacccaggctggtcttgaactcctggcctcaagtggtcctcccacctcatgctcccaaagtgctgggactgcaggcatgtaccaccatgcctagctaatttgtttgtttgtagagctaatttttctttcttttgtagagacagggtctcactatgtttcccaggctggtctcaaactcctggcctcaagcaattctcccacctccgcctcccaaagtgctgggactctagacaggagccactgcacccagctagaaaatttaataggaagtctaaaagacatttcaggaactctctgcttttgggaacgccttctaaagacccttctccccaccttgtggactggccttcaggagcccagtttggcagtaattgtgcagtggctcaggcatgtaatcccaacactttgggaggccaaggtgggtagataacttgaggtcaggagttcaagaccagtctggccaaaatggcgagaccttgtctctacaaaaaaataaaaatgtagccagcatgttggcatgcactgtagtcccagctactcaggaggctgagcctgggaagtggaggttgcattgagccaagattgtgccactgcactccagcctgggcaacagagtgagaccctgtctcaaaaaaaagagatcctgtgtcctcattgcatcttgccaagaagcacctgatgtcagtttgtcccattatttttcaggtatttcaatatattattctctagaatagagtattccattgtctgagataaatctagcttccctatatcatagtggctatttttcttccagcccagaagtttttccttggtaagataactttattttgtgagtttatagatttggattataaaaatagatcggaactgttagactaatttggcccagagattttatgagtccacttgggagaaataggagtaattctcaaaaccaaaatgagaaaatccatgtttaacaaagaaaaattagtttttagctgaaggaagtcccctataaaaacattgtgtcacaggattcctttcacagtaagctaccaattttatatgtgactcaattgacgtaaaactctgttttaaatgaatagtatgtgaggtgatggatatgttaataacttgatttcatcattttgctatgtatacatatatcaaaacgtcatgttgtacagtgtaaatatatacaatttttctttgtcagtaacaccttaatgctggaggggatgggagaagaaaatctgttttctatatttcacaagcacatctattgcacaatgtatacacattgcctcattatgtgagatttattggcccagcctaggatttggcttttgacaaccaaaaaggttgccctttgtgataccagtctcaaaaatgttaagaacgtaccccaagcatctctttaaaaaggattttggatttattgaccatgaatttatctacaatctgtttctgctttcatttgtatcatttagggactgatgatttgtatgttttccacttgtatttacatagcattccttttttcctctttaactcaggggttacacactctgaatgtctaaaatgatgagtcagtgaaatggtttgtgtgtaaggattcatagtaagagagtgggtgtcccatctacagggagcagccatgctcaacttgagcctgagatgagtgcggctcattgtggccaagatattttgatttatgggtgggtgcggtggctcacatgcctgtaatcccagcactttgggaggctgaggtgggctgatcacctgaggtcaggagtttgagaccagcctggccaacatggtgcaaccccgtctctactaaaaatacaaaaattagctgggcgtggtggcgcacatctgtaatcccagctacttgggaggctgaggcaggagaatcacttgaacctgggaggcggaggttgcagtgagctgagatcacgccattgcactccagcctgggcaacagagcaagactccatctcaaaaaacaaacaaacaaaaaaaattctgacttttccctagaatcctcaagtctgaattttcaaacattatgaattcaatcaaaaattttaaaagacactgtgcagaacaaataggtgcctcgtggcttgccagtttctttctttaatatacctcttttacatttcaaagtgtcctttctagttttctgggatttagtatatgagttcaccgtcttctgattctcctcccccaattgcatgacaacttttattattctttcagctttcctcttaacacactacagattatttgtcattattttatggttattataaagaaatagttccatatactactttatttaccttgacccaaggcccactaatgtataataagtaaaactgtaaaatcggtcctttcatctcctgttgttatcagttgttcttgagggtgagtgtcaatttcatggttggaggccaactcttcttcccttctctctgcagccgtcatttcaccaagctgataatgttcggggaacccgccatcacgggctggtggagaggccatccaggaaccgcttccaccccctccaccgaaggtctggggacaagccagggcgacaaatatccttttttactcttcaaagggagtgtgcattctgaaatgtttgaaaagttttcaggatttatcttccctgcaattctcctttggcctcagaatcttcatttatctgatgaaaggaggcaatacaaataaatgagttggaaactagaaacatctctgcagtcaacatttggaaacatcattgtaggtgtttatgaaagcatcaataaagttcagtttaatgaaataacaacaaaaacaacctgtaattcggtcccattgcagggtgttctgagcattttctccagaaattggccacgttagagttaaacctgactttgaatcaggttagagagccttagtctctttagcaaaaatggacatagagatatgtgatttatttgtacttcttttgatctgctgacctgcttttggaacttacagacaaaatttcatattattttctatttgtgatgtttcaaactcagtaagtgataactaaaataaacctagaatataggaaaatctcatgcagtgatgtacagtcacaccaaactctgctgttaagtagaaataaaggaaaggaaatggtgaattcacctgacagtttcatttaatcagtcctgtttacagggcggcagtggtgggtgcagctgtgtgaccagcattgtgccgaaggctttggggaacagaactgagctggattttttgggagaggacacagaagtgtgccaggagggcccgtgctctcacttcattcttctcagtactcgggcgcaggggtggaggaaggagaagaaaggcggggtgggtctcgctgcggagagctgaattcctggcagtgatggtagagttggcttcacaagcctagaaaccaggaagtgggggcagggcactcatgtttactgagcacctacccatgccaggcgctgtgctgggtaatttatgtgtcacttagtcctcaaaaactcactgagtcgttaatttttttaaccctcattttctgatgaggaaactgagtgtgtggtgaagtaacccaggattcagaccaggccccgctgatggcccagcctgtgctctcccctccctatgccacctgcgaccattcgcagtgatgaggaccttgtacaagggagccaggagttgtgggggcactctagggaaaccccaacttttcttgccttcaagcttcttgcagtttttagtctatttggaggcaaggataatgaccccagggaatgtttttctctcccctttctcccgcccccaggaacacaccacatttggtccacagaaggactgacttctgattttgtatattacgtggctgttatcaaggaaagtaaagatgataaatgatcttgagaatctattctggaatgtgtgataactttgacattgaatgaaaaaggcaaaaggaaatggaggcaattcatcagcaaatttgtacatgtcaggatggagtggtacatcaaaccgttgtccaaattgccaagaatattcaggcaaaagacttggagtgtttctttgattgatttaacaatgtattttttttggctgggcatggtggctcacgcctgtaatcccagcactttgggaggccgaggtgggcagatcacgaggtcaggagattgagaccatcctggctaacgtggtgaaaccccgtctctactaaaattacaaaaaattagccaggcttggtggtgggcacctatagtcccaggctgaggcaggagaatggtgtgaacccgggaggtggagcttgcggtgaaccgagatcgcgccactgcactccagcctgggcaacagagcgagactccgtctcaaaaaaaaaaaaaaaaaaccaatgtatattttttcagttctcagttccctctttttcctgtcagtgctctcatttctatatattagattaaacattatgctatatatacgtgtgtgtatgtatatgtggctatctcagatacttttgaagtacggtctaaatgtataagcatgcatatagttttactaaccaaaatagagaagggaattgaagaaaaaagaggagaatgtttattcacttataaaaattatttgttaagtatgtgctagtggtcagacaccgttttagacattttaattcactgtaacagtaaacagcatggtccctgacctcaagttgcccagggttcagtgggagaggctactcagcaaacaagcagccacggcaggtatggcgtctgcagggaggcagctcaggggctgtgggagcacgtcggaggtgcagcttgaaccagtctggggaaacgaagaaggcatcctgggggaacatctgaggcttgaaggataagaagtaagaggataaagtgttcattcagcagatctttacagagccccgtctctgtgccaggcactgttctaagcactggggacccagtgatgaataagggaggcatacttcctgctttcttgagttcacagtcctgtgggagatgacagcaaacaggcaataagaaaggaaaatggttttagatggtaatgagtgagatttaagagagtaaagcagttgggaggtatgttccaggcagagggaagagaatgtggtgcaaagtcctacccagaaggggagatgacttcttgtgttcaggggaccctatctcttatgatagggtataatctggcactgtatggatcaacttgagagcataagcaaagctagtcaactcctaaaggaaggagaaacaaaaaccaagttaatatgcagagaaattaaagttattagacagtatgagtcagattcactgatcatgagccatgtctctgtggtctcctaagctcctaaattggggtcctgggactggacatcggttgatgcaaagaaagttctttagcccagtctcttttgaggaatcaagggtccgtgaaatgggatgattttattttggtgttaatctattccacttggaggaggagggctgtgattccgtctttgctttcacgacctgcattctgttggttgtgaaataatctgcttaaaattgtggccttgaacatttgtctatgactttttaaatgaagtttcttcatttgaaagtataaaatactagtttgaatctttgttagaacaaaaggaaaaaatcagaattattatagctgtttcttggcttgggtgttatttaagacacactggcttagacaagggttttaagggttcactcctatgatagggtgatctcaaataaaacgaacattgtttaacaaatactctggcctcctctcagagtgggcagccacagcacgcagagctctgccacaggagattccttctggagtgggctttgcccttggcatgggtggccacacaagaccaaggcacagctgcagctgggccctggcctagccccacacaggcggaggagaggcactgccagggcttgctcctggctgggggcctgggctcgggcacttggaagagaagctcttctgcccttctgcagatgtgcagtctgtagcagcccttcttactctcactcatcaaggttggcagacgtgccgtgtcccaaacaccattgctaaacttctgaactattaacataaatttatagcaaataaaatattttctcagccttgtggatgacacgctcagaaggaaacacgaaatgccttccttgaaaggaagtcaagagttcaccagcgtgaagggtcgtgaagagatgcctaagacctactagagttaggaatgattctcctctctgggctgggccttgctttgattcttttcatcataatgagatgaaaatgttaggacattggtttataggacactgtttctttgagatgcatggcctattacatttgagaaacaccatactctgtatcacctcttggagcctgaccgtatatatcagggctctgaaaagtcctgcagttaataaacttcttatctttaacccagaatttcaaaacttaagtgatcacaaaatccaactgttacctaacacccgtcttatcttgaaggacaaggaaacattggtctttagaattttaagggggaaatattctgacttcacaataccacatgcaacctgtttgcctctcatttgctgagggaaacaggatgttcttataaatgcaaggactcaaaaagatgccactcatatcctcccttacagtttcactttaagatgtcttctagtgggacatagttagaggtaaagggacaaaaggaagtagaatgacaataaacacatggctgagcaatcaggaaggagccaaattgtggccagttttctatattaaatctgaccctgaaacttgtcttggtaggtgggttctgttaaccagactccgagtccacttaccccaccagctacatggaaggtctcaggcctgccccacaaactgtgtccctggcagaacacagagttccagagcaggagagaaatgactggcttccaggctgccccgacaaggcagttcctgagccctgcccaggtacactgaccgcacagggacgggaagccaagagaagggaaccctgggcctgctcacccagccgcaggtcaagcagcacaaagaaagggccagggcgggtcttgttttcagcttctgtggctcagtaaccccacccactggtaaactggccaactgatgtcctctcttatcagaagaagaagagctgctccccttcctttggtgaagagtaagaactgttccctctaacactccacaggttgagaggaacagcagtccctgtgttgatggattgaggcagtaactcgaggaggaagattttcctgcacagaactgcagaggcttggggagagagagaacacactgggatgactctgagatcctaacctgagtgtcttggtggacggtggcctcactaaatgagatggactataagaagaggaacagattaaggggacagtgattggttggatttttggtagaatttgagctgtcttgggtacttttggcagagaacttgagtaggcagttggaagtatgcacttggagttcacaaaagaactgttgggagctggaggtgtcgatttatgagttactggactgtgggtgacagtggggccgagggaaggatgcgattggccaaggcgagcatggaggacaggggctctctaccaggaagacgggcactggccctgaggctcttaggaagcgcctcctaaagctcctgtgcccggaggctcccgccaccccctccacctgctcacactctgcctggtgcccagggatcctgagagcatcctttgcctctcagagcaatgcaggcaggtgtggcctgaggctgcgaggccacaggaccccagggaacatcaggacggaaggcaaaggggcggaaaggagtgcacagagggataagaaaagatccatgtgagtgtggggatttttttttttaactttaatttttgtttccatccattgcagccacctcttctttgtttatctttttcatcatccctcctccctgccttccttttttaatgtggaaatcttccttgagccaaaggcttcactaagcttaactaaggaagcaatggaggaggcgctgatgtggttgttaaaagccctgtgacctgtgctgcccttccgctggcacgctggcacctggcagggatgccagaaatgtttcttgagtaaatggtaaattcaagtttataaataagagtgtttcctttgtctcgaggttgttacttagggcatgtcagtgttgtggagtagtttaaagccacctgaatgaagttttctgaagttttccaaagaacaaataaacttcttctagattttccttgcattaagtataagtgtataacatgagtggttctcttgggttttcaaatatccactaaattagatgagagtgaaaattaagagagctcagaggtcacatctttcaacttttgatgcctcagcctaattatattaaaaatttccaggaatttactatattttcatgttgttaatatcaggaaggttaaaatgctaacttacacctcaacattgaaatcaccagcgtttgatgattacgtgactattacaccactgcattctaatttgtattatcagtactatgagatcagagatactgagtttaaagacggcagtgtactgagaaaaatggtaaacttctacttcctgaaattaagcgtttctgaacagagattcatcaaatctgcagaaaagagaaaggcagataaccgtaggttctgaggctcggtgtttcctccctaatggctttgccaacagaaatactgacaggttttgtctgtcacgggccttcctatttatcaccttttcctctcctacctcctactgtggtcttgcctcatctgtacttcatgtaccttaagcctaatagtgaatgttgaagaaatgtctctctttggaaattatctgttttattttattgatttaaggtcaaattaagaaataagataatgagacttgtcaaagaaaacgaatacgtagaagatgaaacttgcaatcctaatgcctctcctggcaaagaagacatttcccaccaaatcactaagaactcatgagagcctccgttttcctaattccagattctgtatttatttgagctgcccagcccaggcctgcaggatagggccccactccatcaaggctcctgtttcctcctgagcccgagcagatggtaccttctcttatagcctccatccttcttcccagaacactccaggtactattttctattttctgggggcatttggcatagttcactgtttgctgagaggcagcatagcttagcggagagctctcaggctttggtgtcagtgatttgtgggtctgacccctgatccaccaggcgtgatatctgatcttggatttctcagctcttctagaactgagcctcagtttcttcggctataaaatggggaaaatatctgcctctcaggattgaggttaaataaagtctgaactcagcacaggcctggcacacagtaggtgcttagatatctgttttcaaatttctgtcttaatgtgtagtttgtatcttctttattatttccaccttaagaaataaaagtttgggatgaaaagtattattggtaactgccgaatgtatatttaatccaatcagtgatccaggagacaaaaggaatgggcttggtttgggtgagtgataaggaggcaaccttccacataggaggtgagaaaggggaaatggccttagcaaaggcagaggggcaggaaaatacaggctgtgtttgtggaactcagaaagctggagggaagacaagagcagaagagaccattgtccccaaattgtggatcaccgcaattactaagccagtaagttttgattttgccttttaggctgaacaaaatcattgaagatttcttagcagaataatatgattaacagtgtcttcagaaggctattgtgtgggaacaattaactaaacgaatgaaaacagcgcccctctgctcggtgtgtagtgcagcatcccatttgtgtctccgtgcgtccagaatatgctccaaggcatgctagacccagtgaacaacacaagactgataagacagtgcccccaacaacactggaaagtttacctttcttcacacatctaatgcgcctcttttttggttataaataccaggaacccccgggcgcagtggctcacacctgtaatcccagcaatttgggaggccgaggtgggtggatcacctgaggtcaggagttcaagaccagcctggccaacgtggagaaaccctgtctctaattaaaaaaaatacaaaattagccgggtgtggtggcgcatgcctgtaatcccagctactcgggaggctgaggcaggagaattgcttgaacctgggaggtggaggttgcagtgagccgagattgcgccattgcactccagcctgggccaaaaaaaagagtgaaactccgtctcaaaaaataaataaataccaggaacccaccttaacttaaaaaaagaaaatgtattggcatatgtcactggaagcccaagggctagatccaaggggtcatacaatgtcattgagacctacctctgtggtaccacttctgagatgacttcaggcataacagacaggctttctccaaggtgaagacccccaggttcagacggcccttgggcttaccagccctattggggcactccttttttttccactcaaaagcactctccttggttctgtttgcgtcgtgagccgatccctgagccaaacactgtttccagggggtgaggtacctagactagaatcctgggcctgggtccctcacatgtggcacagagggaatggcaatgttaccaggtttggagcaagagtggagacagttcctgaaaacaaaagttgccggacaggcaaaaaataataaacaccccacaaaaaatcatgcaaagaaaacaccggttagaagacagcagaatagacttgtcctcaaggagggagataagagaaagcatgaaggaagagctgtcaggtacagggataaggaaccaaaaactcagttgtttaactctctgtgagtccaccttgttaattctgcttcatctttccattaatttttatttttcctttattaaaaattctactttgatggtagtgcttttggagccaattattcctcacagcctctggatgagagttggccaaggtaagcaagacatactttaaaagatatgatgggcatgtgttatttttagataatttcactttatccactttgaatgttgtttagaaatttctaatataaagcatagaatcctgttttctcttataacatttaatttcagtgggaggatcacttgagaccaggagttttgaggctgttgtgtgcgatgatggggcctgtgaatagctactgcactccagcccgggcagcatagcaagacgccatctcttaaaaacaaacaaacaaacaaaacaacaacaacaacaacaacaacaaaacaccttattggccgggcatggtggctcatgcctgtaatcccagtactttgggaggctgaggcgggcagatcacaaggtcaggagattgagaccatcctggccaacatcatgaaaccccgtctctactaaaaatacaaaaattagctgggcatgacagcacatgcctgtaatcccagctacttgggaggctgaagcaggagagttgcttgaaccagagagtcggaggttgcagtgagctgagatcacgccacagcactccagcctggtaacagagtgagactccatctcaaaaaacaaaaacaaacacctaagcatttccaatgataggctaatatgaaagtctaaaatgaaaagttatttaaagaaatctagatcttcatatttaaaaccaaatagaaacacttttggaatatatttaccagcagaatactcagatatggcattcttatgtttgagacttagaaaaataagcatcttggccaggcacggtggctcatgcctgtaatcccagcactttgggaggccaaggcgggcagatcacaaggtcaggagatcgagaccatcctcgctaacacggtgaaaccccgtctccactaaaaatacaaaaaagtagccgggcgtggtggcaggcgcctgtagtcccagctactcgggaggctgaggcaggagaatggcgtgaacccaggaggcggagcttgcagtgagccgagatcacgccactgcactccagcctgggtgacagagcgagactccatctcaaaaaaaaaagaaagaaaaataagcatcttttctcagagtgtcttagtaagctgctgaaaaggacaaaagactcttaaaatggtaatttgcacagtgtatttgatttaaggtctctttgagtatttttgtacccaatacagagggtaacaggaaatagaattaactgagaaaaagcccctgctgcatctgttgtgtgcctagtatcattttcagatcaccaagtcagatttaggacgcatttaaaatgtgtgtatcaaaaatatttagctctccggattgaagtctactctccatccattctctgggcaaatactgactgagaacttactgtgtataatgtagtctggatctgggaaaggaaataaagatgggtaacagtgggtccccacctcaggtaggttttcagctgccctcaagaatcttgggatccagggttgtagaataaatacaatattttattacatcagtaaaagtcatctccaaactgttatttttcttttatgtatccaagaaatgtcttctgcttttcagagcaccaagactggttagacttaatattttcataccctgggcaactgtaacaattctattcctcttcatggccattggtaggggaatgcaaaatttttgcatccaagattgccacggcgccccctacatgcacactgaactcctcatctgcccagctagctaatcctgtgccttatgggtttgtagtagtttttatactggaaatcagagatcacaggactggaaggatcatggagtcttacctcattttaacaatgatgagcaaaatgagcgaggtgtggggtatttttaagtaactcttgcagagcgaggtgagtagaagagccagttctcaaatgcaagtgctgaggccctcctttgctgtctgtggattgacttcttttccttttatgttgttctggtttttaaaggcagcagcctccttggaaagacgaaaagcatcctgggttcaggctgacatctgcacttaacaggtacatgggttgtttcctggtaggagtagattttaaagcaatttaactgtcctgatattttttacatagcatccagttgccagagtgtgtttatgtaagctgtgttgatatgacatgttcaaaacaaaacccaccattttttgagtgtctacaggggaaagtatagagcacacgaggtctgggatgagactcccagggtttgcatcttgctgtatgaccttgagtagatttttaaacttctgattgcctcagtttactcatttgaaaaatggagataatgctacctagatcatgggttggttgtgagggttgaataagataatacctgggaagcatatgtgctgaataaacatcagctattatcatgatcactttgggccagactccaggagtaagagttctacctcagccattttttttcaatcctgacaacaccctacaagaatgagtattattttccattctaaaaggttaagtgacttgtttaagggccttagctaataggtgaaggactaggatttgaaaaaatgcagctgagcatggtggctcacgcctatagtcccaacactttgggaggctgaggccagaggatcgcgtgagtccagcagtttgaggccagcctgggcaagatggtgagaccctgtctctatgaaaaaaaaaaaggcgtggtggcacgtgcctgtggttcgagctactcaggaggctgaggtggggaggatcacctaagcccaaggaggttgaggctgcagtgagccatgtttgcgccattgcattccagcctgggcaagagagagacgctgtctcaaaataaaaaagaaacccgatgaatggtgcaaaattttaaatatactcaaacagaagagttataaaaggcctgtggtgcccatcctcagcttcactcattatcagcattctgccagtctctccaaacctacctcccacctcagtcctgtgactggctagtatagtattgtaccttgaaatgtctccagcagtttaaggccgacgagaaccttttttaaaaaacataaccacaatgccgctattacacttaacaaaattaaaaataactccttaatataattcaatgcctggtcggtatttagattttcccagttggctctgcattcgtttgatattctcttgagtctctttgaatctgtaaagaggctggaatctgaacccaggtctctctgatctcagcggccacgctctttctgttgcactgtgggttctgcccttgtctgcctcttccctcctctgaagccacgtggcttcatagccacctgaggctgtcactggaatgaaccacaaagaagcactgtaggctaatgaagttgcttaccgtaaagtcctttctatggccgacagtttgaccttatgatgagataaatagataatcatctcttgcaaccaaagctgtgtagacattgaagctatctgggagaatttcagaaatttgctatacattagtggctcccacattttcttttaggactactttacagccttaaaaaacatggaggcctggcgcagtggctcatgcctgtcatcccagcattttgggaggccaaggcgggcgaatcacctgaggtcaggagttcaagaccagcctggccaacatggtgaaacaccgtctctactaaaaatacagaaattagccaggcatggtagcgggttcctgtaatcccagctacttgagaggctgaggcgagagagtcgcttgaacccgggaggcagaggttgcagtgaacaccactgtactgcagcctgggcgacaagagtgaaattccatctcaaaaagtaacactagtaaaataaaataaaataggccaggcacagtggctcatgcctgtaatcccagcactttgggaggctgaggcaggtggatcacccgaggtcgggagttcgagaccagcctggccaacatggtgaaaccccgtctctactaaaaatacaaaagttagctgggcatggtgacgcacgtctataatcccagctacacgggaggctgagggagaagaatttcttgaacacgggaggcagatgttgcagtgagccgagatcacaccactgcactccagcctgggcaacagagcgagactctgtctcagaaaaaaataataaaataaaataaaaaaaatattgaggccctcaaagagtatttgtttatgtgagaatatctattgatattagaaattaaactgagagattttttaaagatactagtgaattaaaaaaataataagcccattacatgttaacataaattatatctttttgaaaagaaacacaaaaaaagtattgaaaatagtgacaatgttcaccttttacaaatccctccaaggcagctgggtggtctgtgcctgcgctcagcggtgggggcatcacacctcatgtggccgctgcggaagcccgccgtgcttgggggagagcgagagtgaaaaaacagaggacactttactatcattttgagaatagtcttgatcttaccttctccctggaagggttttgcaaaccactgctctaagtgatcctttacttagaaacagctactctcaggtggagaaaacctagtgcagccacagccagcttccgagctgggaagaataggaagctcttagacggaagccatgaatccgaggcccaccttgttgaacttgatcgccatgccatcagcttcagcatataaggctatatgagtctaagttaaaatattctggagtgtgggcgatcctcagaggctgttaattgatataaagaacttcaggtaggtcctaaccccttatttgatggttgattataaatcagttattcttgccttctttcctgttggtaatattcaacaaagactattgcattttcactaaggaaaacggattttcagccagcctctctcctcccctccttaggaccaattctgattctgctcttcacacgagtgctctgagtaccaagccccaggacccctatggaggagggggccagtcggcctggcctgccccatacatgggtaagacacacaggccactgctgacagcagctgtgcttgctcattctgtcctaggaaccaagggagagagaagctgaagtggtgtttgcgcttcccggttcagtgatcttagagaggcagctcgtggcagggaagcgtgtgtgtccatgatgcagtcaggatggatggagctcccagcgtcccctgcctctgccctgcttcctccacagcacgctctccctcttggtgtctcttggccctcttctgggcacccgtcatcttctaataacttcctgactggtctcctgatttccagtctcacatcccttcaatccagttttatgttaagttccccaagagtcctctttccccacccaggatctgaacaaactgagaaatacaactagaagtgacagtcagagctagatatcacctttattactactaagaccaggttggaggaagtgactgtctctgtaggttggtgggcctgctgagactgaaccccagcatgaggctgactccccctgagtggctggcagcactggccagtgtggtcccctgggaggaggggtcaggcaagcctgggggagggagggtggagcagaggcctgctgccttgagatgggggaagaggaggtcgggctggaactgtgcatcacctgctcagttgccccctggccactgtgagtaaggggatggagagaggccaggagtaacccggagtggggaagaggcccactcatgccatctcacagctctgcttccagagcgaacccaaacctgatcatcttgctctcccacttaaaatcctcagtgccacccctcaccttcaggagaaagagcccagatcttctttggaatgacatgagccccaaggcctggctcctgtctgcctctctcccttttctctctgctcccccgcctcacacccaaggtagccatgcgaaccactttgggttctactggtgtttcttcctgttcctgtctcttcctctctctctcactcctggccagcaccctctccatccgtaagcctcagcttgtgtgtgtcctcatgtctgtggagccatccttgaccttccttcctctcagctcagagttatcgtgtccttctaacatcccagactgctctcttagcacctgcaatgcttggctgcttttttatgtgaacatgcatctctttctctgctcagtgtagatttcttgaaggcagcatcttaatggtcttgttctctccagcccctagcacagtgcccggcacagaggagcccgtactgatggagaagtgtgaagaatcacacactggctcacatgtgcacggcatttgccaaaacaccctctcggtgctggcacctgacctgtacatgaagtgaggctggtcattcagacacatttcaagcctacctttctggggtttataatctagaaagaacaatggtcttgaattatccattccatatgcagattgactcttgcccagaaactttcagggctgtgtatttgttcttgaaacaggaataaataaatctttagccaagaaaccagcttttctggttttctttgctttttggacaatttaaagcctaaatggcctctgttccttccaggagaacacttatgatcgtatttctttgtatatagcagggatagtattgaataataattgttgctatatttgttctattggtgcaattcagagaagactacatttgcttaaatgattgtttgcttgtaaactatgggagctttcagaattggttagggacatctacccatgcttccatacatgggaatatgaaagttggcagtgatgttgaaattgatgttggaattggatatgggtgcactgctcactgcttagaggagtggggtgtgtgggaagagggatgagtttagtttcaggataggtagagatgggaatatgtaaacaaagcctaaaaaaagcagaggctgtaatcagtgggggtgcctgtgagcacagcaggatcctaatctccatggaccgggagccagctagacagacagatttttaccctggagctcctgcatttctgcctctgccgatccttcatttacattaccctctgcaaagtttacacttctctagaaagggccaaaggcctagagaaacaaggcaatcacaggtaattcaagtgaggattttttgaggcttgcatgctaagaaaaagaaagtaactgaagaaagaaattacctgagctgaagtattcattcttagcgatgtagcctctgagagaagaggtgagaaatgtcagaaggggtaagtgaggatggaataagaaaagcaaaggaatgtaaacattggtccaggtagacagagcaatgagaaaaacaggaagaaagaaagaaatcctggatcagggttcctgcgttgacttgagaatcgtggtggtctctccttttcaaatcagcagttagaaattgttgggctacaatatctgacaaccatggagggtgggctggcctccaactcagatgtctgaactgtgtgcctgctcctgcagttgccttgcaagtatagcagaactcagaaacacatcctaatatggatgtgtttacatgggaaagccagtgtttaaaatattattcaagtctccaaggatggaaattatttctggagaattatatttgttggtgggagctattttaaatagtttcatgtattttcctcctgtgtttcattaaagtttttcattttctttccttttggattttaaaactatcaactggctttgcaaaaaggtatttcttataggaccaaccaaagaaagatttaaacagtgatgggaaaatataattgaagcccagaactgggttctatgttcgaagcaataataactcttctttccctgggaatctctcctaggcagaatgatgcagccacacttttttgttattgttgttgctgttgctgtgagcccatgaggagagcatctgctcacggcttaactacatgagcaataaactatgatacattcatgagtggagatttgtgtcacaagaagacaaagcctgatacatgttgagtaattttcataatagctattgagttccatgacaattaggcataaatgataagcagttggtataaatgacagaaataaatttttatggaaccaaacaggatttttataatttctctctttttgtttaattattcagaatctataaagagggaatgttggccatttccctggcagcatgtgcaccttaatgaccatttcacacatacatgcagatagggaagcacaggactctgtgggacacgtgccctgtcccatagcctaggactgtctcctaacacccctcctgtcatcgggcatgtggaggagggactggggtggtctcttcctttcagggaacagtctagagctaaggggagcagagtgcgtaataggtgtcttctctgcatccagggctgtagatgctgaatattgccatctttggggaccacagtactcagctccttagggtggagggggcttggcatgccttggacctggtgacctttcacctgccaataagctttgacctgcagagttaaggagaaggtttacaatgcaaagaaccttgaaagatgtaagcctgttaattgcatggattgggcgggggtacagtggcaggtacaagcatcccagatctgaagaggggcaaaaagagtgtcacccagggacaggagggcccagagtggggaggctgaaacaccagaggcctcctttaggacaatggttaaggggtcttccccttgccttcccttctacttagcaaatcaaggctgtgtagggagttattttagatttgccaggcatgggagcacacagaaggaacatggtctcggttcccttagttagaagagaccggccctcggtggctctgaggtttcctggaacacagttgcagccttggtcatcgctgtcccatccctgtgggactgataaaattagtgtcctgtttccagagagccagtcacaactcattcctttttctttttaaccctttatttgtagtgctatcttgtgggtttttaatttagcagtaaaaatccaggcttggatattttgatgatatgttagcttggtgccagtatatcagtcattgccaccaccatccttctggtcaccgcagcccagaccctgagagttgcatctgattactcccattcccatgcccctacgcccattcagtagccgagtcctgttcattttatcccagcagtatgtctcaaatctgcctctggttttctgtcctcactgccagtatcctacttggttcctgtttgccttggactattgcattggttttctagtcggcctccctgccttaaggctttctcctttcaatccacctcctactctgctgcaagagcagtctctgaagcttaactctgatcatgtcacttctccaactgaaaccttccatcccctacatcctgccaaatgaccagcagcctgcttcggtccagcccatctcccagtcctcccaccatgtgctgcagccacactcttccatcttccttctccttcttatccttccccaaccaccccccactcctcctcctcctcctcctcctcctcctcctccgcctccacctcctcctcctcctccgcctcctcctccgcctctgcctcctcctcacactgggcatccccttcagcttcgcttccggttgtctaaatcttccaggtactacagcaaattggttagggacatgaacattctgaagacacacgggccagagttctagtcccagaacttactagcagtgtgatcttggggatgataatagcatctacgtcgcagagttgctgtggggatcccatgagatcacctgtgtaaagcgcctggcacatagtaagtgagcagtcaggttggctgttggttatcctcttcttcaccattatccttcaatgaatggcgcctcaggtgccacctactccatgaagccttccttctgttccagtctgaggagagcatgcactaatggggctgtcacatggggtatctgccagccactcaggcagtttcacatggtagccctcagttgagtcctcatgtttcagggacaggtcaggcttaataattaaacctcgagtgactggtgtcttgatgatgaagagatgcttcaacacgccataccagattgctatataaaacctagtttttagtttttaacaggatagtcactttttagtaatcagaatgaagttccctgccctttcttaatatgagggtctcaggaaagccaaaataggaatccgcaactcctgtccttttgatgttgctggttgtagagccacagcttccacagcttttctctctctgcacctcagtgttcacctgttcacactgcctgtcttttgatgggttaaatggctgataagtaagaatgggccaaggaccttctgcaatagagtctcctgagacgacaattaaaaatgtaggctgggcgtggtggctcacacctgtaatcccagcactttgggaggctgaggcagacagattacctgaggtcaggaggttaagaccagcctggccatcatggtgaaaccccgtctctaccaaaaaatagaaaaattagccgggcctggtggcacgcgcctgtaatcccaactactggggaggctgaggcgggggaatcgcttgaacccaggaggtggaggttgcagtgagccaaggtcacgccaccgcactccagcctgggcaacaaagtgagactctgtctcgggaaaaaaaaaaaaaaaaaaaaaaaatgtagattccttggccgactctcacaccttctgaatcaaaatctttgagggttgggcccaagaatctgcattttagcaggctcacccaagggctctttatgtgctgtaaaataaagctttcagtcacttacttagagtctggttctgtgggcctgaaagaaattctgtctttgtgtgtctgcttcatttatcgacctcttcgtattcctgggcactcttcctgttgcccctgggctctgttaaaatgttatatcttctacctgtgttatagaatgtgctaccgtgttaccctgatctgtcttctcacctacactgtatcacccggccccacctagcacttaatgcagaaacttattaaatatgggttgagtgaatggttattagacatttcattcaaattgtatagactaatcaggttaacctataggttaaccttagccaaaaactcatctaaaatgtaagtaagctatacttaaaggcttagaactttataataatgtatcctgattctgtactgaaaacttatttggtatatttgattgctcttaagggaatgctaagatattacattcttggcacggttctttagttttagcttagagcaataggaaatactatgctttgtcatctgcagtataatttatggattaaaaatacttcattcagccagaatttattccaagtcaaagttttaaaactttgtgaatagctatctcatgtaccctttaaattaacttagactccagataaatcttcttcttaaaataacttcactgcataagaaatatatataatatcctacagcatgaaacttcggatttgttcctgtagacacccatggtaagtatcaaacagtgatgtaggctttttgagttacctgctcttaaccccatgatgaagcatttggaagagaatttccatctatacttctttactttgtggtttgaatagagattctcaggctttgtaaaaattgttctcctctcaggacagtgacagtaagaaaatttcagacagacaattttaaaggaaaagaaaaaggaaccaaatttagtttcaaattagctatacctatttttagtataaatgataaagcaccttaaatgaaaatcagtgtatcaaaagtgccttagaattttcaaaattctatttcaaatcataaagagttactgattcataaattcatgaaaatgaaagtaccacataaaagtgttttctttttttctttttcctttcccgctaggtttctgtgatggtgagaataatggacatggggaaggtatgaactgattttacctacctatattggagtgggatgctgattagtggacataacctttcaatacctttactaataaatattcatgttttcaggactcccccaaatgctgacaactgctgattggcttacttttcagagagcctctagaaaattaaggctagccatgttcagggccaggagaaaggaaatatgtggttgcattacaaaggttcctttttatctaggtccccacagtcacaaggttgagcaaggaaccaaaaattgtaatcacatgaaaatatgaatgaattggcctggcacagtggctcatgcctgtaatcccagcactttgggaggctgaggtaggtggatcacttgaagtcaggagttcgagaccagcctgaccaacatggtgaaaccccgtctctactaaaaatacaaaaattagccgggcgtggtggcacgtgcctgtggtcccagatactcaggaggctgaggcaggagaatcgcttgaacacgggaggcggaggttacagtgagttgagattgtgccactgcactccagtctggcgaccgagcgagactccgtctaaaaataaataaataaataaattaattaattaattaattgatcacttaaacaattagttattccagtagtctacccatttagaacgtcttcgttgacagataacaatgccaggaaaatgcaaattggttatgaaatgaaaatgcaaaccttacataagatactgagtttcgtaaagccaattaaaacattgttggagatctatggaaatgacactcaaagccattgacaaatgagggtcagacacagttcatttatttactcagtaccagggactgttttcttttctctaaatctttataatctggaatttaatttttataatctaaaaataaacaactaaattaggtttatatgtcacagaggtgagaccctaggggggacatgatgaatgaggagcatcttgcaagacgcacagctctctgtcatcatcctgcagctccttttctgggcaagcccttttaggccatgaataaaatcacaaaaaggtaaaacatcaataaacatctaatccactagaacagaaattaataaatggcttcaaggttgactgcattccttcagtgcttcgaagaattcccaacaaatcttggatatgaaaagggactaaaaacaatgaactctaagaaaacagtccccattaaggcactggagtctgccccaaccatgttcttataaccaacctcttgtgagaagtagccttgagctgtgtgtgatgacaccttactcagtccttcaaacttttcccagcatttgacagtacctttcagggcaatttttatttatttttatttatttttatttttattttttttttggagacggagtctcgctctgtcgccaggctggagtgcagtggtgtgacctcggctcactgcaaacctccgcctcctgggttcaagcgattctcctgcctcagcctcccgagtagctgggactacaggcacccaccaccacacccagctaatttttttttttgtatttttagtagagatggaattttgccgcattgtccaggctggtctcaatgattatcattatattaatgattaagtcaggtaacatttgaagaaaagagaatcaacaaggatgttgacaaaatacgctcttcaaaagagagtgatgtaaatatcaggattaagagagacacctgggaacactgacaaagcatggcctggtttagcagaaatgactgctgccctggtggtactggacaggttgcctgaagagcattgtatcctccccttaccgtgctgtcaaataagttagaccgctacccatacttaattcattctagaagtccacaactgcatttatatcatcagttttattaaatacaagataaacttattttagagtttttgtttcaaagtcttttctcaaaatttactaggaaagtttgggccctgtgtcatgtgacttctttctggggtccattattcttgggtacccggccatcttgtgtggggctaagacaggatagtcatgacagtcacactggagcttctgtggccactggaactcaacagcattcctggttctgagtagtcactggtgtccctaacttggaatccccttcctgacatcagatcacttaactcctgagggctggcccttgttttctggtctctttctgagaataaaaagtatttacttgttctgtgacccagcattcttgttttacctggcacgactgagagagttaaagcagaaagccctggaatggtccctttatacaggttgtttcatagcattaaagagccaacagccgtcccggcagctgcccagcctcagatcctcttggttgttggttcctctttgtcccccatttccatcccacaaccaaggagcttcactgccaccatgtcttccagctaatactcctcttctcaatactttccccatttcatcgttgttgcaggttctctcctcatccctcttcttccattctctcctttgccaagcctgcagagcccccctgccctggcctcaattgtctacattttacttcctaccatccccttgactcagcctacactccagttgaaaagagttgctccactcttaccttcccctctcttggaattcccttctcctgtgtctctaaagggctccccccagtgcccagctccaaagccctcctggcctcttcctcttctgcacttcatctctcagcagcatcataccctcggctctctcgggcttccactcgtttattccttcagtgatcgttatttatgtgttgcccttatccactgactagattacacattcgtgaaaggttgaatccatgtcttactcatttctgcaactcccacagtagtgcccaaagtggcttccctagtagacagtccataaatgagtcatttttgtgtgttaaataagtcaaacattttatttgttaaatcagtttttacaaagataatttgttcagccaaaggtaggtaggatggatgctttctctttttgttgttgtctttgtttttttgggacagggtcttgttctgttgcccagcctggagtgcagtggcaccgtcatgactcagtgcagcctcagcctctcaggctcaaggagacctcccacctcagcctcccaagtagttgggactacaggtgtgagccgccacacccagctaatttttaaattttttgtagagacgggggtctcactatgttgcccaggcttgtctcaaactcctgggctcaagcgatcctcctgcctcagccccataaagtgctaggattataggcgtgagccaccgtgcccggcctggattcctgccttctcatgcaatgactgtgctgctttttttttccctttagtagcatctttccctggcccattgaaagaagagaatctgttaaatgttccgaagccactgccaaaacaactgtgggagaccaaggaggtgggtgaacagtactcagctatgtttgttgtcactgaatgtttgtacttagaggtcattgaaaaatcctgcagaggtgaaagcaagaggaactgggggaaaaggagaagatttgtctgagaacagagataagaatatacaagggaaggacgtttcaagtaaaaattatcgcgcttgtgtcaatgaattagcacattgatctcttggcttactaattttcatatgaattgacttatttaaaaaaaaaaaaaaaaaccctgctaagtcctccatatcttatttgttttgctaaaagctctgaaacctggttgtaagtcataggcagatttttctgtttttttagccagcactttataccagtctccagcttctgtccagaattactggtataccagatagctctttttaactcaagggcatttgacctgagtcctccaagagtcagtagacaagtcatctgttttactatgatttccatgcgcctttgagaatttgtatctaaaattgtgctagctgacctccacctcggctctctaaacctcacccactgtggaagaaaggggaggtcccacggtacttgccttggcctttcttcccagagggaagctgtgttgactttgaaagaaaacagttaatctgttccagcccttaaggatgctctattgcaattgtttgtattgcctgtgtacttaactatccccacctgtttaggatccctttggcccagttccattttcttctgccaagtctaccagagtcaccattagcattagttgtcttaaaaggctttttgtaaaagcaagatgtatttgatgtttaatcatttgggaagtaaaaaagagatatgatttaaaatttacatatttaaacacaggagaagcaaccacactgtcttttggctgtgagaggcacatgtggttgtggaggcttttatcagaggataactatgtcttctccaccaaagagggcagtggtgtgccctcctccctgagtaccagggactggtctctggaaagagatgttcatctcccttggttcttgtggatttgtaatactcattcctgtccgtctggagcttatattctagttgaaatagcttagtttcttctgacattcatttcttttttcaccctgcttttttcttttatttatttcatttcctctcaagccaattggaaaagaaatgtttatttaaaagctctatgtcgtccagacccagtggctcatgcctgtaatcccagcactttgggaggccgaggcgggtggatcacctgaggtcgggagtttgagaccagcctggccaacatggtgaaaccccgtctctactaaaaatacaaaaattagccgagtgtggtggtgcatgcctgtgatcccagctactcgggaggctgaggcaggagaatcgcttgaacccaggaagcggaggttgctgtgagctgagatgtgccactgccactccagcctggatgacaagagtgaaactccgtaaaaagctctatgtgtaaaacattggtcttttaatgttaatccagaaggtaaattgataaggcatcaaattaggaaaatgtattaatattatgcctcccttaggcctggaagtttgagtttaaaaaagtcatgccaaaacctaaaaggctgctgtgtgaggactctgtcgacacgcaagctctcacttgcgcccactagagcctcaaggtccttacgaagacacttttcaaaaacttgaatttggctttacagcgagtaagcccagctttcattgtctcttctcagattcagtccctgtcaggacgccctcgatcctgtgatgttggaggtggcaagtaagtaatattctttctgttcgtgtttcagggactatcctgaaggtttttcccaaaagtctcgctgctttgttacagaactctcagaaacgtaacttgctatgcataaattgaaagtcaactgcattttcataaaaacagccactctcttttgatactcatatttcatctgtttaaactaattaaattacatgactataataacaaacaaaacttacataagtatgtttgagaatcacacaactgactcttggtaaatacacaactctccgggtagaagcagtgtcagaagcagaaacgtgcaggaatcgagaggagcctaccagccccgagctgtggcaggctgtgggcatcggtgacatcctggccaggggaaaagggaagcatcagttcacctggcagcttaatggcacagaagttaattaagagagtttctgtgaatgtacttaatgtcactgaactgtacacacagaaatggttaaaatggtaaattttatggtatatttattttacaacaatttaaaaacataaatggaagataaatatattttccatttgcaatacaaaaaagtttctatgaaaccattaatttgttagtggatttaatagtatgcaacttcactccctaaaaggtttgagacaacttacaaaaatatagtacaagcaaatgaaaaaggaagttcatgaggaagttgagtctaagagagaacgaggagatgagagagataatgaggcccttgccttaacagaaactgccttgggagggccggctggtgtgctgcgtgggacggtacagacagctgctggggaggttcacagagaggaccccttggaactcgatgggctgtgtcctgagagagccccaaggaggcttcctggggctgtttatcatagtgtccgtgagagcagtcccaccacttggaactgaagccaattcagaaacagcaaggctgcagggccaaaataatgtggtttggaaatgggattcttgcatgatctgacttagtacatacaatcaccagtgggtcagtgggtgaactaaatccacttcaagcagtcattgaatgtgatttcccccaacagagcttcctgtgagtatctcacagcagcgcagtcaaggcactctctactgagtacctggagctcagacattctttctggcaggttaaacgtaaactcaggtgatttgctgagctgcgccacgggttgatgtttgcttcagaaagtgggcaagcctgccaggacgcatgcccaacaaaagacaggccgccgagaggtgcaggacattcccatggaaggggcaagcttttcctcaagggagtctccctcaacctagtctggttcaggggcttcctggtaaaatggaaatttggaaacaaaaacaaaaacaaacattttcctcaagaatcaattttggcttaaccatcagataaccttcaggctctgaaagcctaacattatagaattgggctgcagtactttagccctcaagaggtttttgttgttgttgtttagttagtttgtttgtatttatttatttatttgagatggagtatcgctctgtcgctcaggctggagtgcagtggcatgctcttggctcacagcaacctctgcctcccaggttcaagcgattctcctacctcagcctcccaagtagctggaattacagacgtgcaccaccatacctggctaatttttttatttatagaaaagatagggtttcaccatattggccaggctggtcttgaactcctgacctcaggtgatccacccactttggcctcccaaagtgctaggattacaggcatgagccaccatgcccagcctgttttgtttttaaagatagatagggccttgctatgttggccaggttggtcttgaactcctagtctcaagtgatcctcccaaagcactgggattacaggtgtgagccaccatgcctggccaacctggagagttttaaagcaggtgtttcttaggtagagaaagttgctttcttgctcttactttacagatagaattccattcagtgacttctagtcatgcagatatttattgaccccctaattcttggcactgggttaaacaatgaacaaaacagatcaagttcctgctttcgaggagctaataatctagtagagcaagatgggcagaaacaaataagcaaagcacagcaaaagtcatgtgtgggtaaatgcactgaaggagacgcaactgtggcaggtggacaggcagccaccagcgggcgttgaggaaacctttctgatagtgtgaagcgacgcagagagggctccaggcagcaggaacagcaagtgcaaagaccccaaggcaggagtgggcctggagttcaaggaggcttgtattgcttggatctgacgcagagaagatgggagtcgttagagggtcttgaaccggggggcgcattactttccttagatcagtggtgactccgttaggtagtaactatatttggaaaggaaccacctgtatttctcccagctgcagaggaattgtgtgaacgttactaatgacctgtttcacagtggtcacattttttccatccttgctctgtgctgttggacgcttctccctgccgcgcccctgctctctctgccttcactcccacctgatcacccatggatctttcttctcagtcagaaagcccatctgctgtcacgttgagggctctgaggtctcaattttatttttctagtccttgatctttaaccctataaacagttccatacttccagccatctaagacaaaattcaggctgggcgcagtggctcatgcctgtaatcgcagcactttgggaggctgaggcaggccgatcacttgaggtcaggagttcaagaccagcctggccaacatggcgaaaccctgtctctactaaaaatacaaaaatttgctgggtatggtagtacatgcctgtaatcccagctactcgggaggctgaggcaggagaattgtttgaacccgggaggcagaggttgcagtgagccaagatcgcaccactgcactccagcctgggcgacagagcaagactctgtctcaaaaaaacacaaaataaaataaaaagacaaaatttatattcagtttttctacaaccaaaatgagccttcttcctcaccctccggttggacacctctcctgctgcctcatttctttccaaaactccacagttcgcccagtcctacttttaccaagaaaagtgaggcgaggctggcaggagtgagtgctcagctctcttctgccactgattcccccgtcaccacccttctctggtcctagggacaccgaggtccctcctagtcaggccggccactttaccactacctggccctcctcccgctggatttgtggaggcctttctctgctagttaactgtccctcatctccagaattctccgccatgctttctgaaagcatatttactctcaggtgttccttcctgcttacccatcatcagcccaccatgccctggctgccacctctgctgttcagtggaaccttgagaatgtcggttgcctcctgtacgtaactgagagagaaatatccctgctgcatgtcttcctagtgagcaaaaactcaaagccaaaatagaattcgtgatctcatccatacccctgccctcattcccaatctgctcacatcttcagtgtcccctgtctcagtgaggggctccaccagtccccaggctaaaggccccagagttgttcttgagtcctacttccctgtctctagagtctagcctgcctctccctccctgcgctcgtggcctcctgctggagcgttcagcagagtcatagcggcctctccacctccaggcctgctccgtgcaccccaagaccccttccccaagtctgttagccacgctgtcctaagaaaagctgatacctctcccccaccacactgcccaccccgcgtccagccttccactggcgtcgtgtcagcctctcatcagtcccagcctcgggtgctctctacctgcttttccacttccatctcccaccactaaccagccctcctaaactcaacctcccgtggtctgaatcctcacagttctgagggcacaccatgtggtctcacacctccctgcttttgcgcatgctgtgagctttgcctgaaatctttttcctgactagatcacctgagttctttagcctttaaactaagctcagatgtcctccaaggaagcctccccaggtcagctgggcttccctccacatggcctccctccaggctctatcactgcactactgaattgtattatgttgccggttatgctccttatggctcagtctcttgaagccctgatgccagtggctggcccctgggaggtgctctgctgatgtgtgcaggagggaatgaagtgtcctcaggattcgtgacttccctctgctcctggctggtggcaccttctcccgcattctcctccgcgtcaccctcactgctcttttcctatatcacccctggaccactgcaggtggtccttctaattggttctccctgcctctccttctgcctgctgaggccatcctccacactggaaccacagtgacatttctgaaacgccattctccagcttaacctggcctccctctttccacagtccctgatccagactcctgagaacagcacattctctcccgcctgcctctccctccccatgtgccaccctccctcctcaccctctgccctgacacctgacacctcagccatgcccagctactcttaattccacgcacacactgtgtcacatccatggcaaacccgtcccctccacagcccatcctgacatggacaactcctgcttttttgctcccggtgtcacttatatgcactggttacacacaccccttctcaaacccagcatagcgcgcttcctgccacgttgcagttacttgctttcccaggctgtctctcctgcccatctgtgaattccaaaacaaggtcctctcagacctggctagcaggcccctccctggggccccgcccttgagagggcttcattcccaaagggaacgtaccaccagtgtatacgcactaggcctggggggtggctagagagtcagcagggtgtggacagagtttggctgcataggctgggatagctatgtgcgtactgcagtacagaacagaactagggggaagagaaggggacgtggactgagggccaggctgtctccctgtgcattctggcacagaactccaagaagtctgagaattctacatgtaaatctggcttcacaggctattatgaaggtataatatgtcaggatagacacatagaacaaagttcatgtaagggtttgttcatttgatttataacttttaaaaatggaaacagatggtatgcgggccttcttttatactcttgctccaggcctgtacatttcaggagtaggcctgaccccggcggacacactcgccctgcttgttcatcatggtgccgccaacatgcggcccgctgcctggcacacagtgcctagcccatagattgtgatgaatgaatggcaacatctctttgtcactttaaagtttatgaagactgtaattttaaaaatatatcttggaaggtatattggaaggtagctagttactcagagatactttttctggtagcaaagataacttaaaaatctagcaaaaagaactacataaatagcagtgcctcacattttatagagtggtttataattttcagaatacttttgcatccataatctaatctggtcttgattattctagaccctaatctagtattcctgtaatgtgggcacaggtagtgggtgaggatatgtgtttcggagaggttaagccgagcaccagtgttctcagaatcagagaggccgcaccaggacctcggtcttttgtagccactgctcttatttgacaaggaaaaggtttcagccatgtttggtttcccaacagccaaatacattgtagaaagtcattcttaatctttcttttttcagtgcttttccacataatggtcaaaacctaggcctctcacccttcttggggaccttgaacactggagggtcattgccagatctaaccaacctccactactcgacacccctgccagcctccctggacaccaccgaccaccactttggcagtatgagtgtggggaatagtgtgaacaacatcccagctgctatgacccacctgggtataagaagctcctctggtgagtatctcctgcttagcagtgacctggtggcttaatcataggtggtccccacccatgtggcctgttcagtgaatcattgaatgagaatgactgcatcccagttagagatgataatgtaccttcttgtatctcctgaccctgcggacatttttcttggatgtttctgtttctcctgggttgatgaatttggggcagctctgctgaacctcattccttatcatcctcactcgctgctctatccagggacttggggaataagatatgggagccaagaaataagcatccactccgtgttggctgaacagtattagtggctgtcatcaacatatgataatttataatttaggccatctctctggattcctttcattttccattagatttctaaaggcaatattctgcattttagaaaatttacagtggatatgatgaaaatatttatacttaatatctgtgtgtgaagtagaaatcccccacagttccagttaaagatgtagcattagctatataaagatgctacccataatgggacttgggtgttactctctgggtttgattgtccacagctcagaccccatattgaaattatgactacatttgtttgaagcctgacacttttttttttttttttttgagatggggtcttactctgtcacctaggctagagtgcagtggcacgatctcagctcgctgcaacctctgcttcccaggttcaagcaattcttctgcctcagcctccagggtagctgggattacaggcatgtgccacgatgccgagctaatcgtttttgtatttttagtagagacagggtttcaccatgttggccaggctggtctcgaactcctgacctcaagtgatccacccgccttggcctcccaaagtgctgggattacaggcgtgagccaccactgacatacccttgtcaatgtctagggcaggtgataatcctcttactcccagtggtgcagtacagcccctggccgtaacagtcctacccagaattgtgttgtggagcatttcatttggaagggatgctcagtgatggtctccaggtgaaagcagtgtttgctgcctttcactctgagactcatccatgcaaatcagaactcaccacccaaatgagagtggtccccttcagggggggtcacctggaagtttttctaatgattgcagtgatgctgcctggtgcaacacaatcttaggtttgaagaattgatttcagagaacacctttatttttgttttttgggtcattttagtatccttaatagtagcaggtttttcatcgactgagtctcagttttgatatttatacatttgcttcataggagaaatttgatatttgcttcacaggagaaactctcgaaacctttatgcccagattcagagtctgggcaattcaccttttgggtgaatcctcaatgtatgaagatatctagggtcccagaagtaaagcagcatcagcacatagctcctttgggtctcagggaagctggcattttccagtacagcctttgacactttgcttcaagctgaagatcttatgtttagtcactggttgtcttctcaaaaaagcactattttatccagaacatgtcagaaccaatgtcagtttctgtattttcttttttttttttctttttgagacagactcttgctgtgtcgcccaggctggagtgcagtggcgccatctcggctcactgcaagctctgcctcctaggttcacgccattctcctgcctcaccctccccagtagctgggactacaggcacctgccaccacgcccggctaattttttttgtaatttttttagtagagacggggtttcaccttgttagccaggatggtcttgatctcctgacctcatgatccacccgcctcggcctcccaaagtgccgggattacaggcgtgagccaccacgcccagccggcaaaattannnnnnnnnnnnnnnnnnnnaacaagaccctgtctcaaaaaaaaaaagaaaagaaaaacaaggaagcacaaagactctctgtcttggcttttccctacaggcttgttggtaaagtcttgtgaccaccacgcccagccggcaaaattatttttaagaattttaggctgggtgcggtggctcactcctgtaatcccggcactttgggaggccgaggcgagtggatcacgaggtcaggagatcgagaccatcctggctaacacggtgaaaccccatctctactaaaattacaaaaaattaaccaggcgtggcggcacatggctgtagtcccagctacttgggaggctgaggcaggagaatggcgtgaacccgggagacggagcttgcagtgagctgagatcatgtcactgcactccagcctgggtgacagagcaagactctgtctcaaaaataataataataataatagtgataataataattttgccagctgctggatttttgtcatttcttccttttcgtaacttttatcaaacacttaaattttttgtcaacacaaaacaacacatagttctgcttaccccacctgctggtacaagaaagatgggctgaaggttaaaacgtaggtattgccagttgagatacacacagcagcagcagccgaataattgattcactgggcgaacctgctccatgccaggccctgtgccaggtgctgaggatccagcagggcataggacaggatccccagtttctgggagctcatgccctagcagcctatgctgcaaagatctctctcccaaatttccttgctcatgatcaaattcacccctgtcccccaaataaagcaccagcaaaaacttccttttccctgagttggtatagactgtgatgaacaatttcctgggaaccagaaaatcaaagagggaccctggggtgggagatacagggaagtgtcccttcctgtgactccctagtgtgctaagggtaattaaagaccaccaagacagctccccaagggccatgactcgccgtggaaggatgttctccaaaggtagcaggggatgcaggcagtgtgcttgggacagagaccttccggggctctaaacagaatttgttgtacagccctagggtcctttccctgggtctgggccgagcacctggaatatttgcctctgttaccccggtttacctagttttgctcacctaggggttgttgacgtgatctccctcctcatgggaaaacatcgttgtcatctttgtggccccatctctgttagtgcaggggcatcttttccttgccattggtgcatcggatgcagtccctgtaggagagctgtccaggagctcctttacctacagaatcatcatcgcatgtgacagtagacagttttctttcatttttggaatacaaaagatttggtctgaaattataagtaacttgtgaatttgttgtcttccaggtctccagagttctcggagtaacccctccatccaagccacgctcaataagactgtgctttcctcttccttaaataaccacccacagacatctgttcccaacgcatctgctcttcacccttcgctccgtctgttttcccttagcaacccatctctttccaccacaaacctgagcggcccgtctcggcgtcggcagcctcccgtcagccctctcacgctttctcctggccctgaagcacatcaaggtttcagcagacagctgtcttcaaccagcccactggccccatatcctacctcccaggtaaacacacacagacagaccaaccactacagtgaaacagactgcaagatataggaagtgcattcctcctctttactattttgggttacactcattattacaccaagcacccatgaggtctcaagtgcagtctgttcgctcttatatgtgaaatcagagcagaagtgtcaataatgcagaatgaattcatgattttcttttctttttttgagaaagggtctcactctgttgcccaggctggagtgcagtggcacaatcgcggctcactgcagcctcacctcccgggctcaagcgatcttctcaccttagtcttcggagtagctgggaccacaggcatgcaccaccatacctgactaattttttgatttttttgtagagacaagttctcgatatgttgcccaagctggtctcaaatgcctggactcaagccatcctcccagcgtggcctcccaaagtgctgggattacaggcatgagccactgcacccagcctaattaatgattttttattataataatagcagatttgctgtgttgattactctttaagcaaatgttgaacaatctgtagtcactaactcacaaacttggggttgagaggaacggtaggatatagagaatgccatccaggtaagtctaaggcaactgagggaaaccaggttaggatttcaaagttggcatggaaaatcagtcattgactctctaagtacattaagccataggggaaagccaaagaaaacatttaataccttcctgaagctttgataatgaattagacctcttccctaattgtctacagatttgagaaacaatacttttattgttcatgaaatgctaagtatgttgaggattatatctcttataaggatgaaaagaagtctgttgagaaagaggcacatttaaaagtcacccacccatacaaaaaatggaaaaattatctgggtgtggtggcacacgcctgtagtcccagctactccagagcggaggtgggaggctcacttgagcccaggaggtcgaggctgcagtgagccaagacagcctcactgcactgtagcctggcaacagagtgagaccctgtctcaaaagaaaagaaaagcccattatagaaacacaggggttgaaacatcctataaattctaaactcagaggtggttctccttataccataatcatcgaggtaatgtgttttcaaccttttgtcacatcctctgtctattacagcatcttttttttttttttttttttttttttttttttttttgaaacggagtctcgctctgtcgcccaggtcggactgcggactgcagtggcgcaatctcggctcactgcaagctccgcttcccgggttcacgccattctcctgcctcagcctcccgagtagctgggactacaggcgcccgccaccgtgcccggctaattttttgtatttttagtagagacggggtttcaccttgttagccaggatggtctcgatctcctgacctcatgatccacccgcctcggcctcccaaagtgctgggattacaggcgtgagccaccgcgcccggcctattacagcatcattaactactcaccacctcgccataaattaatgatttagaaggaagagttgacagaacacaacggagagttagaggatcttgttattggtcactgtttaccaattactagccgtggcgtgttgatcgtatgagtgatctcttttgggcgagggtgagaggacatttcataatttttaagtctcactctgtcgcccaagctggagcacaatggcacgatcgcggctcccttgccttgaattcctgggcccaagtgatcctcctgcctcagctgggattcttcaagtaaatgtgactacaggcccatgtcaccacacccagctaatttttttaatttttttgtagaaacagggtctccctgggctgggtgtgtgcctcacacctgtaatccagcactttgggagtccaaggcagacggatcacttgagggtaggagtttgagtccagcctggttaacatgacgaaaccccatctctactaaaaatacaaaaattaaccgggcatggtggcacacgcctgtaatcccacctactcaggatgctgcgacgtgagaattgcttgcaccctggaggtggaagtttgcagtgagccaggattgcaccactgcactccagcctgggtgacagagttactctgtctcaaaaaaaaaaaaaaattagaattaaaaaaagaaaagaaagaaatagggtctccctatgttttccaggctggtcttaaactcctgagctcaagtgatcctcgcacctcagcctcccaaagggctggaattagccagtgtgccttgtgccaggcatgagccactgtgccctgccataatttttatttttttttagagacagcgtttcactctgtcacccaggctcgagtgcagtggcgcgatcacagctcactgcagccttgaactccctgagctcaggtgatcctcccaccttaacctcccaagcacataggactacaggtgtataccatcacacccgactaatttttgtatttttttttttttgtagagatggggtttcaccatattgcccaggctagtccataattattgttttcgtggttcttatgttattgaattacctttaattttattttgcaagattattttataagatctaaaagtattcttgctttttagctacattttaaggagactgtatggccagagtgtcccctttcagatgtgtttttaatttgtttaatatttagattttttttaaatgaatgttgctggacacagttgttctgactgtaatcccagctactcaggaggcagagactggaggattgcttaaggcccggagttcaagaccagccttggcaacatagtgacaccctatctatctcttaaaaaaaggaaattttaaaaagtgaatgttattcatgcacatagtttaaaaagtaaaatagttctaaagggcttgttatagaaaaacagctgtctttccctctcgttaggcatattcctcactgcctagagatggctgtcaaccattttaactaatctctttggtataaccatgttattattattttgagacagagtcttgctctgtcacccaggctggggtgtagtggtgcgatctcaactcactgaaacctccacctcccaggttcaagcgattttcctgcctcagcttcctaagtagctgggactacaggcatgtgccacgacgcctggctactttttgtatttttagtagatacggggttttaccatgttagccaggctggtttcgaactcctgacctcaggcagtctgcccgcctcggcgtcccaaagtgctggattacaggcatgagccacctcacccagcctaaccatgttgttttatgctttttttgttctacatttttggtgttaggcattatctaatgacatcctaccaatgaagattagaatttaattctctttccactctcccacagactccaccacacacatatgtgcgcacatgtgcacacacaatttcctacccaccctcctcatttattataattttggttagagcaatactcaatatttagtgtttttatagttacaatgtagtcagagttgacatatagtatactatgaaacaagaaaatgagaattttttttcctcttgggagttaataaatgtctgactttttttattagcctggttatctatatgtatctatgtgtatgactaattcagtccccaactcttggagttgggcagatctcctctcgacacattcaaaactaaattctctagtagctctatagcaaagagtgcctgtgactttgtatgacttaaaatgtctttatttgatctgccatttaattattatttggctgaatatagaattctaaatttgaaataattttcccttggcatctattgcctattcatttgtaagttgcattgagaaatccagtgccattcggactcttaacactttgcatggaatccccctgctccaccccaggcttgtgagatctttttgtccccagtgttctgaaacttcaagatgatgtggcttggcgtgagtctgcatatttggtgggttccttcaatctggaaactcacagccttcatttctgggaaatgttctttatttcttcaatgatttcttcccttcagttttctctgttctttctctctggaactctacgaatgttgactatcctggacttttcctctattatccttattttctctctctcctcttttgcttctctgtggttgcttccttgtttgtttgttttgctttgctttctggaagattgtctcagctttatcttccaacacttctgttgagttttccatttctgctctcatttttaaattgctatgagttcttttttgttctctgagtgttcttttttaatagcatcatacttattccacagatgcaatatcatcttttatctctcaggtttttagtggtctttttttttcgaatttatctttattttctataatagaattttcctaaattgcataaaagtagagaacataatacaataagtcctcctatacccatcatttaccctcaacaattaatttttttttttttgagacagggtcttgctctgttgcccaggctggagtgcagtggtgtgatctcggctcattgtaacctccgccatccaggttcaaaccattctcctggcctcagcctcccgaatagctgggactacaggtgcacaccaccacacctggctaatttttgtaatttttagtagagacgggatttcaccatgttggccaggctggtctcaaactcctgacctcaggtgatccacccacctcagcctcccaaagtctgagattacaggcgtgagccagcacgccagccttgttatcttgtttcatccataccctgcttttaaaaattgcagatattttaatatgtatctctaatagataaggattttcttagtagcctaaatattgtcatgctgattttggtttttcacaactacttcttcctgcacacatctttccaagattgtgtgtgtctgctctggcctctgactttcacggcagatggtttcctcagggcctggtgatcctcagtgctctgctcatgtttaagaacaggacactgaggggctgtctccttgcggctctacactagagcggagtatgagtctgaggcgaagggagtcatggcaggacaagcgtgtagaaagttttttccactctctgactgagtattggttggaaggagcgctgctaaaactgtaaccaaaggaggcattttgcttccagaaaaatctcaaggaaaagtattgcaagcaacagtagtcactgttggatcgggttctaaaggtaaggctggagagattcaaccagttagcgtgaaagttggagataaagttcttctcccagaatatggaggcaccaaagtagttctagatgacaaggattatttcctatttagagatggtgacattcttggaaagtacatagactgaaataagtcactactgaaatggcatcagtgtgaagctgcccattccactgaagttctgaaatctttcatcatgtaaataatttccatatttcttataataaactaatgataactaatgacatccagtgtctccaaaattgtttccttgtactgatataaacatttccaaataaaaatatgtaaatgagaaaaaaaaaaggacactgagaagctggctggcagctctgtgtatgtgggcaggcctgctgagtgtggtcttcattgtagaatgatctagcttggtcatttccttgggaaactcctggtgtcataagttttacattcttctctggccaggcgtggtggctcacacctgtaatctcagcactttgggaggccgaggcgggtggatcacctgaggtcaggagttcgagaccagcctggccaacatggtgaaaccccgtctctactaaaaatacaaaaattagccaggcgtgttagcatgctcctgtaatctcagctactcgggagactgaggcaggagaattgcttgaacccaggaggtggaggttgcagtgagccaaggtcatgccactgcactccagcttgggtgacagagcaagactctgtctccagaaaaactctgtctccagaaaaaaagattttctctcttcaggccttgtcaggttccctaaaggacactcttccaatgtcgcacctcggcatatcaggattccggcatcctgtgagccgggttgggaaagaaaggtggagatcttaagattcgatcgtgaaatttcttctaaagaataaaatacctaggaatccaacttataagggatgtgaaggacctcttcaaggagaactacaaaccactgctcaatgaaataaaagaggatacaaacaaatggaagaacattccatgctcatgggtaggaagaatcaatattgtgaaaatggccatactgcccaaggtaatttatagattcaatgccatccccatcaagctaccaatgactttcttcacagaattggaaaaaactactttaaagttcatatggaaccgaaaaagagcccacattgccaagtcaatcctaagccaaaagaacaaagctggaggcatcatgctacctgacttcaaactatactacaaggctacagtaaccaaaacagcatggtactggtaccaaaacagagatatagaccaatggaacagaacagagccctcagatataatgccacatatctacaaccatctgatctttgacaaacctgacaaaaacaagaaatggggaaaggattccctatttaataaatggtgctgggaaaactggctagccatatggagaaagctgaaactggatcccttccttacaccttatacaaaaattaattcaagatggattaaagacttaaatgttagacctaaaaccataaaaaccctagaagaaaacctaggcaataccattcaggacataggcatgggcaaggacttcatgtctaaaacaccaaaagcaatggcaacaaaagccaaaattaacaaatgggatctaattaaactaaagagcttctgcacagcaaaagaaactaccatcagagtgaacaggcaaactacagaatgggagaaaatttttgcaatctactcatctgacaaagggctaatatccagaatctacaaagaactcaaatttacaagaaaaaaacaaacaaccccatcaaaaagtgggcgaaggatatgaacagacactcttcaaaagaagacatttatgcagctaaaagacacatgaaaaaatgctcatcatcactggccatcagagaaatgcaaatcaaaaccacaatgaggtaccatctcacaccagttagaatggcaatcattaaaaagtcaggaaacaacaggtgctggagaggatgtggagaaataggaacacttttacactgttggtgggactgtaaactagttcaaccattgtggaagtcagtgtggcgattccttagggatcttgaactagaaataccatttgacccagccatcccattactgggtatatacccaaaggattataaatcatgctgctataaaaacacatgcacacatatgtttattgcagcactattcacaatagcaaagacttggaaccaagccagatgtccaacaacgatagactggattaagaaaatgtggcacatatacaccatggaatactatgcagccataaaaaatgatgagttcatgtcctttgtagggacatggatgaagctggaaaccatcattctcagcaaactgtcgcaaggacaaaaaaccaaacaccacatattctcactcataggtgggaattgaacaatgagaacacatggacacaggaaggggaacatcacacaccggggcctgttgtgggatgcggggaagggggagggatagcattgggagatatacctaacgtaaatgacgagttaatgggtgtagcacaccaacatggcacgtgtatacatatgtaacaaacctgcatgttgtgcacatgtaccctagaacttaaaaaaataaaatattaaagaaaaagaaatttcttctaaaccctgtgttttcagtaaagtgcctcaccttctaatatccagagacccttagttttattatctcgaaagtagaaccttccagtctcctggcaggtggcaggatggtgggggccagtgcgcagaagcacactcaaggcaagggctctgcaggtccaactgccccttacacaaactgtgaccagaatctcctggttttagcttcaccgcctgctccctgctgtccccagtcccagagccctgtggggactgagtgctgtcagtgagattgcctcctggtttttcctcactgccagcctagcatcgggttttctcagctctgctaagccagctgccaccgggccatctgctgctcattttccagcttttgttgccattttcttctctcccgttatctttgtcctcgtgttgtttgttatcatttagtgttctgtgctgttgtttagtgttttttattaatgcttattgcttgttaatgttgtagtgtcttgttttaacaggatttggggatgacagagctaagggcctttttcaattttccacttttaaccagaagacacggctataaaacaaaacaaaacatgattttcacggagaaaactgaaaggaaattggttaaattggctgttttcttgtttagttcttttaagacaatagaacttgtcattgaatggaacatgctttgtggggaagtaaaatttgagatatactttgaaggatgagaaacgggcttctcacagcattgcacagaacactgcggtgaggaaaatctcaggcttcctctcactctgacatttcctaatcctaaaggacttaacgccagaaacgcagaagctcattagtggctttgtgtgtttgttttgcagatggtgtcctcagaccgaagccaactttcctttctgcccacagaagctcaagcccaggtgtcgccgccacccccttaccctgcaccccaggagctcacccagcccctcctgcagcagccccgcgcccctgaggcccctgcccagcagccccaggcagcctcctcactgccacagtcagactttcagcttctcccggcccaggtgagttctggcaggagcgttggtgcagagggaatgcttgttttgctctgagttccaagctaaatgatcatctccttattccctgaagggctcatctttgaccaacttcttcccagatgtgggttttgaccagcagtccatgaggccaggccctgcctttcctcaacaggtgggtgatcgcccctgccttctcctcccttggtgcataaactgtaccatttaggttgttcattctgtagaattcagaactgagcagaccagacatgccactttcctggttctggttgtgttctgtggctagaagagcctttcatcttctttggccctaaaatgctttctctggctgccttatttagtatcaggcttcagcagaggaactattggaacaatcggcaggagacttttgatgacactctcgttgtagaactgtaaaatcatgaacactggaagggacacagcacctgcctcctcagcgccctcatgttgaaactgaggcatagggagagtggcgcctgctcccaccgcagagtcagaaggtggcgccgcatttggcctgcacccaggctggtgcacccagcacagcgtggggcctcctggggagagctcagtcctggggagtgaggggagtgcgttccgtaaggtattttcaactcggccactttcttttacagtttagttttttcctaacattgactatttttaatattctagattttatagtattcaatagtattcaataagtatggactgggccctccgatggattaaggagtggaagaagggttgaacaggttccagaacttttttttttttttttttttgagacagaatcttaatctgtcgcctaggctggagtgcagtggcgtgatctcggcttactgcaacctccacctcctgggttcaagtgattctcatgtctcagactcctgagtaattggggttacaggcatgtacccctacacctggctaaattttatatttttagtagagatggggtttcactttgttgaccaggctaatcttgaactccggacctcaagtgatccacccgccttggcctcccaaagtgctgggattacaggtgcgagccactgtgcccagccaagaacttaataaaatagctgggcatagtgnnnnnnnnnnnnnnnnnnnnggaggccgaggcgggcggatcatgaggtcaggagatcgagaccatcctggctaacacggtgaaaccttgtctctactaaaaaatacaaaaaaattagctgggcgtggtggcaggcacctgtagtcccagctactcgggaggctgaggcaggagaatggcgtgaagccgggaggcggagcttgcagtgagctgagatcgcacccactgcacttcagtctggacaacaaagcaagactctgtctcaaaataagtaaataaaataataataataaaataaattaagatagctgtttcctaagcaggccacagatgaagctttgtggcaagaaccaatcctccttgcctccctgtttcccaaagagccattttagtctaggtgggaatcaccgtctccctgaaaaatgatagacacttcttttgagactttttttaaaatggcttagaaaattaatttcaggaaaggaacctaaaattggcactggttataaccagtcctcatagaggctttctcatagggaggagcttgcctgagtttcctccttctgagtgtgaaaaggaaagccttcccctttctcagttttctagaaaccagggaagaggccaggtgcagtggctcacacccataatcccagcactttgggaggccaaggccagtggcttacttgaactcaggagtttgagaccagcctgggtaaaatacagcaagaccctgtctctaaaaaaaatacaaaaattagccaggcatggtggcatgtggtcccagctatttgggaggctaaggtggacggattgcttgagcctgggagctggaggtttcagtgagccgagatggcgccattgcactccagcctgggcaacagagaccctatctttaaaaaaaaaaagaagaaagaaaccaaggaagaagagtccatacttccttggttatagacagagcctttgaagggttcccacagaaggcagtttgcaaaggccttggtgaggctgaggacagatgtctgaggggccacagaaaccatgagcattggtgtctcttgggatggtgtagtgggctggggaaaagtcaccacgctgtggacctcagggacccctcctccaccccagcgtctgcctgcctgacaagaatattgtgcatgcattaccataagagcaaagcactctgggatcctggaaagaagggaatatggattagtttgcaagtcaggttttgctctgggagcacattgcaatactcacttcctccttggaaacagaggtgtggccttcctcacatgaccttcgatgcttccaggtgcctctggtgcaacaaggttcccgagaactgcaggactcttttcatttgagaccaagcccgtattccaactgcgggagtctcccgaacaccatcctgccaggtgagcgagctatccctcagcttctttactgcttttatgttgttgtgtgttcaggaaccttcataagagagtttaaacaacataatattatataaagcaaaaagttaacgttccctgggtcgacttgactttttgagatgcaggtgtccagcctcagagaccgtgacacagggcggtgggcctggtagtcaaagccttttctgaaagatttcatctggcccagtgcggtggctcacgcctgtaatcccagcactttgggaggccgaggtgggcggatcatcaggtcaggagatcgagaccattctggctaacacagcgaaaccccgtctctactaaaaaatacaaaaaaaattagctgggcatggcggcgggcgcctgtggtctcagctactcgggaggctgaggcagaatggcaccaacccaggaggtggagcttgcagtgagccgagattgtgccactgtactccagcctgggcaacagtctccaaaaaaaaaaaaagatttcatcttaggtgactgatgactgttcaaaaggaaaaaacctgcaaaaattgggagttgtgcaactgactgacaagaatgtagattccagggcaagaactgtgggcctgggggtggtcaggatgtgtgggatagcagtttaggggactgtcatcagctgggtttgcttagtagcctggagccttcgcgcctcctaaccgcactgttttcccctctggccactcctttcagaagactccagcaccagcctgttcaaagacctcaacagtgcgctggcaggcctgcctgaggtcagcctgaacgtggacactccatttccactggaagaggagctgcagattgaacccctgagcctggacggactcaacatgttaagtgactccagcatgggcctgctggacccctctgttgaagagacgtttcgagctgacagactgtgaacagaaggcagtggaacagaagaatgtttttctgcaacagccaaaatagaatggaatagaatgaagccagctgataccacgggctttcgttatcttgacatagaaggaagcaatgccacggctccagggtttcagatgagatcccatctcagacactgtggcttcctccagatcacacagctttgtactgcctctcccgcctgtggccaaagtcgtgttgcagcaggcaggctgcttggagcttcccatgaactggaaagctcacctccactgcatctttttactggccatccagtcagccgatgtgtaagagtaggaaatactgtgtcactggaggcctccgtagcattgtgtagtgtgctcagaaccactgatctccgtccgcaccgaaggcgggcccggagtgggaggctcggcctggggcggcggcaccggagagggcacctcgatgcctgctctgacctgacccagagggcgaggccctccagcgggggacattcccaggctgagtggaccccacggctctctcccacgcctggattacgacatgaagtttttaccacaagcccgagggcaggcttgagttaggcagactgaaggctaattttcattttctcccagctggtttctgctgcttcagaaaagtacaccttttccttatggaccagaggaagaggaagaccattttatcagtcactgaaaagagtcccctggcactgatgagcctgaagagaactgtgctcctcctcgggggctggggaaggaagacagggactgcaggtgtctcatactcagtggcctccagacaaactccagacaagcacagacctccccactaagagcagccagagggagctggtgaggccctaaccccacccaccgagcaactgagcttccccatccctccccagagctgtgtctctgtgggctgggagtctaatgtcacccccctagaccgtaagctccttgagggcagggacagtgccttatcattgttgaacccgtagcacctaacacgtgcgtggcagcacagtcgtgtgctggagtgagtgctgcagaaccgtgcgtgcagcgcatgatgaatgagtgcgtccgccatgccgtaaggcaggctcacctgtagctatccccttccctgccagatcttctcagagctttagcttttctagcactcgtgcctatggtgaagcatgcactttaatatgcttttaacactaggtgaccaaatcacagtgaagccgggcactgcattctccttgggctgtgctccacgcgggtgggtgggagctgtcttctgagtacatccggaagggctgagcaggtgagtgccctgagcatcctggctgggccccacccaggaagatcttccttctcagatccacgtttggctctaaattgcttcaagtagagattcattctttgaggttgaaaaaatagtttatagtaaaacgaaggcctaattcatggaagcatcattagtcatcaataccttctcataaaatagatgggccagatttccaccaccgcctgcctcctctaacttgggtgatgccagtaggtttgaagggggcagagcactgcagggggaggggggggtctaggctgtgagaggacagggtggagaggaggagaaccctgaaggagagacggaagatgccaggacctttgcttggacagccattgcccttccaggagaccctggagtgtactgagggttgctggactgttccacccagaggagcaaggctgtacaatgagggtctgaatctggcacacctgtcccttatgtaaaaggagtcgtggtcacaagaccctgggctggttagcctctcccgacctcattccatttctatcttctgaccttgcctctcatctttaaaataaccctcatggggtgcccctccaccttcctctggaatccaagtattcctgtttcacatttgccccaaatctttgctgtggaattgggaaatcaaaccagagtcctcctcgcctgatttccagctcaggaagggcctgctggcctgccctgttcccagttacactttcagatccctttgtgctcaagatctcagagggggtggctttttgttaaagagccttcagtcgcaatgctacccagcaccccatgtgccaaaagaaaccagctcctgtgtcaaagggcttccaaacctgatctcactctcaacaggcgatggtgctgatgtttcaagaattgtgtttttataaaacagaggtctcagcatagtcactcttcacatagtgccttacccatgggtatcgtcatatccgggtcccagttcagtttgtctgcacagcagccaccctgcctggcaacagagaccccaagacctacacagtgaaccctactgccccaaaggcgttctccaggtgacttgtgaaaacagacctccggggaagtgatttattgggggtgtacactgggggcaatatggtttagcactgaattcaatttgtccttaggtctatgagtgagtccgatcttttcttgtgaaaggttttgggcatcgtacaacccactctgcctagaaggtgtggaggactcaccacgggcagggtcgccctggcccacagcacgtgagcctgcactcactgcggcctttgtaacaaaaccagttgtggtcctcagcatttgaagcagctgcatacttcagagtaaactatttttcattatttagttttgtcacaagaaatcgaccattgtactactctcacttacagcagttaaacagcatagaactaaaaacctgtctgcatttccattttttctttctgtatggttgtgggttttaggacatagggggttaggagaaggggtttcttgatcatgtcatgaattctcctttgtcctgtttctcctgtttcatttctcctccgcctgctgtatattacctgagctggtgttgtatcttcaagtccatatgcgtatttgcagacctttcctgttcccactcttgttggctcttctgatttatgcacagatggttcccagcatgtgtccagtgcttcatggatgggaccatcccagcaactaatcagacttcctgccagtgtcctaacccccagggcaccctgttcaaccatatttaaaaattggaatttgtataaagttgcttccaagttttataatgcatcattttacatcttttgtaattaaaagcatcacaatgaggttgtctctgcatttggtggtgtttttcttcacttgggtgaggggttggtggggagccttaatctcaccgcctcctgcacggctcagcctgcagctaggatttggagccttggcaaggcaggccctgtaccagctgtgggtcaggccttcttgtgatacgtgaaggggcactcagttcccttagctggaggcagctgggtctcctgcccccacagccagcacccgctccacacccctgcccacggcccttcctccaccagatactctgtcctgggttggcctctagccctgtcccttccccagacccccatcccagcagggttcaacgcgaacagccacatctagcacttgtcataaaggtgactgtctcctgaaatcctacctggaaatcctgtttctgactttaacttcctgagcccccatttccactctggtctacacacaccctgttctttgaccgcactgagaattcttccgtgtcccctcttctcagcctgcccgtcctctcctagcttcccttgcttctgcccgggcccacctggctcgtggcctccgtggcacccccaggccccttctcctgccaccacgccactcttcctcctcaagacctgccaccacgtcactcgggctgagctttctgttgctgggagccctgcgggaagaaccagcacttccaggctgtgctgacccagccctctcctgccacgtggggcacccacgccctcctctcctcaaggctcatcagaccacatgaggccttcttgcctcccatccaggccacctgggccagctcccgccgtgtcccagctgctccccattccgtcccatggcccgtcgcgccttccccagcgtccctatgccttacgaggtcctgtttccacgtcaacctgaccttccgcaaggacttgctgatgttctagggccttctacttagccctctctgatggcacctccccatcagcctgtgaagatgcccagtctccttcctcagaacaaacagaaaactctcctttccccgccggctacccctcatgccacagccctgtgtcctgcctctcctggaggagcactcctgctcagcctccttctgcccgcagccccagggagccctccaggattccctactctcctgcctctgtccaaggccctctgatgtcagccgcatcctgaccctttggccactctctcccctccgaaatcctctctggctccagtaaggcttttctgcatattctaccacccaggccatgcctgtctcctatcatcctccccctccaccatcatcttctttccatcgacctcccaaaccaacttctccagccctccaagcagacgaccctcatacttagccctctccccacctgcctatcagccagtgctcatgcccaccccacccnnnnnnnnnnnnnnnnnnnnnnnnnnnnnnnnnnnnnnnnnnnnnnnnnnnnnnnnnnnnnnnnnnnnnnnnnnnnnnnnnnnnnnnnnnnnnnnnnnnnnnnnnnnnnnnnnnnnnnnnnnnnnnnnnnnnnnnnnnnnnnnnnnnnnnnnnnnnnnnnnnnnnnnnnnnnnnnnnnnnnnnnnnnnnnnnnnnnnnnnnnnnnnnnnnnnnnnnnnnnnnnnnnnnnnnnnnnnnnnnnnnnnnnnnnnnnnnnnnnnnnnnnnnnnnnnnnnnnnnnnnnnnnnnnnnnnnnnnnnnnnnnnnnnnnnnnnnnnnnnnnnnnnnnnnnnnnnnnnnnnnnnnnnnnnnnnnnnnnnnnnnnnnnnnnnnnnnnnnnnnnnnnnnnnnnnnnnnnnnnnnnnnnnnnnnnnnnnnnnnnnnnnnnnnnnnnnnnnnnnnnnnnnnnnnnnnnnnnnnnnnnnnnnnnnnnnnnnnnnnnnnnnnnnnnnnnnnnnnnnnnnnnnnnnnnnnnnnnnnnnnnnnnnnnnnnnnnnnnnnnnnnnnnnnnnnnnnnnnnnnnnnnnnnnnnnnnnnnnnnnnnnnnnnnnnnnnnnnnnnnnnnnnnnnnnnnnnnnnnnnnnnnnnnnnnnnnnnnnnnnnnnnnnnnnnnnnnnnnnnnnnnnnnnnnnnnnnnnnnnnnnnnnnnnnnnnnnnnnnnnnnnnnnnnnnnnnnnnnnnnnnnnnnnnnnnnnnnnnnnnnnnnnnnnnnnnnnnnnnnnnnnnnnnnnnnnnnnnnnnnnnnnnnnnnnnnnnnnnnnnnnnnnnnnnnnnnnnnnnnnnnnnnnnnnnnnnnnnnnnnnnnnnnnnnnnnnnnnnnnnnnnnnnnnnnnnnnnnnnnnnnnnnnnnnnnnnnnnnnnnnnnnnnnnnnnnnnnnnnnnnnnnnnnnnnnnnnnnnnnnnnnnnnnnnnnnnnnnnnnnnnnnnnnnnnnnnnnnnnnnnnnnnnnnnnnnnnnnnnnnnnnnnnnnnnnnnnnnnnnnnnnnnnnnnnnnnnnnnnnnnnnnnnnnnnnnnnnnnnnnnnnnnnnnnnnnnnnnnnnnnnnnnnnnnnnnnnnnnnnnnnnnnnnnnnnnnnnnnnnnnnnnnnnnnnnnnnnnnnnnnnnnnnnnnnnnnnnnnnnnnnnnnnnnnnnnnnnnnnnnnnnnnnnnnnnnnnnnnnnnnnnnnnnnnnnnnnnnnnnnnnnnnnnnnnnnnnnnnnnnnnnnnnnnnnnnnnnnnnnnnnnnnnnnnnnnnnnnnnnnnnnnnnnnnnnnnnnnnnnnnnnnnnnnnnnnnnnnnnnnnnnnnnnnnnnnnnnnnnnnnnnnnnnnnnnnnnnnnnnnnnnnnnnnnnnnnnnnnnnnnnnnnnnnnnnnnnnnnnnnnnnnnnnnnnnnnnnnnnnnnnnnnnnnnnnnnnnnnnnnnnnnnnnnnnnnnnnnnnnnnnnnnnnnnnnnnnnnnnnnnnnnnnnnnnnnnnnnnnnnnnnnnnnnnnnnnnnnnnnnnnnnnnnnnnnnnnnnnnnnnnnnnnnnnnnnnnnnnnnnnnnnnnnnnnnnnnnnnnnnnnnnnnnnnnnnnnnnnnnnnnnnnnnnnnnnnnnnnnnnnnnnnnnnnnnnnnnnnnnnnnnnnnnnnnnnnnnnnnnnnnnnnnnnnnnnnnnnnnnnnnnnnnnnnnnnnnnnnnnnnnnnnnnnnnnnnnnnnnnnnnnnnnnnnnnnnnnnnnnnnnnnnnnnnnnnnnnnnnnnnnnnnnnnnnnnnnnnnnnnnnnnnnnnnnnnnnnnnnnnnnnnnnnnnnnnnnnnnnnnnnnnnnnnnnnnnnnnnnnnnnnnnnnnnnnnnnnnnnnnnnnnnnnnnnnnnnnnnnnnnnnnnnnnnnnnnnnnnnnnnnnnnnnnnnnnnnnnnnnnnnnnnnnnnnnnnnnnnnnnnnnnnnnnnnnnnnnnnnnnnnnnnnnnnnnnnnnnnnnnnnnnnnnnnnnnnnnnnnnnnnnnnnnnnnnnnnnnnnnnnnnnnnnnnnnnnnnnnnnnnnnnnnnnnnnnnnnnnnnnnnnnnnnnnnnnnnnnnnnnnnnnnnnnnnnnnnnnnnnnnnnnnnnnnnnnnnnnnnnnnnnnnnnnnnnnnnnnnnnnnnnnnnnnnnnnnnnnnnnnnnnnnnnnnnnnnnnnnnnnnnnnnnnnnnnnnnnnnnnnnnnnnnnnnnnnnnnnnnnnnnnnnnnnnnnnnnnnnnnnnnnnnnnnnnnnnnnnnnnnnnnnnnnnnnnnnnnnnnnnnnnnnnnnnnnnnnnnnnnnnnnnnnnnnnnnnnnnnnnnnnnnnnnnnnnnnnnnnnnnnnnnnnnnnnnnnnnnnnnnnnnnnnnnnnnnnnnnnnnnnnnnnnnnnnnnnnnnnnnnnnnnnnnnnnnnnnnnnnnnnnnnnnnnnnnnnnnnnnnnnnnnnnnnnnnnnnnnnnnnnnnnnnnnnnnnnnnnnnnnnnnnnnnnnnnnnnnnnnnnnnnnnnnnnnnnnnnnnnnnnnnnnnnnnnnnnnnnnnnnnnnnnnnnnnnnnnnnnnnnnnnnnnnnnnnnnnnnnnnnnnnnnnnnnnnnnnnnnnnnnnnnnnnnnnnnnnnnnnnnnnnnnnnnnnnnnnnnnnnnnnnnnnnnnnnnnnnnnnnnnnnnnnnccacactcatcctcgtcaccgttcctcaaaccacatccctcctcctccacacccctcgtcaccctttgtcctcctccaaacgcttcttcctcctgtttcttcctccacacccctcctgctccacatccctccccctccatcccctccacacccctccccctcctcaccccgtctcctcctccacacccctcctcctccatacccctcctccacctcacacctccccctcaccccttctcctccaccacacccctcctcctccacacccctcctccgcctcacacctccctcacccctcctcctccacacccctcctcatcctccacacccctcctccgcctcacccccctcctcctcaccccttctcctctccacatccctcctcctcaaccctcctgctccacatccctcccccttcacacccctccccctcccccttcacacccctcctcatcctccacacccctcctcctcacccctcctcctcctcacccctcctcctccacacccctccttctcctcacccctcctcctgtgccatcttttcaaacacaggatactttaatcttgaaaagtactgaatttgtatacttgttttgaaatactaaattttcgatctggaaggaatgattttagatcttattttgggccaggcacagtggctcatgactgtaatcccagcactttgggaggctgaagccggaggatcacctgaggtcaggagttcgagaccagcctagacaacatggtgaaaccccatctctaccaaaaatacaaaaattatccgggtgggcgtctgtcattccagctactggggaggctgaggcaggagaattgcttgaacccagcaggcagaggttgcagtgagcagagatcacaccactgcactccaacctgggtgacagagcgagactctgtctcaaaaaaaattaaaaataaaaataaaaaaagatctttttggtccattttacctaataaagctgtatggtaggcaggtatggaaattggggtttacaataaaccagctatatgctgctatgtcctcatgtggacactaggtggagctgcaactataagagtggctcttaggacccagaacaggacagagagccccggaccccctcaactttagcccttgaactgggctggcagtggtgttggctagaattgaattgtatgatatggagtaataagtatccttagtgaccacccagactaccagacactgcaccgtcagaagcattcaaaccagagtgactccatcttgaacaggggctgtgggtaaaatgaggctgagacctgctgggctgcattccccggaggttaggcattcaaagtcacaggaggagacaggagataggcacaagatacagatcacaaagatcacactgataaaacaggatgcaataaagaaactgccagaacccgccaaaaccaagatgatgacgaaagtgacctctggttgtcctcactgttcattattcactaactataatacattagttgctaaaagacactcccagcagcgcgtgacagttcacaagtgccatggcaacgtacggaaattaccctatatggtcgaaaaggaagaggaaccctcagttccaggaaattcccaccccattcctggaaaactcataaataatccactccttatttaccgtatgatcaagaaataaccataagtctactgagtcgagcagcccgtgctgctggggtagccccttttttattcatttactttcttaataaacttgctatcactttgtcagcttacttttgaattcctgcatgaagccaggaatccatgtggcctcccaggctgaaccctgtgacagcaccacacacatccctcacatcaacctgaaaacgaggcagggcatggaggacttcttttttttttttttttttttttccgagacagagtctcgttccgtcgcccaggctggagtgcagtggtgtgatcttcgctcactgcaacctccgcctcccgcgttcaagtgattctcctgcctcagcctcccgagtagctgggattacaggcatgtgccagcacacctggctgatttttgtatttttcgtagagatagcgtttcaccatgttggccaggctggtctcaaactcttgacctcgggtgatccacctgcctcggcctcccaaagtgccgggattacaggcgtgaaccactgcccctagccaaggatgacttcttgagtttacagaagaggaaacaggcccatagaggctctgtcacccaactaaacagtgaaggcacaaagcctggacccagtgggcctcacatcaaggcctcctgacctcaccagcccagaacccagggctccaaagtgcatccttcaggatctgctcacaagtttccctcccctgtgcacccccggcccccgactacgcccatcaccagggtgaggggtgcggaaatgaatcgcacccttcaccctgcagaggtgggctctgagcagcccctctgggaagggtccccacggatcccagtgagatagaagcctggcaaaggaacacgtgttttttttttctctctctcttttccagacatgtattttaattttttaaaaaagctttgctctgataaaaatagtgcatgctcattataagaaattcaagtaacaccgaagagtaccaaaaacaaaaatttcaagtggtccggaaatccagcaccccagaaataatcatggctgacacccaggaaacatggatggagacatctctctacgcacatattcaaaggagtttttttaaccaaaatgggctcatacaatacatactctttttagaaaaagtgccatacttaaatttaacagaacaaaaggcaacttaaatgtaactaaagaaattaccaagctgcaaataatgacgctgcttcttctggttctaaattatttctctaaaggaaagaaaaatattaagcagctggattcattctttcagcatgtttcaactatagatggcatctcttgacaacctacgatttaggataaggaaatgagctcaccaccacttcctagctccttccccctcccaaattttgtgagttcgtgtttttacattgtcaaggtttatactacttacatcctgtcctgtaaccatcgttcccaccattgtttggcctgttgtgtgtgtatggattccctgttccaccgcctgtccttctagaatgggtttttccattcttgggttattttccttcacctcatggctaccttgactttgtcatcaaggagtcttttcaaggtctgagttggtcacagtcacagggatgtcactgctggactgcaaggttggagactgaactctgaaatgggagtgagtgggctatataactgactcaggctcgatggaatttacaggaaagggacaaagcactgtaccctccattacgatgacttgctaaaaaccactgtgtcttgaacttgtatctggtgacacagagttgaagttttagaatttggaaataaaatgactggggtggggtcccaagtactgtgttcaaggaaaggacatgccaggctgcgggacctcaatgcctcctccccatcaaccctttgacagctgtgccctatcccaccttggaggccaaagcaactccctcctgggtgctaatgcgtcatgttgacttctgattaaccccacttccaggaatgcctttaagatttctacttttatctactgttaagagcacacacttactgtaaatatgttattataaacactgtaaatctgtatcataaaactgtggtgctgtaaacactataaatatgttatcataaccctatggtatatatgccctgggtctcgggggggcaacaatgtggggatccaccatctcctggctgcccgagacatggcttttgtttctaagtccctattaaatgttcctaagcaactggatttgtcagcctctgtgttcagcctctcagctccctcggcctttgggattaggtttgcatacacctgctcaccgtgcaacacccatcttcacttagaaaaatctaacttctccttccaggcctaggtcaagtgacacctcctctgtgaagccttctgtgaggtttggattctcatttgcaaatatttacttccctcccctcctactgtgggatctctaggctctacccccccatttttaaaaagatttcccatccgtctaggtgtctcccatctacttgacccccaagcccagaaaacaggcacccgcagacctaatggcaggccttgccagctgcccccaagcccctttgccctcgggctcggctacgtgatttgctttggccggtgacatgctggagatacgaccaaacagcaaagccttgacatggggtcaggaggccttggagcccggcccactgggttcaggcccttgcaccttgacatgggctcggtgacacggctcaccctcttgtgcttctgccattgccactagcacagctactccctgggtagcccattggtcccagaagaatgagagacaggacagaccttaaccaaacccatgcccaggagccatctagccaggtccggctgaaatcggcagggctgccccagaaatctacagacacgtgagccaaagataaacgctgagagtagtaagccactgaattatggccatttgttacacagcatatatgtgacaacagttgactgatacaccacctctgttcatttccctttgtgcttgagttgcacttgatttccacggctttacttttttttttttttttttttttttgagactgagtctcgctctgccacccaggctggagtgcagtagtgcaatctcagctcaccgcaagttccacctcccaggttcacgccattctccttcctcagcctcccgagtagctgggactacaggcgcccgccaccacgcctggctaattttttttttttttttttggtacttttagtagagacagggtttcaccatgttagccaggatggtctcaatctcctgacctcgtgatccacccacctcggcctcccaaagtgctgggattacaggcgtgagccaccatgcctggccagctttactgttttaactgtagagctgattttgtggtagagcgtttgccttcccactggtctataagaaacgtgacataaggactacgtctgattcgattctgactccccagcacccaattaaatggcagccaatgtcattcttttttttggaaacaaggtcttgctctgctgcccaggctggaatgcagtggcatgatcttggctcactgcaacctctgcttcccaagtaactggaattaccagcacgtaccccaacacccagctaatttttgtatttttagtagagtcagggtttcgccctgttggccaggcttgacttcccggcctcaagtaatctgcccgccttggcctcccaaagtgattacaggtgtgagccaccacacccggccaatgccattcttttcatcctttccatctgtacctttccaggacagcccagtccgggtggagaggcaaaggtctctgtttccggaaggcccagtctggatggagaggcaaaggtctctgtttccaggacttacctgcaagtttgggcaagaaagttcaaaagccctgagctttggttcccatgactgtccatatggctcatttgcagcgactcctggactcctgtttctcccccattcaagcttcagattcctaggagagaacactgacccagccagcatgacatggggaccgggttacactggcctggcttttggaaggagaggggcccggcagccacagcttgcgtggcttcgtttgcagccagtaagacggtctctgggaggttgcagaggttgttagagggaagcagcgcttatatagaagccagctgaggaggatcccgtactttaaacaagccaggctttgagcaggtgaggataggaatcatatcaggttagtcctgggga

SEQ ID NO: 1934 - DNA, 5022 bp, Homo sapiens
gattatttgtcattattttatggttattataaagaaatagttccatatactactttatttaccttgacccaaggcccactaatgtataataagtaaaactgtaaaatcggtcctttcatctcctgttgttatcagttgttcttgagggtgagtgtcaatttcatggttggaggccaactcttcttcccttctctctgcagccgtcatttcaccaagctgataatgttcggggaacccgccatcacgggctggtggagaggccatccaggaaccgcttccaccccctccaccgaaggtctggggacaagccagggcgacaatttgatggtagtgcttttggagccaattattcctcacagcctctggatgagagttggccaaggcagcagcctccttggaaagacgaaaagcatcctgggttcaggctgacatctgcacttaacaggaccaattctgattctgctcttcacacgagtgctctgagtaccaagccccaggacccctatggaggagggggccagtcggcctggcctgccccatacatgggtttctgtgatggtgagaataatggacatggggaagtagcatctttccctggcccattgaaagaagagaatctgttaaatgttccgaagccactgccaaaacaactgtgggagaccaaggagattcagtccctgtcaggacgccctcgatcctgtgatgttggaggtggcaatgcttttccacataatggtcaaaacctaggcctctcacccttcttggggaccttgaacactggagggtcattgccagatctaaccaacctccactactcgacacccctgccagcctccctggacaccaccgaccaccactttggcagtatgagtgtggggaatagtgtgaacaacatcccagctgctatgacccacctgggtataagaagctcctctggtctccagagttctcggagtaacccctccatccaagccacgctcaataagactgtgctttcctcttccttaaataaccacccacagacatctgttcccaacgcatctgctcttcacccttcgctccgtctgttttcccttagcaacccatctctttccaccacaaacctgagcggcccgtctcggcgtcggcagcctcccgtcagccctctcacgctttctcctggccctgaagcacatcaaggtttcagcagacagctgtcttcaaccagcccactggccccatatcctacctcccagatggtgtcctcagaccgaagccaactttcctttctgcccacagaagctcaagcccaggtgtcgccgccacccccttaccctgcaccccaggagctcacccagcccctcctgcagcagccccgcgcccctgaggcccctgcccagcagccccaggcagcctcctcactgccacagtcagactttcagcttctcccggcccagggctcatctttgaccaacttcttcccagatgtgggttttgaccagcagtccatgaggccaggccctgcctttcctcaacaggtgcctctggtgcaacaaggttcccgagaactgcaggactcttttcatttgagaccaagcccgtattccaactgcgggagtctcccgaacaccatcctgccagaagactccagcaccagcctgttcaaagacctcaacagtgcgctggcaggcctgcctgaggtcagcctgaacgtggacactccatttccactggaagaggagctgcagattgaacccctgagcctggacggactcaacatgttaagtgactccagcatgggcctgctggacccctctgttgaagagacgtttcgagctgacagactgtgaacagaaggcagtggaacagaagaatgtttttctgcaacagccaaaatagaatggaatagaatgaagccagctgataccacgggctttcgttatcttgacatagaaggaagcaatgccacggctccagggtttcagatgagatcccatctcagacactgtggcttcctccagatcacacagctttgtactgcctctcccgcctgtggccaaagtcgtgttgcagcaggcaggctgcttggagcttcccatgaactggaaagctcacctccactgcatctttttactggccatccagtcagccgatgtgtaagagtaggaaatactgtgtcactggaggcctccgtagcattgtgtagtgtgctcagaaccactgatctccgtccgcaccgaaggcgggcccggagtgggaggctcggcctggggcggcggcaccggagagggcacctcgatgcctgctctgacctgacccagagggcgaggccctccagcgggggacattcccaggctgagtggaccccacggctctctcccacgcctggattacgacatgaagtttttaccacaagcccgagggcaggcttgagttaggcagactgaaggctaattttcattttctcccagctggtttctgctgcttcagaaaagtacaccttttccttatggaccagaggaagaggaagaccattttatcagtcactgaaaagagtcccctggcactgatgagcctgaagagaactgtgctcctcctcgggggctggggaaggaagacagggactgcaggtgtctcatactcagtggcctccagacaaactccagacaagcacagacctccccactaagagcagccagagggagctggtgaggccctaaccccacccaccgagcaactgagcttccccatccctccccagagctgtgtctctgtgggctgggagtctaatgtcacccccctagaccgtaagctccttgagggcagggacagtgccttatcattgttgaacccgtagcacctaacacgtgcgtggcagcacagtcgtgtgctggagtgagtgctgcagaaccgtgcgtgcagcgcatgatgaatgagtgcgtccgccatgccgtaaggcaggctcacctgtagctatccccttccctgccagatcttctcagagctttagcttttctagcactcgtgcctatggtgaagcatgcactttaatatgcttttaacactaggtgaccaaatcacagtgaagccgggcactgcattctccttgggctgtgctccacgcgggtgggtgggagctgtcttctgagtacatccggaagggctgagcaggtgagtgccctgagcatcctggctgggccccacccaggaagatcttccttctcagatccacgtttggctctaaattgcttcaagtagagattcattctttgaggttgaaaaaatagtttatagtaaaacgaaggcctaattcatggaagcatcattagtcatcaataccttctcataaaatagatgggccagatttccaccaccgcctgcctcctctaacttgggtgatgccagtaggtttgaagggggcagagcactgcagggggaggggggggtctaggctgtgagaggacagggtggagaggaggagaaccctgaaggagagacggaagatgccaggacctttgcttggacagccattgcccttccaggagaccctggagtgtactgagggttgctggactgttccacccagaggagcaaggctgtacaatgagggtctgaatctggcacacctgtcccttatgtaaaaggagtcgtggtcacaagaccctgggctggttagcctctcccgacctcattccatttctatcttctgaccttgcctctcatctttaaaataaccctcatggggtgcccctccaccttcctctggaatccaagtattcctgtttcacatttgccccaaatctttgctgtggaattgggaaatcaaaccagagtcctcctcgcctgatttccagctcaggaagggcctgctggcctgccctgttcccagttacactttcagatccctttgtgctcaagatctcagagggggtggctttttgttaaagagccttcagtcgcaatgctacccagcaccccatgtgccaaaagaaaccagctcctgtgtcaaagggcttccaaacctgatctcactctcaacaggcgatggtgctgatgtttcaagaattgtgtttttataaaacagaggtctcagcatagtcactcttcacatagtgccttacccatgggtatcgtcatatccgggtcccagttcagtttgtctgcacagcagccaccctgcctggcaacagagaccccaagacctacacagtgaaccctactgccccaaaggcgttctccaggtgacttgtgaaaacagacctccggggaagtgatttattgggggtgtacactgggggcaatatggtttagcactgaattcaatttgtccttaggtctatgagtgagtccgatcttttcttgtgaaaggttttgggcatcgtacaacccactctgcctagaaggtgtggaggactcaccacgggcagggtcgccctggcccacagcacgtgagcctgcactcactgcggcctttgtaacaaaaccagttgtggtcctcagcatttgaagcagctgcatacttcagagtaaactatttttcattatttagttttgtcacaagaaatcgaccattgtactactctcacttacagcagttaaacagcatagaactaaaaacctgtctgcatttccattttttctttctgtatggttgtgggttttaggacatagggggttaggagaaggggtttcttgatcatgtcatgaattctcctttgtcctgtttctcctgtttcatttctcctccgcctgctgtatattacctgagctggtgttgtatcttcaagtccatatgcgtatttgcagacctttcctgttcccactcttgttggctcttctgatttatgcacagatggttcccagcatgtgtccagtgcttcatggatgggaccatcccagcaactaatcagacttcctgccagtgtcctaacccccagggcaccctgttcaaccatatttaaaaattggaatttgtataaagttgcttccaagttttataatgcatcattttacatcttttgtaattaaaagcatcacaatgag

SEQ ID NO: 1935 - protein, 424 aa, Homo sapiens
MGFCDGENNGHGEVASFPGPLKEENLLNVPKPLPKQLWETKEIQSLSGRPRSCDVGGGNAFPHNGQNLGLSPFLGTLNTGGSLPDLTNLHYSTPLPASLDTTDHHFGSMSVGNSVNNIPAAMTHLGIRSSSGLQSSRSNPSIQATLNKTVLSSSLNNHPQTSVPNASALHPSLRLFSLSNPSLSTTNLSGPSRRRQPPVSPLTLSPGPEAHQGFSRQLSSTSPLAPYPTSQMVSSDRSQLSFLPTEAQAQVSPPPPYPAPQELTQPLLQQPRAPEAPAQQPQAASSLPQSDFQLLPAQGSSLTNFFPDVGFDQQSMRPGPAFPQQVPLVQQGSRELQDSFHLRPSPYSNCGSLPNTILPEDSSTSLFKDLNSAGLPEVSLNVDTPFPLEEELQIEPLSLDQMLSDSSMGLLDPSVEETFRADRL

SEQ ID NO: 1936 - DNA, 5035 bp, Homo sapiens
gattatttgtcattattttatggttattataaagaaatagttccatatactactttatttaccttgacccaaggcccactaatgtataataagtaaaactgtaaaatcggtcctttcatctcctgttgttatcagttgttcttgagggtgagtgtcaatttcatggttggaggccaactcttcttcccttctctctgcagccgtcatttcaccaagctgataatgttcggggaacccgccatcacgggctggtggagaggccatccaggaaccgcttccaccccctccaccgaaggtctggggacaagccagggcgacaatttgatggtagtgcttttggagccaattattcctcacagcctctggatgagagttggccaaggcagcagcctccttggaaagacgaaaagcatcctgggttcaggctgacatctgcacttaacaggaccaattctgattctgctcttcacacgagtgctctgagtaccaagccccaggacccctatggaggagggggccagtcggcctggcctgccccatacatgggtttctgtgatggtgagaataatggacatggggaagtagcatctttccctggcccattgaaagaagagaatctgttaaatgttccgaagccactgccaaaacaactgtgggagaccaaggagattcagtccctgtcaggacgccctcgatcctgtgatgttggaggtggcaatgcttttccacataatggtcaaaacctaggcctctcacccttcttggggaccttgaacactggagggtcattgccagatctaaccaacctccactactcgacacccctgccagcctccctggacaccaccgaccaccactttggcagtatgagtgtggggaatagtgtgaacaacatcccagctgctatgacccacctgggtataagaagctcctctggtctccagagttctcggagtaacccctccatccaagccacgctcaataagactgtgctttcctcttccttaaataaccacccacagacatctgttcccaacgcatctgctcttcacccttcgctccgtctgttttcccttagcaacccatctctttccaccacaaacctgagcggcccgtctcggcgtcggcagcctcccgtcagccctctcacgctttctcctggccctgaagcacatcaaggtttcagcagacagctgtcttcaaccagcccactggccccatatcctacctcccagatggtgtcctcagaccgaagccaactttcctttctgcccacagaagctcaagcccaggtgtcgccgccacccccttaccctgcaccccaggagctcacccagcccctcctgcagcagccccgcgcccctgaggcccctgcccagcagccccaggcagcctcctcactgccacagtcagactttcagcttctcccggcccagggctcatctttgaccaacttcttcccagatgtgggttttgaccagcagtccatgaggccaggccctgcctttcctcaacaggtgcctctggtgcaacaaggttcccgagaactgcaggactcttttcatttgagaccaagcccgtattccaactgcgggagtctcccgaacaccatcctgccagactccagcaccagcctgttcaaagacctcaacagtgcgctggcaggcctgcctgaggtcagcctgaacgtggacactccatttccactggaagaggagctgcagattgaacccctgagcctggacggactcaacatgttaagtgactccagcatgggcctgctggacccctctgttgaagagacgtttcgagctgacagactgtgaacagaaggcagtggaacagaagaatgtttttctgcaacagccaaaatagaatggaatagaatgaagccagctgataccacgggctttcgttatcttgacatagaaggaagcaatgccacggctccagggtttcagatgagatcccatctcagacactgtggcttcctccagatcacacagctttgtactgcctctcccgcctgtggccaaagtcgtgttgcagcaggcaggctgcttggagcttcccatgaactggaaagctcacctccactgcatctttttactggccatccagtcagccgatgtgtaagagtaggaaatactgtgtcactggaggcctccgtagcattgtgtagtgtgctcagaaccactgatctccgtccgcaccgaaggcgggcccggagtgggaggctcggcctggggcggcggcaccggagagggcacctcgatgcctgctctgacctgacccagagggcgaggccctccagcgggggacattcccaggctgagtggaccccacggctctctcccacgcctggattacgacatgaagtttttaccacaagcccgagggcaggcttgagttaggcagactgaaggctaattttcattttctcccagctggtttctgctgcttcagaaaagtacaccttttccttatggaccagaggaagaggaagaccattttatcagtcactgaaaagagtcccctggcactgatgagcctgaagagaactgtgctcctcctcgggggctggggaaggaagacagggactgcaggtgtctcatactcagtggcctccagacaaactccagacaagcacagacctccccactaagagcagccagagggagctggtgaggccctaaccccacccaccgagcaactgagcttccccatccctccccagagctgtgtctctgtgggctgggagtctaatgtcacccccctagaccgtaagctccttgagggcagggacagtgccttatcattgttgaacccgtagcacctaacacgtgcgtggcagcacagtcgtgtgctggagtgagtgctgcagaaccgtgcgtgcagcgcatgatgaatgagtgcgtccgccatgccgtaaggcaggctcacctgtagctatccccttccctgccagatcttctcagagctttagcttttctagcactcgtgcctatggtgaagcatgcactttaatatgcttttaacactaggtgaccaaatcacagtgaagccgggcactgcattctccttgggctgtgctccacgcgggtgggtgggagctgtcttctgagtacatccggaagggctgagcaggtgagtgccctgagcatcctggctgggccccacccaggaagatcttccttctcagatccacgtttggctctaaattgcttcaagtagagattcattctttgaggttgaaaaaatagtttatagtaaaacgaaggcctaattcatggaagcatcattagtcatcaataccttctcataaaatagatgggccagatttccaccaccgcctgcctcctctaacttgggtgatgccagtaggtttgaagggggcagagcactgcagggggaggggggggtctaggctgtgagaggacagggtggagaggaggagaaccctgaaggagagacggaagatgccaggacctttgcttggacagccattgcccttccaggagaccctggagtgtactgagggttgctggactgttccacccagaggagcaaggctgtacaatgagggtctgaatctggcacacctgtcccttatgtaaaaggagtcgtggtcacaagaccctgggctggttagcctctcccgacctcattccatttctatcttctgaccttgcctctcatctttaaaataaccctcatggggtgcccctccaccttcctctggaatccaagtattcctgtttcacatttgccccaaatctttgctgtggaattgggaaatcaaaccagagtcctcctcgcctgatttccagctcaggaagggcctgctggcctgccctgttcccagttacactttcagatccctttgtgctcaagatctcagagggggtggctttttgttaaagagccttcagtcgcaatgctacccagcaccccatgtgccaaaagaaaccagctcctgtgtcaaagggcttccaaacctgatctcactctcaacaggcgatggtgctgatgtttcaagaattgtgtttttataaaacagaggtctcagcatagtcactcttcacatagtgccttacccatgggtatcgtcatatccgggtcccagttcagtttgtctgcacagcagccaccctgcctggcaacagagaccccaagacctacacagtgaaccctactgccccaaaggcgttctccaggtgacttgtgaaaacagacctccggggaagtgatttattgggggtgtacactgggggcaatatggtttagcactgaattcaatttgtccttaggtctatgagtgagtccgatcttttcttgtgaaaggttttgggcatcgtacaacccactctgcctagaaggtgtggaggactcaccacgggcagggtcgccctggcccacagcacgtgagcctgcactcactgcggcctttgtaacaaaaccagttgtggtcctcagcatttgaagcagctgcatacttcagagtaaactatttttcattatttagttttgtcacaagaaatcgaccattgtactactctcacttacagcagttaaacagcatagaactaaaaacctgtctgcatttccattttttctttctgtatggttgtgggttttaggacatagggggttaggagaaggggtttcttgatcatgtcatgaattctcctttgtcctgtttctcctgtttcatttctcctccgcctgctgtatattacctgagctggtgttgtatcttcaagtccatatgcgtatttgcagacctttcctgttcccactcttgttggctcttctgatttatgcacagatggttcccagcatgtgtccagtgcttcatggatgggaccatcccagcaactaatcagacttcctgccagtgtcctaacccccagggcaccctgttcaaccatatttaaaaattggaatttgtataaagttgcttccaagttttataatgcatcattttacatcttttgtaattaaaagcatcacaatgaggttgtctctgcatttg

SEQ ID NO: 1937 - protein, 423 aa, Homo sapiens
MGFCDGENNGHGEVASFPGPLKEENLLNVPKPLPKQLWETKEIQSLSGRPRSCDVGGGNAFPHNGQNLGLSPFLGTLNTGGSLPDLTNLHYSTPLPASLDTTDHHFGSMSVGNSVNNIPAAMTHLGIRSSSGLQSSRSNPSIQATLNKTVLSSSLNNHPQTSVPNASALHPSLRLFSLSNPSLSTTNLSGPSRRRQPPVSPLTLSPGPEAHQGFSRQLSSTSPLAPYPTSQMVSSDRSQLSFLPTEAQAQVSPPPPYPAPQELTQPLLQQPRAPEAPAQQPQAASSLPQSDFQLLPAQGSSLTNFFPDVGFDQQSMRPGPAFPQQVPLVQQGSRELQDSFHLRPSPYSNCGSLPNTILPDSSTSLFKDLNSAGLPEVSLNVDTPFPLEEELQIEPLSLDQMLSDSSMGLLDPSVEETFRADRL

SEQ ID NO: 1938 - DNA, 4453 bp, Homo sapiens
tagcatctttccctggcccattgaaagaagagaatctgttaaatgttccgaagccactgccaaaacaactgtgggagaccaaggagattcagtccctgtcaggacgccctcgatcctgtgatgttggaggtggcaatgcttttccacataatggtcaaaacctaggcctctcacccttcttggggaccttgaacactggagggtcattgccagatctaaccaacctccactactcgacacccctgccagcctccctggacaccaccgaccaccactttggcagtatgagtgtggggaatagtgtgaacaacatcccagctgctatgacccacctgggtataagaagctcctctggtctccagagttctcggagtaacccctccatccaagccacgctcaataagactgtgctttcctcttccttaaataaccacccacagacatctgttcccaacgcatctgctcttcacccttcgctccgtctgttttcccttagcaacccatctctttccaccacaaacctgagcggcccgtctcggcgtcggcagcctcccgtcagccctctcacgctttctcctggccctgaagcacatcaaggtttcagcagacagctgtcttcaaccagcccactggccccatatcctacctcccagatggtgtcctcagaccgaagccaactttcctttctgcccacagaagctcaagcccaggtgtcgccgccacccccttaccctgcaccccaggagctcacccagcccctcctgcagcagccccgcgcccctgaggcccctgcccagcagccccaggcagcctcctcactgccacagtcagactttcagcttctcccggcccagggctcatctttgaccaacttcttcccagatgtgggttttgaccagcagtccatgaggccaggccctgcctttcctcaacaggtgcctctggtgcaacaaggttcccgagaactgcaggactcttttcatttgagaccaagcccgtattccaactgcgggagtctcccgaacaccatcctgccagactccagcaccagcctgttcaaagacctcaacagtgcgctggcaggcctgcctgaggtcagcctgaacgtggacactccatttccactggaagaggagctgcagattgaacccctgagcctggacggactcaacatgttaagtgactccagcatgggcctgctggacccctctgttgaagagacgtttcgagctgacagactgtgaacagaaggcagtggaacagaagaatgtttttctgcaacagccaaaatagaatggaatagaatgaagccagctgataccacgggctttcgttatcttgacatagaaggaagcaatgccacggctccagggtttcagatgagatcccatctcagacactgtggcttcctccagatcacacagctttgtactgcctctcccgcctgtggccaaagtcgtgttgcagcaggcaggctgcttggagcttcccatgaactggaaagctcacctccactgcatctttttactggccatccagtcagccgatgtgtaagagtaggaaatactgtgtcactggaggcctccgtagcattgtgtagtgtgctcagaaccactgatctccgtccgcaccgaaggcgggcccggagtgggaggctcggcctggggcggcggcaccggagagggcacctcgatgcctgctctgacctgacccagagggcgaggccctccagcgggggacattcccaggctgagtggaccccacggctctctcccacgcctggattacgacatgaagtttttaccacaagcccgagggcaggcttgagttaggcagactgaaggctaattttcattttctcccagctggtttctgctgcttcagaaaagtacaccttttccttatggaccagaggaagaggaagaccattttatcagtcactgaaaagagtcccctggcactgatgagcctgaagagaactgtgctcctcctcgggggctggggaaggaagacagggactgcaggtgtctcatactcagtggcctccagacaaactccagacaagcacagacctccccactaagagcagccagagggagctggtgaggccctaaccccacccaccgagcaactgagcttccccatccctccccagagctgtgtctctgtgggctgggagtctaatgtcacccccctagaccgtaagctccttgagggcagggacagtgccttatcattgttgaacccgtagcacctaacacgtgcgtggcagcacagtcgtgtgctggagtgagtgctgcagaaccgtgcgtgcagcgcatgatgaatgagtgcgtccgccatgccgtaaggcaggctcacctgtagctatccccttccctgccagatcttctcagagctttagcttttctagcactcgtgcctatggtgaagcatgcactttaatatgcttttaacactaggtgaccaaatcacagtgaagccgggcactgcattctccttgggctgtgctccacgcgggtgggtgggagctgtcttctgagtacatccggaagggctgagcaggtgagtgccctgagcatcctggctgggccccacccaggaagatcttccttctcagatccacgtttggctctaaattgcttcaagtagagattcattctttgaggttgaaaaaatagtttatagtaaaacgaaggcctaattcatggaagcatcattagtcatcaataccttctcataaaatagatgggccagatttccaccaccgcctgcctcctctaacttgggtgatgccagtaggtttgaagggggcagagcactgcagggggaggggggggtctaggctgtgagaggacagggtggagaggaggagaaccctgaaggagagacggaagatgccaggacctttgcttggacagccattgcccttccaggagaccctggagtgtactgagggttgctggactgttccacccagaggagcaaggctgtacaatgagggtctgaatctggcacacctgtcccttatgtaaaaggagtcgtggtcacaagaccctgggctggttagcctctcccgacctcattccatttctatcttctgaccttgcctctcatctttaaaataaccctcatggggtgcccctccaccttcctctggaatccaagtattcctgtttcacatttgccccaaatctttgctgtggaattgggaaatcaaaccagagtcctcctcgcctgatttccagctcaggaagggcctgctggcctgccctgttcccagttacactttcagatccctttgtgctcaagatctcagagggggtggctttttgttaaagagccttcagtcgcaatgctacccagcaccccatgtgccaaaagaaaccagctcctgtgtcaaagggcttccaaacctgatctcactctcaacaggcgatggtgctgatgtttcaagaattgtgtttttataaaacagaggtctcagcatagtcactcttcacatagtgccttacccatgggtatcgtcatatccgggtcccagttcagtttgtctgcacagcagccaccctgcctggcaacagagaccccaagacctacacagtgaaccctactgccccaaaggcgttctccaggtgacttgtgaaaacagacctccggggaagtgatttattgggggtgtacactgggggcaatatggtttagcactgaattcaatttgtccttaggtctatgagtgagtccgatcttttcttgtgaaaggttttgggcatcgtacaacccactctgcctagaaggtgtggaggactcaccacgggcagggtcgccctggcccacagcacgtgagcctgcactcactgcggcctttgtaacaaaaccagttgtggtcctcagcatttgaagcagctgcatacttcagagtaaactatttttcattatttagttttgtcacaagaaatcgaccattgtactactctcacttacagcagttaaacagcatagaactaaaaacctgtctgcatttccattttttctttctgtatggttgtgggttttaggacatagggggttaggagaaggggtttcttgatcatgtcatgaattctcctttgtcctgtttctcctgtttcatttctcctccgcctgctgtatattacctgagctggtgttgtatcttcaagtccatatgcgtatttgcagacctttcctgttcccactcttgttggctcttctgatttatgcacagatggttcccagcatgtgtccagtgcttcatggatgggaccatcccagcaactaatcagacttcctgccagtgtcctaacccccagggcaccctgttcaaccatatttaaaaattggaatttgtataaagttgcttccaagttttataatgcatcattttacatcttttgtaattaaaagcatcacaatgaggttgtctctgcatttg

SEQ ID NO: 1939 - protein, 315 aa, Homo sapiens
MSVGNSVNNIPAAMTHLGIRSSSGLQSSRSNPSIQATLNKTVLSSSLNNHPQTSVPNASALHPSLRLFSLSNPSLSTTNLSGPSRRRQPPVSPLTLSPGPEAHQGFSRQLSSTSPLAPYPTSQMVSSDRSQLSFLPTEAQAQVSPPPPYPAPQELTQPLLQQPRAPEAPAQQPQAASSLPQSDFQLLPAQGSSLTNFFPDVGFDQQSMRPGPAFPQQVPLVQQGSRELQDSFHLRPSPYSNCGSLPNTILPDSSTSLFKDLNSAGLPEVSLNVDTPFPLEEELQIEPLSLDQMLSDSSMGLLDPSVEETFRADRL

SEQ ID NO: 1940 - DNA, 91942 bp, Mus musculus
  misc_feature (1)...(91942): n = A, C, G or T/U
gagcacttgctgttcttgcagaggaccccagtttggttctcagcacccacactgggtggctcacaattctctagaactccagtttcaggaggatctgatgtcctcttgtgacctgttggttctgcatgtacacagtgtaaaaagatttgcaaaatgagtagaccagagcacatccaggctagcacgcaggactggacaggaaggttcctcggcttttagtctgatgctggtggtgactatcttttcccccactggctgggatctgaccttgaagtctgtctctatttggtttgtttaaaaagaaccagtgcaaagaaaatgaaggaaagagggttcacttacttatttcatataagcaaaagttttattgtgtgtggcagaaacatttccatgtatgtcttacaaggtgggagagataaaatgatctgaataccttgtcaataagttttactcttcaaggcagaaaagactaatatgtaatgtttcttacacttaaaaaagataaggacttgggagaagggaaaggacaaaggcattgctggtggagtgagaatggaggggtgctggagagggggaaggtgcgaggcctgttacagaaagcttaggcaaggtgctgggctatatgcccatgtactgctttctcaggttcaactcgccatctgctcatcaatgccatgattcactgttctgaacagattccaagctcccaaggtcgtaggctccactgtcaatctcattgtgatctgctggaataactgctattaccactgatgcctcgtgatgtgttggggtaggccatgcgtgcatgcacatgtgtgtgtgtgtttgcacgtactcaattgaacactatttggttcatttccttcccacaaccaagtctcaatgcatactccctgggctcaccataagcctctgttcctctattatggtaaccttcagtgagggatggatttgaactactgaccttaaagtgacaagcttaagcccacagcatcacaacaaagccttttcaactcaagaggagcctgacctgatcttcactagcgcattcaggaaacaacggtgtactctggggtttgccaggggaagaccttaattggaactgacaagaaaaaggacaccttctaccatttctctgcagacttcacatgttctcagcacttcttgaaagagaatatgcctccaagcttttcctccagctggctcgagtgcagcctttttttttttttttttttttttttttttttgcatttcatctctggcaagtcacagcataacgccacaagcagctggaaactctctgaggtgaagacaagctggatattatgtttggatttatcatcccctcccccatggtagctgattttcacatctgacagggttattatttccatctttaggaaccaccttggacctcgccttggataattgcagactctcatcagtctctcgcctgaggcattttagcacttgtgagaacctcaagaaaaaaaaatcctttttttttttttcttttttccctaaaatgaagtagggtgaaaaactcaatgtgtgagactatatctttgtttctattttcatttgcaatcctccttggctgtcagataatcaagccgttaatcaatgtcaagtcatggtctagagtacagacagtgcgttgccacttgagtccactgtggcttcaatggcaatgacttgtgttactaagtccggtactctgtcatgaggtagagtggaagtcacagacatagaaactgttagggcagagatagcaccttggtgaccatctaaggttttcctccatggctgtacatcagtcttctgatatttcagagtgttacccacattattccgaccagcactcccagcggaggactactaagacttaacatcccccattttactttttgaggttgctaatatttatgtcctttgcctcaagctcttggatatttgggggctggtgttagcttagtagaatgcttgcctagtgtacatgaagtcctgagttagatctccagtatcacataaggctgggcacagtgccatgaatgtaatatcatcactcaggaagtagagacaggaagaccagtggttcaaggtcattctcacctttgtagcaagatcaaagctagatagactgagaccctatcttaaaaccaaaccaaaatgaaaccatatgactgcaagccagagatggtggctcaagcctgaagtctcagtactcaaaaggctgaggcagggggatcaggaggtcaagattattctcagctacatatttagtttgaggctagccttgttgaactggaactatgtagaccaggctgtcctcgaactcagagatccacatgcctcagcctctcaagtataaggtgtaaactgctatgcaggacctcagcagatatatatatatatatatattggagcctgtggctgctctgttatgtggcttgcttgcatattagccctttctcttttaactcttcttctgcacacagatcattgtgggttttaaatttaatatccatccatctaggacaacagtatcatactgatacagtaagaaaagcatttgttttaaagagttggaacggagtttaaatttgtgtgtgattgttaacaatttgtactttccaactatggctaatactcctgccaagtcctactcacattgcaaattcatgagtgaaaataaatcttactgtttttaccaaaaatttttgtggtgatgttatgtagtagttgatctgcaggtcaaattttgggactcaagagtaagatgttataccagaactttaagtatggtttggggactggtcttagtgctgacctaatggcttcaaaaaggctgtcagcagaagcctgaggtttctacagcacggcatctgtgagagcataaaggaagtgaggaaactcttcctggaagtgggatgaatgtgaatcttaagtacagtagaagaaactttagtggttactagggatggaagggaaactgaaaggtacctaacacgctgggataatctaactgatgttttccaagcggctttacaagtactacccggctccctgagaaagtaaagaagaacccatcaagaccaagagacctggcccaggtaattgttaaaataaagaggttttgtttttcattcctagtttttccagatgccaaatgatgttaaaatgaaacagcttgcaggtggagatgaaatccagtaacaaagtctaaagatgaatctaagggtgtgactataaaaccctctatacagagctgagattcaccatggtgcttcaacagacaacagtccttttaacatcttaacagtatacttcaacatctttacaaacaatagaagctcagggtggtggagcatacccgtaatcccaggaattgggaggcagaggcctcgggttgtattatggcttgtgctgctggtcctggctcttcgttttcttttttcccccgtttggaacagaagtttgtggttgccattctattctcgtttctgtcattgaccattagacaaacagaacagtttgctaccctgagagtaaatgtacctgagggaatgtagctagatcagattagggtgacaaaaacgtggtcctcaagagtaaggttaggctggcaagatggctcggagggtatcaatgtgttctacatatgcctgaggacctttgtctgacccccagaactcagggtgaagaggttactcccaaaagttgagttgtcctccatgtgtagcatgccagtacatatgcgtgaatatggtgcttatgcaagcacacacaagcaaacacacacgaggttcatttatttatttagttggagagagagagagagagagagagagagagagagagagagagagagagagagagagagagagaaagagagagaaagaagaagaagaagaagaagaagaagaagaagaagaagaagaagaagaagaagaagaagaagaagaaggagaagaaggagaagaagaagaggaggaggaggaggaggaggaggaagaggaggaggaggagaaaccagacacagaaatctgtgtctataatgaagagagactggaaattttgagtgaaggagtgagggtgtgtgggagggaagggatgtgattaattttggctggtaaccaggatgtaagtagttaggaccatggaagttggtattttcaaatatggccacagtgatcacccagctgccagttatcattcctgtaatcggaccacttgaggccgaagtaggaagactgctaagagatttaggccagcctggctatgtagtgggttccaggcaagcctgaagtatgagaccctttctcaaccttgcctgtcctcctccacccaaaatcacctagctaagtaacttgtgagtttttcagaaactaaaaactgaattaaaacaaaatatttattgtttcaagacactggggttcaagataatttattaagcacttaatggttaacaaactggtgaaaattatgtaaggctgaagactgtcttaggaggacaggacagagacaaaatggaaactggggagaagactgagtttgaaataaatgatgtggggttctgggtagaaagttaaaacagaaaacaggaagaggaagcagaattgaactggaagcctgcaaatgtcactgaagttgaacaggtttggtgagggtgaaggaataagaaacctggattaaaaagatttgtttgaatgtggaatagcttggtctctgattacaatggcacagcttggtagaatggagtggaagatttggcactgaagtgaggagctggccagcagcagcaatgatgaaagacttttataacggtgtaagagaagaggggacaatggggcagatgaagctggtgaagctggtgacagtagactgaccatcaaagctcctcagagtgacagactagacagggcagctttgcttgatggtgaaagctaagacgtcggggaactgtctggatgtgtggatgaatgctggctttcacttagttccagagaaggaagaagggacttgagggaggcagtgcacttgagctaagtgctagacaaacatgaagacagagcccagaggtggcagtggtctagaagaggttagaattgtaactatggtgggtctgctggcaaacaaccagagctttattttgttggtaactaggagaactgcttctgagagctaattttgacagctgaggcaggacagtggcatactgggcaacgttctgcatcatctcaggaagaagaggatttgcaaaatggcctagttcacagagtgctaagaccctgtctgttaaaaccaggaagccagctatttaggaaacagaagatacagagggtgaatggatgtagttgatgaagcagtggccagatgtcttactgtcctttctgaggccactctagattgcttgaagctgttggatactatttgattacagaaatgttaattataattatcacttaattaccttgttttctttcttttcagtattattccaattattccatagtttgctgattttggtctcaatagtccagttttcagtatatcccttggctgcattagactggcatactttaaggtaagtgtctaagggcaggatggcacagtggaaagtacagtaaccagaaggccagtcctgctgttacttctttagactcttttctccttaaatgtcgaagtgagccatgttgtggttggagagatggctcaccacttaagtcttgcagaggaccagaattcagttaactgaattctccagcttcaaggggttaaatgccctcttttggcctccactgacactgcactcatgtaaacaaacacagagtcacatacacataattaaaaagaaaatctcttcccatttttgattattttgtgtttgtgtgttttgtctgcatgcatgtatgtgaatcacatgtgtgtctggtgcctaagttcagaaaagggtaccagatcccccagatctggggttctagatagctgtgagccatcacatgggtactgggaagcaaactgtggtcctctacaagagtagcaagtgctctatactgctgagttacatctttattcccacggcaggcctctgatcttgcggaagtcaggtttaatgcttacttagctgcttagttaagcaaggaatagttaaggcaggtattctatctatccctaagcattctcccagactaggcaattgtgaccactaaggtctagcaggtcttacttcccccttgggagttaattctgaaatcatagctttgctactttactaatctcttatcttatgcatggtatttaacttgtaccttggtttttttttcagccacaaaatggctacttgatggctttttttagttgtcaacttcactacatctggaattaactaaaacccaagaggcttggtacacctgtgaaggatttttttcttaaccacatctctggaagttggaagacccacttttaatctggatcatttgaggtgggaagagctacctctaacctgggccataccttctgctagcagcttatataaaggacagggagaagaaagcttgctcttctagccagtctattccttcactggcattacagtcttcttccttgggattttagagtatatactgaagaccagctgagatatccacaatccagctgaacaatgactggattcctagaccttctgttggaagatagccattgttggagtagctggacttcagcctgtaagccattttaatgaatcccatctatataaatatatatacttaatttattcattctatcagttctgttcctctagagaaccatgagtaatatagttactatcaggttattgtattgattaaggaagctaatctatgaaaagcaactagaatagaaaaatctgtatgcatatagctattattttgtgcatcagacacacacacacacacaaaatgaatatatctggttggtccctcttcatagagagcttcttttctagccagggaattacaaatgaccataacttttttttttctttttctatttaacagggtaaatgtgggaataggggctggtgagataactcagtgattaagagcactgactgctcttctggaggtcatgagttcaaatcccagcaaccacatggtggctcataaccattcgtaatgagaaacaaattaaaacaaacaaacaaacaaacaaacaaacataaaacagcctatgggttggagcaagcagggctggagcaagagggagaagggaaggggggaaaggaaaaaaaaaagtataaattacttgtttaaaaaaaaagtgtggaaatagacatgggactggtagggctaggtaagttttatgcgatgtaagggagagctgtagttttgagtctgatgcttaagagaggacagtagggattttggttcatacctgtaatcctcaggagggtctcaagtttgaggcttgcctaggatacatggtaagaccttgactccaaacaacaacaaacaaaaaccaagtaatgaaaatggctaggagagggctggcaagatggctcagtggttaagagcgctgactgctcttccaaaggtccacttacatataataaataaataaattctttaaaaagaaaacggctaagagaaagggaaggtgtaaagtggtatgtagtgtcagcagcattgagacttgggagcttcttagaaacaggatctggccctatccccaaactacgaaattcaaaacttgcattttaccaggacctaccttcatgtgttcctgctaacattaaatcttgagaggtactactggctgaaggtagactctaggaccaagctgcctatatataacaggtagagttttctcattgtgtgtgtgtgtgtgtgtttgtacgttggagatcagaggaaacttctgtgaagccagttctcccactatcactggaggattgaattcaggtcatcaggcttgcaagacagacacacaacacttgttgaaccttctcgtcaaccccaggctgccaaaacttaaattcttgttttatcaatctacttatgtgggaccttagggatgctttttaacccgtaccaaggacctattatgtaagagatggagggtcaactctaataatctgtcacttatttttgacttactgtaaaagtttttgttgtcttaaaagatttactttcggtgtctgggtattttgcctgcgtggatatctgtatactacatgtgtccagtgcctaaggtactcctgtaactgaattaatggttgtgagccatatgggtgctgggaatagaacccagcttctctggaagagaggccagtgctcttaagcactgagccatttctccagctctttagagacagggctctactatgtgaaccctctcagttcaccagttcctgaacaactgtgctttcccatttatagagtggtgaagcttaattacgcctgtctcatggagatgctgcaagagtcaaatcatagaatgtctgttaaattacaaaacctcctattaaaacttaatttaccagtgaggtggtggtggtgtacacctttgattcctgtctcgagaagacttaatttactaccttgcaaggtattcttaagaaactgacctcaaaatagggtgcaataagaaggccaggagagctgtataggaaatggtcctttttatttctgactaacctacagctccattcaggagcaggagtagactcatatgcagtggttcacaatttacttaaaaacttcttcttttttcttgttttggtctcggtgtctcttgcagtccagtctgaccctgcattcctcatcttcttccacttctacagtgctgagattataaatgtaattcataatgaactaggaaaagaactttcattcacgttgtgtatcttaatattcccacagggtagtttttctcgtgtgtccatcctaacatcccttagtgctaggaatccgattcaggtctccaggtcttgcacatacttgacaagcaatctgccattgagctagatgtcctcccagtggttaccctagttttcacgggaatctgctaacagaaggatgcacactaacaattcctcaagatttgcactttcattgcatccgatgctaccagagttctttatttagagggaggacacaacaaaattcgatgggatttataatactagaaattaactttgagttcttggatcagagaaacaatatattgggtccctatcgatctgtaaaataggggcacaaggcctccacaacattgtgtggttaagaacaaaggctgatggtgaacctaccatgtcgtagtgcctcaagtaagtcccttcttccctttgtcagattttgcacgagatatcactacctctcctacttcgtacatggcgtaactccaagctgagaccgctcggattcctttcctccacttgcaactcctaacaccgagaaaggtgtacgggccactgtgaggtcttctctctccgtagtggataacctttcttgagttgtcgtttgggtggctggaagacgctgatgactactcccaagcgtctacggaaccagatcttaatcctcaactgggcatcagggaccaagctgtgttcttttcatcccaaccctcgctagagtgaaaaggtcgaagctcagctccaattacagacgccatcttgaccgctacgtgtgacgccacacgtacagccgaaagagcagctgattggctgggaaagaccggaggataggcgcgcgaagctggagactggagggtaatgtagaagccgaaaggaactacactcccagacttccttgcgcatgtgaccagcaagcagcaagagaaagaggagcgaggttggactcggactacaactcccactaggacccgcgttgtccgccctttcctttcaaaaggcagaggaaaagggacaggaagaatggaggcttttgagtgctcgtttctcaaaaggcgggaaaggcgaactacacctcccggcgagccgcgcgcgcctgcgcctgcgctctggtatctgtcgccatcttgccccttctgaggcaccgcaaacaaacctaattcctggtgtcccctagtcttggcggaggagccttttagatgagccccgaaaggccgggcaggtgggtgtctctcaggcagggtcctgggaaaagctggcaggctatccagggtaggggagcgcttggccaggcacggggagcccggcttgggtcggtcagccccatcctccgttgtttcctaacgggatcgcggggctccctcaagtggactgagggcgactccggcatgcctggtgatgggacgccggaggtcgaggtctaggagccccgaggcgactccgggttgtctgactgtctgtccgtgcccccgctttttctccgttgtcgtctccgctgaggagtgcgcgaggcgcggacgctggccagggttcccaagactggctgctggccgcgggggcgcgggcttgacattggaacccgctcggagccgcgcgggcgaggagccgggcgggctgctcttgttgtggtgctgtgagcgagtgcgtgtttagagagggggcggggcgggctgcctgctgacacttgagcgggggacggagtcggtgcgaccccggtgccgggagcacgctccggcttctgctgcccggctttcctttgctgtgcggccccgccgtgggtttccctggaggggatgctttgggatgccgtgacgtggtacccgattcgggcggtcgccggccgcctccgagattctaccgggaggcggggactggcttggggagcgagcggattcctttggctctgccccttcctcctctccaccccctttctttatgtcatcctgccagctggggcgcgccatccagtttggctcgctcagagttggttctgagctcagaggactatgggaagtagggggaagggggctccacttgaggccaagagttggagttagcaacccagagcctggaacgcagttgaagagtcatatcggtttagtgtttgactcttaggctggctcattcattcattctactctgctgctgaccatccatttatcagtttaacagatgttaaggaagatctactgagttctcaacctgtagtgtagttttgtttgaccaaggaattcacagtgcgaaattctaggcttttaaacttttggtaactggtcgaaatgactctttttttactgccaaaacttgagaaaagagttattgagtttcatttatccaaatgacatgctccaccgtttgcttattttatctcctaacttattattaaggaaactggcagaggtcaaatcacttgtccaaggttgcacaggtggtagagtctgtttggcaagtcatatgccagccactatgacagaacttggcttgccctgttttctaaataatacttgaaacaaacttgggattacttttttttttttttttttaaaataaaggcatacaaattgggttcagagaggccaattcacaaggatgaaacaactaattatgttgtaaagctggaactggaaccaagaagtgtttgactttaaaacctgttctttcccctgttagtatgagctgggtcattgtgctctcaaatggtgttttttttcctttgtcaggagctggagtgtggagatgaaaatggtatgagttatcttttcaatcttagtttgtagccagtcgaaggctttctatatccttgcgtatacattggtaatgtgatttgtttttcctctgatagggaggacaagctctttggggctaccagacagaagcagcaatgcctgttgtgtggccaacccttttggatctcagcagggatgaatgcaaacggattcttcgaaaattgggtatgctttttgttgtttttgttctaagccgggttctcactccatagcccaggctgtcttcagaatcatgtcggtctccttcctcagcttcccgtgtgatgggaccacaggtgtgcttggccgtgcctgcccgttttatttttgatattttatatttctctgtgaccttttctttttctgcttggtcatggctgttggtggcatagtcctcaggacctagaatgatttgtacacgagatggaggagttatgacacaaggagccatgacaaatgggaagccttctccttatacatctcacataacactcaagccccaaaggtggattgctttggtttggtttggttttggtcccctttttacataggaagtttagacatgaggcagtactcccattaagtcatacagtcagtatttgacttctagcattgtgcttctcaaccttcctaatgctgtgaccctttaatacagttcctgacattgtggtcacccccaaccataaaattcttttgttgctacttcataactgtagttttgctactgttatgaattttaatgtaaatatctgtgtcttaggtagccgctgtaaaaggtcatttgacctctaaaggagttgtgctcacaggttgagtggtcacaggttgaaagctgctgctctacgtaatttttttttgtgttttgcttatattgggatactactaactgagtatgtgagaaacatgccttttctggattttaagttaagtcaagctgcctagtttcccagttatttcttactgtaattgataagatacccattatatttaaatttgactaatgcttcttttttacccccctatagcagctcttttcaacaagtatttagggagaaaagcaagccctaatgctaaagcatatgtttgtgcaaggaactaatgtcatccccatgtgtgtagagtggcgttagccacatgccattcttgggtatattgggaaaaagatttactctcatcatttgaatctttggtttcaaatgaatattcatgaatatgctgttttagattataagggccctggtttatttattactgtggcctgaggcactgtactaaatgaaagaagtgacagataatttggaagggatcatcagtgtcttggtaatgaatattaattaaataaaaagcctctcattgtggtctacatctgataatacagtgtttaaagcagttactttcaggcgtatttgtaggccactaatgctttccttcagaggaaatctttgcaaaattcttttatgtagatcagataaaattgtagcttttgtgtatcggctgctaatatcccattcaggatttccaactacgtaaccttgttttagctatctgaagagtgcactttcagggagacagtcttttaagcttgcatgtaaacttttatcactactttgaaggtgtttggctatacacatgcactaatgtaacctgctgttggttataaagttgaactccatttctctcagagttaagaatactagataaatagatcccaaagacagtagattggactgaagtttctgggttttgggagccttaaatcaagggtttatgtttaaatataaaattagtaacctttaagtctaattttatctctagcttttcccagaagtgatttgagtaatgtataaaaatggcttgaccacaagaccctataaaatcacccacatcaagaggttaaagttttggtgatcaagaatgaacgcccgtgaaactgctcaggctatcaaggttatatctgaaaagctaccacccacaagatgccactttataaaagcaatgtgtgccattgtgttgttaccacgatggggctaatatgtatgcccaggccaagcagtgggtccagttgcagcttcaatagctcaaagagagtgctagctttcttttgttttctgtacatcacttaaaatatagagagtaattcttaacccttggatttacatgtagattctcagttactaactgtattcagataaacaggtgaactacccaagatgtgccagtggacttatagaactcagggtcagattgaattctatattggggtttcccttgccccaaacatctgattgaccatcactggagagaatcaaattgttcctagcttagaagaggaggttgcacagaaaaaagataccgtagaagaaactgaagaaataaagacttagggttcaggaaaaagtgagcataaaacattttaaagtaataaataactagtaataaatatgtgtgtagttttaggtagactgtgtgggagatgctaggtgctgcttctatactaaagaaaatagccactgcctgtgcactgccatctctggtgacacttatgaaggtggactttgacaacaatttgacaaaagacttctttcacccattgggttactatcatgtctttgaggttcaaagtctagagaagataccgtccgtaagaattgttagcttagagcagtggctctcaaccttcctaatgctctcaccctttaatagagtccctcatgttgtggtgatccctggaaccataaaagaatcattgcagccgggcatggtggcgtacgcctttaatcccagcacttgggaggcagaggcaggtgaatttctgagttctaggccagcctggtctacagagtgagttccaggacagccagggctacacagagaaaccctgtctcaggggtgggggggtgggggggagatgatcattgctactttatagccaaaagtttgctactgttacaaatcataatgtaaaattgatatgtaggatatctgatatcctactccacaggggtcttgacccactagcttaagggctctcagaattctggcagtcagtgggtcacaactacttgtaactccagtgccaagtacctcatgccctcttctggcctctttgggcagctgtattcacggcattggcacctcatgttcgttctctctctctctctctctctctctctctctctctctctctctctctctctccctccatcacacacacacacacacacacaatttttaaaaagtgtcattagcttaaaactttgtctctttagaaacaactataaattgtttcaatctgagatgtcagatgtttaaattatcaggaaattagagaactagagagatggctgctcttttagaggacccaggttcagtttccagcacccacatggcagctctggggatctgtgctctcctggcaacaggcacacacgttgtgtataggcaaacattcaagcaaaatattatatacatttaaaaaaggaaattgggctagaccacttatgatatacttaaggtaccagtagcaggcaaatgcttgctactttttagctgcccctccctttcctcttgagctgtaacttaactgacttgtgtgggctttatgactaaagtataactgagtagctaatttgtttaaaagcacctattttagagttttataaaagtagtgtgatacatacatacattgttttctgtggctttcatgtttgttttcattttattatactctttttcttttttgtttttgagacatagtttctctatgtagccttggttgtcctggaacttgctctgtagaccaggctagtgccaccactgcccagcttcattatacattctgtcactggaattaaccctacaataaaatatcgccaaaaaatagcaccagaaactagattgagtttaagctatctcaggatactcataaacatatttgccaacaagtctgaaaggaagcttggaaggaagtaaaggttctaacggtgggtgactgacctgcttgcggggatgctgtgtggctgagggagctttcagagccgcaggcttgtgtgttaggtgttgccacctccgacatttgtgcatggctttttagttcggcttcaaataaaacttgaaatgtcagaaatatttgttacattaaaattttttactgcattttaaccaggtgtggtgacacctgcctttaatcccagcactcaagaggcagaggcaggtggttctgagttcaaggccagcctactctacatagaaagttccaggtcagccagggctacatggtaagaccctgtctaaaacgaaaaaaaaaaaaaagatgctacattttaaataaatttgtatttatttaatttgtgtgtgtgcctatgcacacaagatcttgcacacatgttatggggcatgtgtggaagtcaggccacagtgtgcaggattcaaggtctcttccttcgatgtggatcctagggattgaacttagactacagtgcttggtagtgagttcctttacctgctgtgacatcttgtccagctctgcttgtcatatttcctcaattaggatgctttctttgtaatggtgtgtttttaagtcaggcatggacacacatatcttagcactaaggaggtggaggcaaaagggtcaggatttaaagttagtctcaaaactagcttcatgtctcagaaacatacagtaaaacctgaaatgcaaatcgtttgtctttttctcaagccaccttttccttctgatcttttgtttgttgttatggcattgccattctcaagcattctgcagactctctctacagtcagttactgggttttagcaaataactctttaggttaggattaaagggttttcttagtctgaccacagattacttctgtttcccttttactgtgttctcttacatgtgtgaagtaaaaccttcttaatatatgcctacttatcagtcatctatctaacatacacatatcctttttagactttgattttaatcattttgaggatagggactttgctttatatctacaaatatttaaatagtttccctggtactctgtcttatattctgctagtagtttggtttgaattactgactattcaactacagataattttactgcctttaatgtaaaaactcttaagagtagttattgttactggaagttcctgaagtaatgagaaatcttttcagttcttttgctctctcttccttttgcaggagttcatccctccactgtcttacagagacacttcttttcctgattaaagctcgtttttctaaaccagatgatgtgttttttcctgttgctctatcactatatgtaaaccgtcataattgcctgaagacatttgcaattaaatacttgagggcagaacttatcacttttcagtatatgtgtattaggactcaacactgatttgttgaatagaatattttataggggcatagacatttaatatagtgaattctaagatggttattcctagtaccatttttgtaatcttggctggctctgatcatagctgaaatgtttttcttggaactgagtttttgcctttggagaatcggagcattgtcttttgacactccatgtggtgtctgcatattgttcagaacacactcgacacacaggatgttcacactcaggctatttcagtggaattagacatttctgcttcatttactcagccatttcttctatataaggcttccttaaaaaaaaaaaacaagatttccttatttttattttatatgtatggatgctttgcccgcgtgtgtgtttgtgcaccgcgtgtgcatggagatcagggaagccagaagagagtgttggttttcagggaaccactatgtatgtattggtatttgaacctaggtcctttgaaagagcagcaagtactcttaactgttgagccatctctttatccctttatgcctccttttgacagaattgtggacgctatgaatcaagtgagattactgtttacatattgtatagtttgaagtctgcagatgtattgtctcattagttagcccacatttactagtttctgtttatatctttatgcatgcgtgtgcatgtgtgtgtatttgtatattccttcacatgcatgcataaaacagaacaacctcaaataatgttcctcaggcatcacctacctaaaaaaaaaattatgtgttttagattagtctttatttgggtaaggtctgtcatctggagcttgttcactttagtagactgggctggcttagtggctggcaagcctaaggggtcctcctgtcgctgcttcctttaacaccggggtgataactgtatataactatatactaccatatctgctttttttttttttttccttttctttttcctttttctcttttggtttttcaagacacggtttcactgtatagccctggctgtcccagaactcactctgtagaccaggctcaccttgaactcaagagatctgagactacttctgcctcctgagtgctgggattaatgaatctgccacctcctcccagctttctctttgagtttattaagtagattttagggatcaaactaaggtgctatcacctctcctacctgtatttctttgagtcagtttcttactatatatctcaggctgtcttcgaactctccatctttctgcctcagccttgtgagtgctggcacacaccactggactaattagttatttggatggcagtttttgtgttttatttgcttggatggtagtttttgtagctgtaaagatctaacatgtctggctagattaaatattcttcagtaatatgttagagattttctttcctaagcattttataccctcggcctccatgagacattttataacagagcaatataaatgatgaacttaacatttaagtctttttagttgataacattttttaaaggaattctaaattttgcatttggttgatttgggatttcttgctctaaatcttaatagtgcatagccacattattcaaaattaaaggcctatcttgataaaataattttctttttctagaactggaggcatatgctggagttatcagtgcacttcgggcacaaggggacctcaccaaggaaaagaaagatcttcttggagagctctcaaaagtccttaggtaatttgtcatgaaagttttggtgatgtgacttgaaatctcaatttgtagggtttacatcttttcactctcaaattgaagaacagtttgttgggtacttagaggccctattctagttgtgtgattgctgctatagaaaatgggaaaacttagtctgtggtataagccaatcaaagggtttcaggcagagagttaccaggtgggaggtcctttgacataggcgaaagaaagaagagctggtgcagctgagtatcaggatgtaaagtggcatcatcggaagaaggagatatgagcaagatacctcaacgtgtaagtggggagtagtgatagatatagccgccgccttaaccctgctgactcctttatctcagcttgggtggagcttgacgtcacctgacaactttagtgaaagggattccttggtgcttcgtctccatccatttttatagcttgtgatttctcagaaaatgttctgcttaactcttttgctttctacatttaaagtaattttgttttatttttagaagttaagagatgcgagaggctcttattacttaacattaatataggagtgtaattaagattctcagtcttatttttttgttatttatgttcctcgtaaattctgcttttagttcttaagtgttgtgatccatggtataaatttagtgttaaatactaaagaatataagaagagtggtatttactttattgggtatttatgaatataatggatgtctttaaaaattgtttcatttatcagtgtttaatatatgtacattttaccattggtaacatagtgtagaaagcacgtagctaaagttgagacacgtttcattgcatgtactcacaagaaacagtatctggccactcttactgcttttattgtagtcattgaacatagaattattagattcttcagccttggaaaagaccttagaagactttcttctaagtgctcagtcctcctgccagcagtcctgagataaggaggaccttgcacctgtttctatgctcgctaacgggaagtcttgcctgctctttcacagatgggaaaatctgcatatcgggttgagtttgtctttctgggatttacagatacataatcctcagttacacagaaccaatatgaaatctttcctatgactttgaaacatttgaagatacacattaggcaaagtaatcctcagcccccaaaagatgttgacttaaacattaataaaagtgtagagaagagctgcctgcttggcagagttctataatggctattttttttcatagcatctcaacagagcgccaccgtgctgaagttcggagagcagtaaacgatgaacggttaacaacaattgcacataagtaagccattagtctaccacccctgattttttaaatgatgtagtataaagtagttttgagacagtcttccttttgtgtggcaggtccctgagccttttatcttaataataactctttactcagaggcctgcccatccatagcaattactgtttattccattgattactttttgtttttgttttgcattttgttagggaagcttaaagaacttaggtcagatcctattagaaggtaatctctgtatgatccacgagcgcagggagcacagctcagtaacaaagaagtgtacttcctaaaattgaaaggtgcttacaggtttcttgtaatggtatttgatataggtattgctttataaataggcattataattttcatatggctctaattatttcagatagatatttcaagtcttagaaaaaattataaaatatatgttctttttaagaaatataaatataacttaatgtactttaaaaagcaaacacagtaaaatgataaagacttcttagagattgttttcagatcatcatagctgagagattgggtccagggtggtagaggactgagagcagaatcaggcattagttatagagaggtagtgcctcctgaagaacagagaagaccgggaaggagtactttcagtgataatagaaatatttcataaaacgttaaagtatcctccatttgttttaacttttatgttttaattgacataaaactaaaggaaagagaactcagcgcattaccataatgtgatgacataaggcatttggcagaatttgaattgattacacggtctgttggcttcttgtacttcactgtccctcattttgcttaacacatagaatggggtactcacctctttaacagtgtagtttgaatgttttgctctttgttctgtaagtttcagattctttatagacttgtatggtagaaacttagaagttctctgtagagacggcaagtatttcactgtcaggctaacatagttgaaacattcaaatttaatgtgtccctttttgaatttgcttcagacttttgaatcggaatactttaaactgggtctggattctaacttggggactggtcataggaaactgtgcgctagataatagacaatgaataccttagatgcattcaagtggtattatggggcaatgagttgtaagttgatgcgtcagtgtcattctaaaaggataacatttatttagtctccttttccttttttccccttttaagaatgaatttatccttatatttgggtgaaagaccaagttacaggtatgcaaataggttattattatttcaggctttttcttgtatttatttccaaattgacgctctcaattattcaggggcacatactccatttatgaattaaccatgccccttgcttcttctcttcccctctcaccttcctaatactgcccgacctttagccatttcgctgcttgggaatatctctagtcagagggtgggaagggagaaggaggtgaaagttttataactcatttcactacttgttagttggcctgaaaaaaaaatgggttcaagaatttactagtatttgctaaaataatttttggataatatgtggatttctttaatctatgtgacctctccctttccttcctctctccattagcatggataattgagagttggcttctattcacctgttttctctgcccttccctttctttctgatttctttaatatatgaattgccttttttgaaaagaatttacttcagtatataatttttaaaaaaagcttaggtctttttctactccgattttaatatttatttcttactgtggttttagtttagctggctgttgtatttatttgttgagctaagagttagggaatgaggcttggtgacacttccttgtcctcagatatagcagtggggcctagacctgaagatggcctatgagggttttagtcagtaaaaacagctagaggaatgcatctgagctgactgcatcccctccccctccctccctcccttgctccctccctcccttgannnnnnnnnnnnnnnnnnnnnnnnnnnnnnnnnnnnnnnnnnnnnnnnntgcttccaaatgttttgcttagcccagtcctccagtgtctctccaattagactaaaaatgatagtctggaatatcagatcttggcacttctgccctactgtcagatattcccagaatgctgtgctgctgtgtgaggatacagattttcttaactgctccccattgtagcttattagtatgtggctttctcagagcagggagcagagcagggtctgcaccttccttgtgttctttggatgattagagagttaggcaagtgtgcatactgaggggacctgtgaaaccctcaggtgcaatacttaatttctaaatttacttagatgacttgttcagctaacagatatttacagttttattactaaagcaaataggaacttttgacctaattctaacatgatacttcatttctcattcacttaatatttgagcatgcttgcatgagtggacatttggaagacataattcttcctaaaagttgcagttgtgtctttttgcactgcaagcttcatcttttccgtagcacatgtccatgtgcttcatatttttaaatttataataactgccaccatttaaatagtacaccaggtaagtgtagaagtcactttatttgtgtggtaaactcataccaaacaggtttatcagtgatagtctaataaaatggtatcagaataggagtgtaacaagaaatgctagcttttggaaagttttcatttagcagttagtaatgatgcttttctgtctttatcttgtctgtactattctttgtttctgcactagtattaagatggagcttatgtgacatatccgtgaggctcctgatgcctcaggatgtccacctttccttctcttccgtaggatttgctttaaattacgaaagagtttgtgtatatttttatggtaacacaactggattcttgaacttgaatcctttttctttcatatctttcttttttgagacaatgttttgtttcagtgttttgaaacaggatttcactatatatccttggctggcctggaattaactatgtaaaccaggctgaccttgaactcaccaagatttacaagattgcttacttttgccaaggggtgttgggattaaaggctaaaggcctgtgctatcatgcctgttttaaatcctttttaagttgtaatttattctcttcagcaaaaattggcagtaattaggcaataattctcaattggtgtaaagtaaacctgcccataaaacctacccggaaacttttattctttatgtttatgatatgacaaataattacagaagcatgatacatacttgttgaagggaacatttattagttgtgtggcccaaggcaagctacttaacttctgtgtgattcggtttctcattctagagagtggagatgctgatgctatcaacttcataggattgttgagagaactgagttaagacagtaagagatgtagagcagtgcctgacatgtaacatgccttcagttgattttaacaacaccatcactgtcaacatcaccaccatcatcatggaagcacttcactgcccactgacaaaggatttggggtctgaatctgaagagtcactgggtataaagtctaaagctctaggctgggctatagaatctgtggtttcacaaaacttctatttctagtttagtgaagaaaaccagttgtttttagattaattttaaaccttgacactaaacatgaggatgtttcatgaagccgagagagagatatggcagctatcttttggtattttaacctctggtttaatttctcaaacaaaacgttctgaagaagttttaaggaagagagactatttaataatgtcttagagagggttcagttgccacaagtgccttttagagtccagggtataccagacaaataaagtaaaataatggtagatttcttttaggatcctcagatctgctcttaaaacaacaacaacaacaacaaccacaactacaaccaccacccccaaaaccccaggaagggtaataatataaaaatacagtgaatattatcagtgatgcctgctgttgtatacagccatcttccaccctactaactcctctcgtttactgcctcagttttccatgttttaaagcctttagaatctctggccatgcgggcagttagggaattttccaaagattcattgaacttcatccttaattataaaggaaaatctgattcttaacactcaatgcttttagtttcttgaaataattaaaaaataaaatttaaaagttagtagaaatatttattttcattcatgaaacccaatttcataggtcagtatcagtttttatttttaaagcatagaaaagaagtgtcttcattgtaggattcagattatagaatatggtgtgtaggaacgtcagtgcgtggcattcctcgaatttaaatgttcctaagtgtgacctgcttgcttagaaaggagcttctccagaatcagggcccttctggtcatttaacaagaaaaggctgcgtgtgtctgactcactttttagcaactgtgaacccttgtagcagcattttttcttttatttagtatgtctggacctaatagttcttcagagtggtccatcgaaggacgtagattggtacctctgatgcccaggctggttccccagactgccttcactgtaacagcgaatgctgtggccaatgcagctgtccagcacaatgcgtcccttcctgtgcctgcagagacagcaagcaaagacggtgagtaggaacaccgctgtagggatgaagccgctcagggctttccatctgtttacagtaagtgcttaaaaactatgagatccatttttaatccaaccaatgtctttgattctcaaactagaagctgcagtatccaccaaaatcaagtttctttacttcaaagggaaattatgttaatttgcaaaaggtttgtcaggctgaatttctgacatcattgtatcttttgttttattttgttttattttgttttcgggaccaaaccaaatactgtatcccaggctagactcaatgttgaggtaatcctttcatctcagcctcccttctgttgagaatacagtcatgagctaccatgccttatgaatgtctcttcttagaggtgactgggaggacttagtgagtagcattagagcagaaacaaggtaaaagatgttgaactgatggcttcagaaaataaaactgtttttttattttgactcaatggtacacttagcctctctgacccagtcaatgaatactttcttactgttacttaatatagtaattgacctgctttaaaaatctttcagttgttttaccaagggtaatactaaattcaagagtatgcttagatcaaaagcaggtctaaaaacaatacatttgccagattattttgagatattgctttgtcttgtctagtagtgggttttgagtagagtgacacacttcactcttgtttaggcttggctttatgccgaaggaagctatatttttcagggagacagttatctgcgcatacttagtagcctctactggattcctgttttcttcgttgttggcagttatatttcctctccttttgccttttcttcttgctagctggtagaatgggaagaaagttgggtttctaatagtgaagtaagtcagtgtttggatcttagtttgtcatttcctagccttgtgaccttcagcatgtcttagcatctgtgaattgtggattccttatctttaaaacaggatatagtgtgagaattggtgacagtagaaaaatttagtgcctggcttacctaattccaggctattgttgatgttcctaagttgtgtcctttcactgaatgataaggagtttaaagtctgatgtcattgtttagttattgttatactacttgattggcgagtgatagatgaattagtttatttaaacagactgactagcttggttctccttctgtaagcatttttggggatctctgcgattagggagatattacattctcccatcattggtactgctgtttgtattaaaaaaaaactacaagtttgtgcctggtgtccagttcttgccaatatgagaaattatttccctttttctcagtaaagttttaagcttgattgctttgtacctccattcttctccatttaccattacctgttgataagcctgtaaatacttgggaaagaccattaagtgatgattttcaaaatagcctttaacctttgagtgtagtacttagcatttagcttctgatcatatgaaaatgataaagttggccttcaataaaagtactttctctgtatgtctggacggttgcggtggaagttaacagcagacttttttttatccttccttcagtagtggtttgctattcctacacaagtaccacgtctaccccaacctctacccctgttccaagtggcagcatagcaacggttaagtctccaagacctgccagtcctgcctccagtgtagttgtcttgccaagtggaagtactgtatatgtcaaaagtaagtgatgtctcagtgttaccaggaccctcttgaccaaatgctgcagtccaagctctgagtggatctgctgttctggaataaatcatcgggcacaagctgtttttcagtggttagtttttgaaggttctaaagacttctcatctgtatatatgactgggtatttgcgttttttatcatctttgggatttgagaaatgccatcatttttttctctgtgtgggaaatctatctttggtcagtgctgtcgtttaggcattcacacctttgaatcctgcggaacacagacaagaataggtactgaaggcatgtgcttatttgatgttttcccagaattccaatcttttcagtcttttcttgaattccttcacatatcaccaagctcttacatgcagtgactcgttctcgaggctaccttttatatttctacttgatataatcttcaaaagttttttatttgcagttttaaacttctgattctgttctgctctatacagtagtcttttgtttgtttgtttgtttgtttgtttgtttttgagacagaatctggcctcagatttgtgatccttctgcttcagcctcccaagtgctaggcttactggtgttaccaccatactcaactctataaaacagtttgatgtccagtttttcttacattaatgtctcttttaattttatttttaaaattattttatttttgtttgctgtgcttttaatcattagtatttgattttaattggtcttgatatagtaataagagattttcatgtagatttttaaaggtggtatttcccttttttagacaggtttctaggtcattgctagttcttcatatagtctaatgattaaagcggtaaagacttacattttattaccaattccatgagttatactatgtaattttttaatatatgctctgtagaaatttcccatccacattgctgtgtatatttgtcatgtgaattttataaaattacaaaagaattgaggtattaggttaaaaaatatgttaagagtcatattgactgttaagtttttctcaggtttctgtagatttaaccaaagtggtctttagaaatgacactcaagactttttatttatttatttgtttgtttgtttgtttagttatatgtaagtacactgtagctgtctttagacacaccagatgagggcatcagctctcattacagatgcttgtgagccaccatgtggttgctgggatttgaactcaggacctcaggaagagcagttggtgctcttaaccattgaggcatctcttcagcccctcaagacctgtttttttgacaatcattttcaaaactgctcttagtgaatctcagatatgaaaaactatttcacaaactaatgtactttcaaataacaagagctctatcagtttatactcaaagacattagttttattattcattcaccagctttatgcaggtcaccataccagcgagacaaaacagacttaggcctttttgtgtaaaaagcttgttaatagggtagatgtgtagacagttacattgtcatgtggtaagtggtacagaagaggatgtacaaagtgctttatgtacaatgctcagaagagaggtcgattagctttgcagcaaggaagggaaggcttctctgagaagtggcttgcaggatgatgatagcaggatgacgaagaggtcttcgaggatggtggtgttcttcaaagaaaattacaatatacagactcagataagagggtgctgaagtatctttggacaatggtgagaaatttagcttgtcaagattttagaggggcacagggttagggtgatggtattgtgtgcctggaaagataggggtccttgagatttggtctggtaagaattttgagaggttaggaaaatacaaacttagttatgcatctcagttatgaaatttccaggcttgctctagtaggagtatagaatagacgtagatagatgcaggagcatcttctaagaggttattgataaaatacaggcaagagacaaggagccccaaatatagtagtagtttaagaaaagagggtgggtattcagagagacatgttttctgagggaaaattgtcaggtcttagtgacagtttgggcataaaagaaagggagaggccaaagatgacacaggcattgaaaaaaagagtagaagaggcagtgctagttttgtgaaggaagaatactgttgttgtctttcaggcgttagctgctcagatgaagatgaaaaacccagaaaacgcaggcgaacaaactcctctagctcctcccctgttgtcctcaaggaagttccaaaggctgttgttccggtctcaaagacgatcactgtgcctgtgagtggaagtcccaagatgagcaacattatgcagagcattgccaactccttaccaccccatatgtcacctgtgaaaataacgtttaccaaaccatcaacacagacaacaaacacaacaacacagaaggtaggtggtagagggagtatcagtcattctgtctttgtcatggcgtgatgtagaattgacagctttgtgctgactgtggacttggttttacgctgggggtgctcacatggcttgtgtaactctacatatgaaatattgggataaatagtgttacttactttctaaaatgaagctcaggtgccaaatgattgctcaagatgacagctagcagatctgcttctggacttatgttgtatttgatcattgtaatgtcattttgaaacaaactagaaaacttttaaaatctttgtttatgtggccttatgtttaggaagtcactttttcgctttaccagtagaattggatgtgtttgaggagaaaaaggggtatgggtaaatgaacaattgttaaaatctccctgtttatttgttgtctggtgtcttgcatcattttgacctcaggtcactggtgttgggtcagtttcatgctcttgcaaccctcagtctccacactaggctggatgctggtgacttaaggctatgtttacgcctgtgcttctgggatctcctttgtagcatctttgtgcccttcccttgttattagtttattttgctgtcctttagtagcttcccatgtatgggtggctgtattgttttttgagacccagtgtgggcaaaggaagttttttcctgtgagttttgaagacattctttacttggcttccagctttcagaactatttttgagatacgcagtgccattctctttgtagcttttggttttgtctttggacacattttagaggactgaaaagaaacggcaaagatgtcatgaccctccggtcctggttttagagctttttatcctttacttggttctcggaagttcctgcttaccttgctggccctttacatttcctttgtggatcacttgggaatgtgaaacttgctaagttgatcctttaattttcctgtactttttcatctctattttctgtttcctctcctctccctgtaccataatttattggttcaggattttggaacttgacttttttcatttgaattctagcttgctgccagccttttgactgtgaggaaactaaactctagacccaggttttctctgtgaaatagaagggggtggggggagcaacccagtgcttctctaatcttggggtattataaataatatgtgtaaagcctaacgtggttaaacgtgtatcgttttctgtatccttgatcagtatcctttattactttcatggagctgttcatttttgctgtcatactttatttttcttgaaggaaggatctcactctttgttccgactggcctggaactgcctgtggagtgttggctggccttgaatgccaagtgctaaggaggcatccattagaatatgtggcaaccatcatactctacatttctaatactgctttcttcttctgtagatgctccttatttttctttttaaaaataacatcctggtattggatagagtgattatattcttttatttgattatatttataattcttttggcctggctttcttttcttatgctctttatcttacttgttagtttttcctttcagactttgcttaagtgtctgtcagtcagcttacatatgaaactgtcacattcactgccctgtccctctgccacttgtccttagttttcctgaactggtcagattcatcaggcaagaatctttctgttttctgctttgaatattataaacctgcctgccagtattttggaatcaactgtggaagggtgctatggttcctgagataataagtcttttctcatctcagggacaagagtaatgtcggcatcaagggttaagtgcaattgagtatttaagatgtgacatggagtatccacttagaaaatgccagctcttttgctttgtagaatatctttggaagtcagcattttactaatttgctgataataatgaactgttccagatatatgactccactggttcactaaagcttatccattaatatgttgaaattaactgcttttgttgattgtgaagtttattaagcataatgtttacatttttatttgatttcaagtaagcatttttgagttattcccttttttcgtagaaagtttttaggtttggtttggtgtggtcgtggtatgtgggtggtgctgggggtcaaactcaggaccttgtgtgtactggaaaggttctggactccggagctgggtcatccttagcacagcttagctcttagttttgctttctgagctggccttgacaccaattgactattatataactttgcttcaggttgttaaaccttactgtaatagttttagctgccttcattgctggattttatggctagttctttttttcttcctctttcatttacttaaaaatgattttagtattcaagaaatagcataggaaagctgtaactaaaatgtacctatatgtcatccatattcttttgtttctattgtcttttgtttttattcattatgtttgtaagtagttgatattataaattgcaagtttattttctatttctcccatagaccgctgagggtagctttctttggtctgttttatcattgtttcctagaacttagaacaaggtcttggcttgtactagatactaatgaatatttattgaatgaatgaattaataattgaacaatcaacacacacacaagtagatctagctccaataactatctggtcatgttaaacaaagcactttcccatagaactgtgtcactgaccctctgataattgtctgctaatcatctatttccttttaagacaaaagtaataatatatttcttaagttaccagagttagagaagattattcattggtgtttaataagtgtcacctaacatcattaactttcaaattttctttggtagacttacataaaaatgtttgtaatatataggtttccctataagtgaaatatgaatgctttgggtttttttgttttttgtttttttctttaccaactcttgtttttgccttcaggattttgaggtgagaataattatttgaagctgtcaggcacatttgattctaaagtcatatacagtgcttaccatgaattttcagattcagaaatttaggtttacttgtgttttaaaaaataaatatttaagtggagaagaaaagaactcattccatacataattactgagcatctgctgtgttccagttataaaactgtcttctcttcatttttttctctgccatctatttttaaaagatttttggacaactaggttatggttaggactaataaagacattttccatgtttcgttatctgtttgctgggtaattggattaaaatatatttttatccaaggccattgtcataattgtatttaccttggatttctcacaatttgtatttaagtcaacttagcaattattgtaggtaaagtgactttacattaaatgtaattgtttctgattttgtaaacaatattcacatgtaaataggttgtgcatttttagcgtagatacatttctacgtatgtcaacatgcctcatttaaaatgacactgttatggcactcatacaagcagaacaacagaatatagctttatgctttcatgtgcttgattaatatttttcatttgtccttagggtgcaagtcccagcactcttaaggagtttttgtgaatgctagaaggtcagtaatttgagatatggcctgaataaacagtgtggttcacttgacttcaaaatctttttatctcctttcttgttttattttgttttaaaacaactttaaagtataagcaatttcccaggtggatctctagtttgggaaatccctttacagatcagaaagtcatttgtgtactgaaatctcaaaccatgttttatcatttgtatctgtaatctagaatgtggtcctaaagaccctagatttattcttttcttaatgttaaaaccccatctccatactctcattctggaatttcaaatatttgaactgtgcacacttcactttcccttccgcttattaactgccgattgcgattgctttcctggcaagcctagtgagtcctctttgtactgcagtcatcagcattgggcctctgggaagctgtgactgttggtgcaggattgacaaaagtcaaacccagtttagtacactaattagtttgggtgtggtagtcaggaattctttgtatattcagtgataacagaattagaaggaaagaaaatgtttctaatgaaacaaacagtatattgaatatcttttctgtatggaagtgatctgtaatgctttactcctatccatctaacagtgaacaggaatagtaaactgctagtaagtaccatttgctaactgtcaggtattgacctcctgctatgtgcctagtatttgcttcatatgattatgtcatctaatccttgtaatgattttgtaaggtcagaattattatccctattttataaaagaaataaattgaagccttgaggttttaacatgtccaggggcctgccatttgaaagtggtggaggcaagatggtctaagtgcaggcctgtttgactctgaaacttataaccctctttaccatattggtccacgtttcagtttgtataatagtttcttgttttcaataatattgcacattgttggctaatccagcctggttgtgattttactgaccaactctctacagatgtctactaatcaaggcatgtattgattgttaaaacaacagactccttaaagtaatgggcaagtactaacgtctttaattctttgtgatgttgagaatatgtactaatagtgtaaagtttccttgatgtagatacagaatatacattcacaaagaaaaatgttgactgatttgacttcagactttctttagggccagtgtaaaacaaaaaagaatttcttccttaacttctttgggttttttttttccccccaaaccaatttgttctgtcctaggcacaaagaattttagtgaaagaactgggtatcactacaactctgcttacttcgccctaaacaaaactgtgatgcatactccaaagcctaagtaatgtttgtgttctctactgtgaaatggggataataatagcacttgtgtcatgggatttaggacataccagctccgggagctcttcttggtctgttgtaggaaccttgcagttatcatttatcaagttttagattctctgctcatcagaataattagaatctgattacttctctttagttttgctaacatcccagcccaagacactgctggcctgctgtaatagcttccactcttgcctgtcacttcatggcaactagaatgatcttttaaaatagatattacatcttgtttctgtgctaaagtcttcccatggcttcttattattcctactatgagatccatttactttcacttggctttcatatttgatccagcttttgcttttaaccctctttgctgtaggctttctgtactttcttatttttttcaggactttgggtgatgctagccagaggtcgtttattcagtgctattcgctatgaaatgtgcaaagctaactacagtttctcagccttactgcctaaaccttgacttttctttttttatatctgttctctgtaccaggctaggagcacatcctcctagttcacctgtatgtaagttgtaactaacagctctcatgaacacatcagccattacatttctgctggcttctgagaacttcttcatttatctgtatctactatcactgccctactgtagcttcaaattagcagatagatactgtagatttacagaaaatttataaaagctgcatactttacccctctttccctagatttccttgggttttgcttaatgtccttttcagctccaggattctcacctaggatgccacattctatttccctgtcctatctccttaaacatctttcagtgtgaacgtttttcagattttcctggttttttttttttttgataactttgataggtcaggtgttttagtaagataccccattcctagaatttgcttgctgttgtagattagggttatgagttctatggaggaaggtcacagagaagtgttaccatttgtgtcacatcttatgaaagactacatctagttctctgttacttctcagaagttgtgtgtcttacacatgccaatctgtccctgaggtctttcaagcttcttgaatatagcaatgttgcttttgcctttgtttcctactccccatgccacttctaggtgttaacaccctcacatcattctgatttctactcaaatatcactttacagagaaatcttcattgagtactttatttaaaaaacaaaaacaaacaaacaaaacaacaaaaaccctaacactatcatcatccttttatctttactctggtttattgtctctttcatttgtttctgtgtgttctgtatgtttattgctctatctgtactaaaatgcaaactttgtacaagtaagttttgtttattcttctattctcagcatctagaaccatgcctggaaaatagtaggtgttcactaagtatttacaagtgaacagctgtccaggtgactttctcatgtgaggtggatgatcctccaagtggtgtatggtgtgctggtgcttgcagagctacatcatgcacaacattggacaccacctcttaaaatacctgctggaaattggtgggtttagatacgtgctggtaaaggaaagggtttataaacttttagttaattgtatattttctctgttgaattgtttttcttattgcagaccttagttttgaattgtatatgaacttaaatgtactgacaatatagagtaggtacatggaaataatttattttttgtcctttaggttattatagtgaccacatcaccaagttcaacctttgtgcccaacattctctccaaatctcataactatgcagcagtcactaagcttgtaccaacatcagtcattgcctccacgactcagaagccacctgttgttataactgcgtcccaggcctctctggtcaccagtagcagcaatggcaacagcagttctacgtcatcacctatttctagtacagttgcagtaacaacggtggtatcttccacaccgtccgtggtcatgtcaacagtagcacaaggtgagtggtgagccaccagctaattctgtccctgttagaaagaattttgaagacaactgagggggcggggtgggggtgaataagagtgtgtgtgtgtgtgtgtgtgtgtgtgtctgtctgtctgtctgtctgtcttgtctgtcttcctatcttggggttgaggatctctgctgttaggtcagtgacctgctcacctttgctcagcttgaggatatgaaatgttagcaattttctttcgtctgtaactcccacaccttgtcctgtcctcctcttccctaacccccattactttctaagtccttccactggtaaatgtggaagcaaatatatacatacttaagcttttccttagataaaggttagcagcacattgtacatgttgtgctctaatgtttggaaaggagaatttgtcatttttattaagtatgatgctggtgtcatagaggcctgagttggtgtgttttgtgcgtatatgaaattagtttatttttaggtaactgtttgtttggttctttctcgtctttgctcagaattgctcagaattgaaagctgtaattagcttgcgggatgtctctagtgtctgtccttttgcccttccttaactgaagaatgggacactgctaattacttagattgattgcattttaattctgctgctactatttcttatttagtaagaaaattttttctttgattttattctttttttcatagtttccatggacttcttgtgttcctttcacaatagtgtgacagacttctgctgactatagttcttctagactagctttgaggaaatctctgctctccactcttactccatggagtcctgtccttgtcagtttcccctcttccatgagtttgatgatggtccacatttggcatctaagctgcctttttttttttttttttttataatttatttttaaagggctttaaagcagagaccaatggatttaggagttttagagaacagtaaagaaataaaacaagtctaccagttgcccacagctgtattataatgcccttcctgtgtaacacagtgagcccttttacccacacgagtagtctgcaataaaaacttcccactccacataatacattttcttaaagttttatatcattgactttctcctactctctatacccttcttactcattttcattgtttaattcttttactgttggacaatttattactcatgtattattatttagattatctcttagttttagtattctagattaatatctgtgtgacttgtactaggtctcaccagcgtggaagcaagtgttttcattgggaaaagggaacttctcggagttgtctgtgtgcacactttgtcttcttggacaattgtattggattcactttgtcttcttggacaattgtattggattatttcactaatgcctggctaattctaagtccttgttatttctgtttacaaaacaacataaagtaaaacagaacattatgatgaaacaatttattttcttttcacaaagattctttatactgtgtgtaaacgtggctttgtgtttatttgtatgggcatgcacactcattgcatccttgcagacatcagaggatgatagtatgtgggaatggttctctcctcctccatatgggtcctaggaattgaactcaggtcctttttatctgctcacccaccataccaaccaggaatagctacgattttttaaaactttgaaactgtttaactagtatgatgtcttattcttgatcccaccatcctttgttatcttcttaagcacacaaaatatgacctgtactctttacttttatgtattatctttctttacttacactttatttgtattattgtgtgtgcatgcatgtgtacatgggtcatgaagcgtgcggccatcaggagcctttgcagggttagtcctcggctcccacctttctgtgggttttgaggatcaaacgcagactgtcaggcttgtacagcagatgctttaccatctcttggcccaaatttatactttttttttttttacataaaaaggtattttgggnnnnnnnnnnnnnnnnnnnnnnnnnnnnnnnnnnnnnnnnnnnnnnnnnnnnnnnnnnnnnnnnnnnnnnnnnnnnnnnnnnnnnnnnnnnnnnnnnnnnnnnnnnnnnnnnnnnnnnnnnnnnnnnnnnnnnnnnnnnnnnnnnnnnnnnnnnnnnnnnnnnnnnnnnnnnnnnnnnnnnnnnnnnnnnnnnnnnnnnnnnnnnnnnnnnnnnnnnnnnnnnnnnnnnnnnnnnnnnnnnnnnnnnnnnnnnnnnnnnnnnnnnnnnnnnnnnnnnnnnnnnnnnnnnnnnnnnnnnnnnnnnnnnnnnnnnnnnnnnnnnnnnnnnnnnnnnnnnnnnnnnnnnnnnnnnnnnnnnnnnnnnnnnnnnnnnnnnnnnnnnnnnnnnnnnnnnnnnnnnnnnnnnnnnnnnnnnnnnnnnnnnnnnnnnnnnnnnnnnnnnnnnnnnnnnnnnnnnnnnnnnnnnnnnnnnnnnnnnnnnnnnnnnnnnnnnnnnnnnnnnnnnnnnnnnnnnnnnnnnnnnnnnnnnnnnnnnnnnnnnnnnnnnnnnnnnnnnnnnnnnnnnnnnnnnnnnnnnnnnnnnnnnnnnnnnnnnnnnnnnnnnnnnnnnnnnnnnnnnnnnnnnnnnnnnnnnnnnnnnnnnnnnnnnnnnnnnnnnnnnnnnnnnnnnnnnnnnnnnnnnnnnnnnnnnnnnnnnnnnnnnnnnnnnnnnnnnnnnnnnnnnnnnnnnnnnnnnnnnnnnnnnnnnnnnnnnnnnnnnnnnnnnnnnnnnnnnnnnnnnnnnnnnnnnnnnnnnnnnnnnnnnnnnnnnnnnnnnnnnnnnnnnnnnnnnnnnnnnnnnnnnnnnnnnnnnnnnnnnnnnnnnnnnnnnnnnnnnnnnnnnnnnnnnnnnnnnnnnnnnnnnnnnnnnnnnnnnnnnnnnnnnnnnnnnnnnnnnnnnnnnnnnnnnnnnnnnnnnnnnnnnnnnnnnnnnnnnnnnnnnnnnnnnnnnnnnnnnnnnnnnnnnnnnnnnnnnnnnnnnnnnnnnnnnnnnnnnnnnnnnnnnnnnnnnnnnnnnnnnnnnnnnnnnnnnnnnnnnnnnnnnnnnnnnnnnnnnnnnnnnnnnnnnnnnnnnnnnnnnnnnnnnnnnnnnnnnnnnnnnnnnnnnnnnnnnnnnnnnnnnnnnnnnnnnnnnnnnnnnnnnnnnnnnnnnnnnnnnnnnnnnnnnnnnnnnnnnnnnnnnnnnnnnnnnnnnnnnnnnnnnnnnnnnnnnnnnnnnnnnnnnnnnnnnnnnnnnnnnnnnnnnnnnnnnnnnnnnnnnnnnnnnnnnnnnnnnnnnnnnnnnnnnnnnnnnnnatgttcacatgcaggaaacgtgtaaatgtgtgaagtttctatgcacatgtgtacaagtgcacatggaaggccagaaggttgctgctgctgtccatgatctttcttcaccttgtaggctgaggtagggattctcagttgagctcactgcttgccagtttgcttagttcagttactcagcttcctcaggaattccttgtctccacctctcacctctagagtgctgggatccaggcaggataccattctgcctgacatttatgtggatctgggactctgacctcagttcctcagattatctgctgagttgatttatatttgtcgtatttggtagtgtctttgtctagtttggttagatcaagatactactggtctcagagtgagtttgaagagatgtgagaagattggtattaattccttaaaatcttagctgacttctccagtgaatcagttaggcctggaaatctctattttgtgagcatgtaaattatgaactcactttttttagtggttgaaaaactggattagctatttcatcttcgttgagctttggtagtttatactttttaagttattcatttctaagttgttagaatggttagttgtcattctcagttccttattatcctttaaatggctacagagtctatactgatgagctcgttctttgtcaggctttctactttgccaagtttttattattattagagttttgctttattgttccaggcccagctgatttattggagaagtaaactaaatatttaaggaatcaataccaaccattcctaatctgttctggaaaacagaacactacaaactcattaggaccttgataaccaaactagacaaagacactacaaagtaagacaagtaagacagataatctgaactgagttcagagtctcagagaattgtttcagttttagtctcattttttttctgttttcttaggctttattttgcttttctaccttcttgagaactggaatgtggattattgattaaagaccttttttcttttctatacatttagtatttagttctacacttacagctatgctttgataaatccttagtactattttatcagcatcatacgttctttgatatgttttcattttctatatacttttgttctgaaaccttccccacgccttccttgttgacaatgtatttacgattatgctattctatttccattatgtttggagaactttttttttttttggtggtccttttggtattgtttcctagttggattctgtggattagaaatattctgtgtggtatttcagttgtactaagtaactgtgaggaggataggtggaaatcctgtgtttttttttttttttaagactgttctctggctaggagctgtgcagaagcgtcctcccactccctgactgtagcagtctagagtggaatcaccgcccttctgaactgaagagggaaagaaatgattttggttcagatatcacagaacttgactttagattttagaggttgagttgggtacatgtttttttgttcgctatttatcataaaaccgctttccaaaggtttctcttctattgcattttttttgtattttgtgtagacatgtatgtgtgtatgtactgtatgagagtacgtttgtgtgcgcgtgtgtgctgtggtgtgcatgtggaagtcagcgtgcaccttacaggagtgagttttctttttccaccatgtgagtctctaggatggaacttaggtaagcaggcatgatgtcagtgactttctttacccatggagccatcctttggtgcccaaagcctttgagtgatacttgcttggaaactttaattggttccactgtgtagttttggagatatcctcctgccagagtaccgactgtggctctccagaatgtttaggtannnnnnnnnnnnnnnnnnnnacctttctgtgggttttgaggatcaaacgcagactgtcaggcttgtacagcagatgctttaccatctcttggcccaaatttatacttttttttttttttacataaaaaggtattttgggcttccttctttctctagggttcatgttacaaattttagctcttttatattgtaaccagaccattttttatttggtacaatgaaatacttcaccctgcataagtttatagtggaaaatgatttattttggcttatgatttaaaaatctaagatcaagatcttgtatctggtgagactttcttgttttcagatcttcaagccagtgtacagctggcacatggcaagagacaaggaacacatacttatactttctctgagttcttttccacttaaaaagccactgacactcaatcatggggctccttcctgattatcctgcttaattttaatgatgtcctaaagactctactttaaaccataatcattaagtcagatgaactttctagctttttaagacattacattggggattgaatttcaacacatgggctctcatataaaccatagcacatatttagtcaaaattatcaatgtagcttcatccctaatagttttaaagatgggctttgaaaaatacgttttatttagtggtgtttcctatattcttttgggcagttctagagtctgactggactagtgtctaaatttatttgaaaaatgtgatgagcaattaaatgaatgacttcacataaataagctgtaaggaagtttattttttcagaaattcatatgacagaaggcttcagttaagttaggcaaatcgttggaccatgaacgaaattttccctccttgggtaactttattattggttagatgagtacattgtaggtatcatagccagctatgaacgtatccagaggaagaagagaaaattcctctttgtgtagcacggcccctaaaaaagaaaaacttttatctaggtgttctctaggaaaagattcctcctgtaacatgtcggctataattaattagctttattttattccagaaaaagtcgtcatgtactgtgacaagcttagatcaattaacagttgccctctaaagctggcttagggatcggcctccacagaagtgtgtaccagtgcccaggaatgtggattctcaagggagaaagcctgggctttgttagaaaggaagaaagaaattggactagcaaccaacaatcgtaataggattaagcaacaatgaaaatagagtgataattaaagaaaaattagaagcttgttgacgaagcaagactataacgagtaagcactgtaattagtctacttggtagaatttttttttttttacaacagttgacttttcttttgatcttttatatttctatgacagttacgctgatggaatggttcaaatcctccttgttttgagctgcccaccctccccttttctaaatcctctttacttttctgtaggtgtatccacatcagcaatcaaagtggcatcgacaagacttccttcccccaaaagcttagtgagtggccctacccagattcttgcacagtttcctaaacagcatcagcagtctcctaagcagcagttacagcaagtacaacaacagacacagcagccagtggcccagccttcttcagtgtctcagcagcagcagcctcagcagtcagcattgccgcctggtatcaaacctaccatccagatcaaacaggagtcaggtaaatggacagtgagagctctgtgggtatccttcgtcctgggcctgagggtcgtgagcagagtgtgtcttcccatttatttacatctttctacttctttcttcagtttcttatggtttccagtaggaaatgtctataaatgttttttaagctatagccctaagtgattttcttaaagtgactctaaatggtgtggttttaatttccatttcacatacgtattgttggtgtgtaaacatgttgctgaatttgtattcttctagcttgctgaactatattatatgggagtatctacatagatttcttaggcttcctatgtatataagatgtatttcattatgtcatctgtaaatgaggacattgtttttcttcttttccaatcaatatttctcccccaactgccttccttttttaccccctctgtcttatttcactagctagaatatataataagtaaaagggaatcaaagacattcttgcctacatcctggttttggatagaaggcattgggctcagtgttgagtgtgaagcctgttacaggatttgagttgaaataggacatttcttctttcctgtggcttttcattatgactttgtgttaggttctgtcagatgttcttctatgttcaagtgatgtgatctaataccttttttgtatttagctgctgatatgctgaatcatatgagttcattttctgttgagctattcacatatatgaaataagccaggctgggcgtggtcgggcgtggtggtgcacgcctttgatcccagcacttgggaggcagaggcaggcggatctctgagatcgaggccagcctggtctacagagtgagttccaggacagccagggctacacagagaaaccctgtctcgaaaaaacaaaaacaacaacaataaaaacaaaaaacaaaaaaaaaagaaataagccctacttggtcatggtatataattcttcttcatacaacattggtttcggtttttatctctgtataagagaatttttaaatgtatgtatgtggtggccgtgtatatgttcacatgcaggaacgtgtaaatgtgtgaaggtttctatgcacatgtgtacaagtgcacatggaggccagaggttgctgctgctgtccatgatctttcttcaccttgtaggctgaggtagggattctcagttgagctcactgcttgccagtttgcttagttcagttactcagcttcctcaggaattccttgtctccacctctcacctctagagtgctgggatccaggcaggataccattctgcctgacatttatgtggatctgggactctgacctcagttcctcagattatctgctgagttgatttatatttgtcgtatttggtagtgtctttgtctagtttggttagatcaagatactactggtctcagagtgagtttgaagagatgtgagaagattggtattaattccttaaaatcttagctgacttctccagtgaatcagttaggcctggaaatctctattttgtgagcatgtaaattatgaactcactttttttagtggttgaaaaactggattagctatttcatcttcgttgaactttggtagtttatactttttaagttattcatttctaagttgttagaatggttagttgtcattctcagttccttattatcctttaaatggctacagagtctatactgatgagctcgttctttgtctactttgccaagtttttattattattagagttttgctttattgttccaggcccagctgatttattgggagaagtaaactaaatatttaaggaatcaataccaaccattcctaatctgttctggaaaacagaacactacaaactcattaggaccttgataaccaaactagacaaagacactacaaagtaagacaagtaagacagataatctgaactgagttcagagtctcagagaattggtttcagttttagtctcatttttttttctgttttcttaggctttattttgcttttctaccttcttgagaactggaatgtggattattgattaaagaccttttttcttttctatacatttagtatttagttctacacttacagctatgctttgataaatccttagtactattttatcagcatcatacgttctttggatatgttttcattttctatatactttttgttctgaaaccttccccacgccttccttgttgacaatgtatttaggattatgctattctatttccattatgtttggagaacttttttttttttttttttggtggtccttttggtattgtttcctagttggattctgtggattagaaatattctgtgtggtatttcagttgtactaagtaactgtgaggaggataggtggaaatcctgtgtttttttttttttaaagactgttctctggctaggagctgtgcagaagcgtcctcccactccctgactgtagcagtctagagtggaatcaccgcccttctgaactgaagagggaaagaaatgattttggttcagatatcacagaacttgactttagattttagaggttgagttgggtacatgtttttttgttcgctatttatcataaaaccgctttccaaaggtttctcttctattgcattttttttgtattttgtgtagacatgtatgtgtgtatgtactgtatgagagtacgtttgtgtgcgcgtgtgtgctgtggtgtgcatgtggaagtcagcgtgcaccttacaggagtgagttttctttttccaccatgtgagtctctaggatggaacttaggtaagcaggcatgatgtcagtgactttctttacccatggagccatcctttgctgcccaaagcctttgagtgatacttgcttggaaactttaattggttccactgtgtagttttggagatgtcctcctgccagagtaccgactgtggctctccagaatgtttaggtacacagaagtgacagtccttttgaggcagctcgggggccagccacctgctgagagggttggaggtttatttgctttgctctctttttcatgatcagttttgagaaataacgctttttctcagtgttaattatttgatccagattatcacttgatttgcccaggactaagtagaattgtctctgaggtttttgttttttcctgtgatgattatttcatgcagcttctttctgcacgggaattgcaggatcatggttcattagttagagaaaaaaatactagaagtgattttttgtgtataacctcactttttatagtttattatatttagaactatttctgtaatacttattgaattcttgacatgtatagataatttaaaattttatttaatccttaatagcttgatgaagtatatactaattaatttttattttgtacataaaaaatagagtcataaaggttatttaagtaattatgcccaaataccatacttttaacttctttcttagttaatagaagtttagaattatttaaagctgctaaatatctatatataaatatatatctatttctttcctttatgtctcagccgaaatcaccacttgtattagttactttcttgttgatgtgacaaaagccattgggaaaggaagggcttgctttaacttgacgttagaaggttacgtagggaagtaatggtggctggagcgtgaggcagccgtgttgttcacgtagggaagtaatggtggctggagcgtgaggcagcaggtcgtgtggcgtcttcagtgagggaacagagtaggccgttcccttttattcagtccaggatcagagcccatggagcgtgtagatcttcccttcttaacctaatctagaaaacccctccagacatgcccagaggtttgtttccatggtgattctaaattctgtcaaattggtagtcaaggtagaacatcatgccacaccaaaaaatacaattcttaattttctctatgaaaatgttttcttttatgtatcttctttaaagatcagagtgggggaaatggcactaaaattttcttctttagttaccattgtttaaaaatgtactccagttaagatgcttggaaggtcaatataaacatgatagcattgtaaataaaaacttttaaagtcctaacataacttccnnnnnnnnnnnnnnnnnnnnaaaacccctccagacatgcccagaggtttgtttccatggtgattctaaattctgtcaaattggtagtcaaggtagaacatcatgccacaccaaaaaatacaattcttaattttctctatgaaaatgttttcttttatgtatcttctttaaagatcagagtgggggaaatggcactaaaattttcttctttagttaccattgtttaaaaatgtactccagttaagatgcttggaaggtcaatataaacatgatagcattgtaaataaaaacttttaaagtcctaacataacttccttaacaatttttattatatttcttgtgtattgcctttgtgttcttttcacatgcatgttttatataggtgcaatactgatgtggcctttttggcattctatatttgataaagtgagttattaaaatacttttatatgtagaaagatatttaaggacttcgggatatagcttagtggtagagcacttgcctagcatgaatgagtccctgggttcaactataccaacaacagacaaacaaaatcaagaaagttttttttaagctgggcatggtggcacacatctgtaatcctagcacttaggaggcataggcggtagaatctgtagttccaggccagccttggctacataatgagaccctatctcaatacaaaacaatgaaaaatgaaacggccatttaaaaatgttcttggcctattaaggtttttaccattgtatgtcagttcacagagccatgaagagtctttgttgctgagaatctggaaggactatgtgactgcttttgatgccttatgctagtcctttcttctcaagtgcttatatggaacagattatttgcttttgctctctgctttgaaacttgtatgcacacctccatagataaaagtttagatttagttttctttaagaaatctgttaatgaaatatggctgcattcttaaattggtagaatttagacaggaggaatttgaataatgaatttcatcagtattaaaaaggcattttaggttaagcctcagtaagtgtgtgtgactgttgccctattgggctaggtgacatttcttaaacattattttactgagatttatcttttttctttcaaaggtgttaaaatcatcacacagcaggttcaaccaagtaaaatcttacccaaaccagtgactgcaactctacccaccagtagcaattccccaattatggtggttagcagtaatggtgcaattatgacaactaaactggtaaccactcctaccggtaagttctacaagcatcagtccattcattcattcatgccatcagtagcttcccacaccagccgtgtgtgtcatactgcacatatagagatggagacaggtctacaaagaagtcctttaacattttgtttagagacagggtctgtggcctagaactctatgcagctgaggatgaccttgaactcattcttgatcctcctgcccctacctcctgggagctgggattacaggtgtgctccaccacacaggtttataaggtgctgggggtcaaaccaagggcctagtgcatgtgaggcaagcactctaccgaacagttttcaaaagatctttcttgactccctctgctctgtcctgaccctcaagttagctcttttttgatatatttttttcataatcctctccaatttctacttacctagtagtttgttgttttattcatattagacaataaactttatgggactaagggatcaaatctgtttagctaccatatgtaggtgcttgctcaggatttgttgagtaactgaaaatatgcctaactaatgcacaagggctaatgcacaaggctattacttatgaggttaagagttcagctcatgttacataacagtgtagtaagggttgccagggttgatagaagcctgttactattcccagatagaagagcaattagtctgagctacattttaaattaccatcctttgtgaactttataagtattaaatgatatcaagtcaggagctaaggcaatagtttagtggagaaaaacacttgttaagttagtgtaaggacctgagttcaaatccctagaacctacataaaagccatacccctagcaatactagcttatgtgtctgagtttatagtgcagaaagtgtttcttttaaatagttataattcaatgtattcaaactttatacccctgtagcatgtttactttgcatagatatttttccctggttcagatatatgctgtgattagtctaattcttcttaatgttcttctcatggttgtagtggttataagtttttaaagtaagtaactttctaaaagcatttttcttttttctgaggtgggtattttagaaatgtctgtcacacagtctctgaatctaatttcaatttaagcaaatgccatctttgtcttttctgtgtttccgcttcatttccctgaggctattccttcctctaggaatagaatagtctttctaagtttctgggtttataagacactgtaaaagactcatctgattagtttttaatctttctttgggaaagagaaaagtcttgtaatagtgggaaagggtataaagtcctttgagagagacataaagatagatttttctaactggtcagttaaaattgaagaaatatgaaagtagagataatttaagcctaaaaattgttcctggcaattcttggcagcttcaaccatatcactagtaaaacaatggactgatccttaaaagatggaaatctctttaaagaatagcagaaatgttataaaattttaggtaaatgccttatttgctgaatggtgaccgtgggtttggctctgggacagcatgagatgggctttaaatctgtaagagaaacacctacatttcattagcttcagcataagaccagtggaagaaagatagtgggagcagggccgggctctccctttctgtgggttggtaatttgatgctagaacacatcacaaagttttatatgtaaatttaattagaattgacttgacattggttcttgctatacacattgaaaactggctataaaattataaatgaatgccttggcaccttgcagttccattttcaagttaaagtgatatatatgatactaaactatagtgaaattgtatgattatcattctttttgtaagtattgacaattttttcttttcactgctttcttcctataggtactcaggcaacctatacccggccaacagtgagcccatccttaggtcgtgtggctacaacccctggagctgcaacctatgtgaaaactaccagtggcagcatcatcactgtagtacccaaatcattagctaccttgggaggcaagataattagcagtaatattgtttctggtaggtatatctagagtatgttaaaagcatggagctatttgattaggagacaagccatgtttctctacagcaggactctattgatatcaatttttttttgtttcaaaatgtggcactgtgtttcagtccttatgtttagtgattaaatacagtttttagttttaatatcaagtgttcatatataaggcttttgataaatctaaagttgaacgagcacttagttttaagtcacaatgcaaagattatagtttatgtttgcatagtgatttttttatttaataatgggtctcacactgtcaactttttgacttgaggtattgtaccaactttagggctgtggattcagaggtcagacaaagctgcaaaggggataatggaattgaatttgcatctgaatgtatttcaggaatataattcaggtttttagttgctaatgtcactttagcttattaaacataagatatttgaatatcatttgcctttcaccacttatgcagtttgcttttttaaaaatatattactgagactgtaaaactaaccctctgcctatttattagtatgttggaacactccctggtttttattgcctcgttaatctctacagtatttggattatagattctaaagtggaatgttaatgaggcatttgttttcactgattattatttttaattaaaattatgtaaatgatctgatcaagcaagccttatagattttagctgtctactacttttgtagactagttatgttttgtctgtcccaggtgagctgctctaatatttttaaagtgacaggataaagtccctggcagtaatttgatgttgctgataactgagaatggaaaaaagccggcagagcatggcatggcatagagctctgtattcaaagctgttaattttggctccactcttccatataagtgagaaaacctagggtttgccaacctgaggaggaaagggtacattgtgccatagcttttaagtggatattaaataacacagttaaaattctaatttattatttgatagtatctttaaatagtataacgctcctgttcaaacatatttcagaaagttgaccttcattggaaggtagcttttttataaccttttttattaaggatttcttacatgtatctgagttcatagtactatatagattgtaggtgtgtctaaatgtcatgaagtctttttggaactttattcatggtgtagctgttctgtagtgcagtagagtaatataagtatgcacacacacatgcacacacacacacacacacactgttcacctttatattaaagatgaaagtgctcatggttagttgctatttctttcacatgagtgggtggttccagcactgtaggatatgttgacatagagttagaacagtttaacttggtggcaagtacttttaacgacttcctgttccacgcttacctaccatcttttggctccatttcacaatctctattttaaaaaaaaaaaaaacaaacttttattttatattcttgctgtcctatgacactgagattatggtatagtagtttaaaaagtttattcatcatcagcttgtagcaaatttagataattttctgccttcatcgatgagcagatgatgggttctgatttttctctcctacacaaaaaagcatttttgctaaactattctcaacatatggctgtaagaatagaagacttaaaacaaaagcaaaaaaaaaaaatcctctcattgtagggactttagactaaaggtgcaagcaaagctaagacgatagtgtgctgtgtaaatgtttatatggacatcctaaattttaattctttattaataatttatatatttttccatatcagtaaatgtattttgaccatcatcccatggttatatagcattctcttttgtacagaaatttaaccatattcttactgttggatgatttaaattgtttataggtatgggggtttttgactattagatttttttcttgtttggttattataaataatcctgtagtaaacatataaatcatttgtgaagctcttgcttcctttgtataataccttagaaggcagattaaatttagttgaatttttatttttctagaagaaactgatggaaacttatttatatgcatatatatcaaataactttcagatttatacatttttttctgaatgttgttgagagttgattgtagaaatatcctcattttatgcacaagtttgattccttcagagatgaattcattgtcttaaccctagaggcattttggggatctggggcaagacttgattgtaactccttcaatcttcccagtgtccgagcgaggagctgttgtttgtgtactttttgcttatttattcaatcattctttgaacaaagtagcatagcataaagccttacacagaaagcaagataagagtgatttaagaatctggatagtaggaactaagccattgaattttttaagtcaacataccacaatgatcaaactttttctacaccatttaatgttttattttgaagcaggttcttgctgagttgcttaggttgacatagaacttgtgatcctcctaccttagtcaatagagcagtgtaagcttacaccactaagtctggtagaatcattttgattttttttcatagtttgttgttaccgtttgaaacaggatctcactgtgtattccatgtcgacctcacactagctatatagcccaggctgtctttgaacttgtagttcttttgcctctgtagtttacaggcatcctaaaaaagaaagaaaaaaatctgtgaaatgcatcatcattatcacagcccattgtgatccacatgtggttgttatttggtctcattgtggtttacccttttaaagcacagtctctgtaggtaggtcctctaaataccagattctatgtgtggtgctatcgtacataaacattcatgattcagtgtgtaccctaaagaatgctaaatggactatagatgtagctcagaggtaggcctggtatgagcaaggccctgggcttgtttcccagaactgcaaaaggaaacaaaacaaaacaaaacaaaacaaaacaaaaaacagaaaaccacagatgctaaccagcttttgcatattctcttgtgttatgcaaaatgtagaccaactgtagtgaaagcttagccatggcctttcctttttctttttgaatatgtaatacttctttgcatacatttctccttaggtgaaacatgcacactagaattttaggcatttagtattggtcattctagaaaagaattttgttctattttagtatagtgttctacctagttcctgttagtcctttttctcccattttgtattattgaaccctacccccccccccccactttgcctccctgtacccatgtgccctcnnnnnnnnnnnnnnnnnnnntacccatgtgccctccttttggttaaactggtagacgtgatatgactgtctcctaaatcaacagtcctttatattggggcaattctgctgtagatctttacaatacagtcaatattacccagtgtctcatcagtccaaggtgccactattccaagtcttcagttttgtccttaggaccacactccttcaactaaagttgacattgtttagacaggcattacttatatacatcataaacagaaacaatcaagtatcaccagtccttaactcaggcctccttttcttcccccttctctaaggaacgactaccaaaatcactacaatcccaatgacttccaagcccaatgtgattgttgtacaaaagactacaggaaaaggaacgaccattcaaggcctccctggcaaaaacgttgtcacaaccttgctaaatgctggagtaagtaagactataaaaacactcagtaatccactaagcggtttaaaggccatcagaaccccatagtggatggaatggcttgactctgtactgctgcaatagaatagcctttatcatcaactgatgccattttatacagtaatgctgaaagcatgttgcttatagctgctcatagcaggtggcttgttaccatgattcaagtgtttagtttccttcaaatggagaattccgctggtttagctgcaggaagacttggaggaattctgttcctgcttatggttagtagataagcattgatttaggctggaaaaaagagaaatatttgagtttaaaataaaatttatagatagggatttgttacttaaagtttgttgtttattttttattttcccattttaggttctgatggcaattgttaagaggttagaggtagacacacttaggctttgtgtctcactttgtagtttggctatgggtgacttatctaaccagtgcaatattttatttcttcatgcctacattgggtgatgataggtgttttgaaagtgcttaaagcagtgtctaacacatgagaagttctcagtcattgatttcttactgttcttggtatttaagcactcagactcagtagcatccttacctttcctgacctcactagaagacagataaacgcttatgtatcacagtcttttataatgctgaaagtggtccagattaggccttttctgaattcacattagtaagtcaacagaaaagctaggattctgtagtatttggatttataaaaggatgttatctgctatgggagatctcagatcacatgtgaattttttctaatagatatttagcagtagtttagcaggcagtgctagtaaaatgagatcagcctatgggaccatcttcttcaacacacatagtgtgtatttataccctacctgcatcttgtgcaggtccaccacacatgagctttctcagataatactctgcaggctggctttgtttgggtcacagtgcttggaacaggctgacaagctgtttacagatcagcaggatcaatcacagatctttctgagaatgctgcttgcaaacaatatgtgagacttgattggagacactttgtttcttttggatagttgtagttgatagttaggttattaatttttgaacttggatttagatctgaattctcaatggttgctttttagaaagcttacctgattgctctcagtttaccaaatgctaaatttaaaagcccacacatctgtgataatgataactaaaaattaagaaaatgacaatgtgaaaattgccaacccttttaattttattaattttaatttaaaaattaataataaaattactatatttgaatttaattctgttaaattcaaataaaactgtgctgagattaaaaatatgaccagaaaatagtactacagaagaaaacaatggactgaggttatagataagtggtagaggatttgcctagcatttgggaggccctagatcctgggttcaatctccaacaacacacacacacacacacacacacacacctctctcaccacacacacatgcatgcagagaagtagaaagaaaagaaaggcaataaagtaggtaaaatttcagaaaatgctgaaaggttactgggcttgaatttataatggactaaagtagcattgttaacatgctaggagaacatgagaagtgctttacgcgttctttcccctttcctccatgtaaccttagaaaggtgttaatatctctactctttttatctctctcatacgtgtttatacagatatcctactgcatatctttataatatatgcctgatttattttgtatgtgtttgttaatctgctgataagctacatagtttttattatataaatattcacttcaaatgtattaaaaagtaaaaatgagtgtgggagatgacctacaatcttgaacataacaattgttaacattttagtatatgtccttccagaaatttctgttttaatataggtattctatgaatggggtggcataaattcttagatgttcttggatctagtgatttttaaaaacatactcatgagggataatttctgttttggctagaaagttgattgtatgacttgtaatcttattacagtgaagcccagggttttttaaccacttagaaatcttgtactttgttgcataatctacagtccttttctttgctttttcagtgaaaggacagttgtgtttttgtttatttgtttgttctgtttgtttttaatcatttgaatgtatataagtctctttaataattgacttcaacttagggagaaaagactcttcagacagtgccagctggagccaagccagctataattactgctacaagacccatcaccaaaatgattgtaacacagcccaaaggaataggttccgcagtacagccagcagctaaaatcattccaacaaaaattgtgtatggacaacaagggaaaacacaggtatgctgtaagatgtgttaacttttgactaattcccaggtagaaatttcctttcctttcatttttttcccttcttacctccctcctttcttccctcccttttttnnnnnnnnnnnnnnnnnnnngcatttacctaaaattttataacatttctgctattctttaaagagatttccatcttttaaggatcagtccattgttttactagtgatatggttgaagctgccaagaattgccaggaacaatttttaggcttaaattatctctactttcatatttcttcaactttaactgaccagttagaaaaatctatctttatgtctctctcaaaggactttataccctttcccactattacaagacttttttttcccccggcggcctatctatctatctacctacctacctacctacctacctacctacctacctatctatctatcttgaagcagagtctttctatgtagtcctggctgtcctggaggtttgctatgtaaaccaggttagccttgagctcacagagatcagcttgcctttggtaggactaaaggcttgcactactatgcctagcctgatagaaatgttaaggaaatgatcaatagtctgataaaagaaacaggttttctaaatactgaatgcatattaatctgttcttaaaacctgccttttttctcttcagtacttttaaagataatctgcatatatctgtcacaatatgagcaaaggcagggaagagaattcctttgggataaaatttcctgaagatatttatgactgtgagaactggatagctgaggaggacagagaactggaaactagtttctttctatgaatggacaggatctgcacagatgcttatgaaagatacttaagaaagtttgttttattccagccctacataacagatgctggtgatgagttcattttcagactgtaaaagtctgagaataagggtataatctcaccttggtttaggctgttgactttgtaggtgcttttctgagactatcgaagcagtatcagctttggttgagaaatagaatcatagagtttttgtaaaaggtattcatctaaactcataattggcttttggaatctgttccttcaaaactatagccattgtttatatattttaaaaagtagctttgttataagcttaagttatttattcagttcagcagtaatgatttcatttgtttcaccatgtaaattataacaaatcatgtttttaaactcagggaaatcagtgctttaatagaacctcatatatgggtcagtagtagtatttttggtggtgatggtggtattgggtatgagtcagtatttttattccatgagtccaattaaatttctagaatccagatactgaaggagaatgtttcagtatgattgtatttttcctggttgacttgtttagtgtctgagcttttaactttgctgagttgacctcttgctgctgcggaaagcactttatatcagttttcctctgtagttccttgagtgatgacttagatttcctgcagtttgctttgtgaaggtgtgtcaggaattttatttggtttctcattaaaagaaacttggaaaattgtggcttgaacaaattatggtcttggttttattctgttaatacaagttgagagagaaagctcaaacagatactttggttggaaaaattctaataagtctagtttacatgtattttttattttatttttctaccactcagcttgtggttgttactgtgataaatagtactgaaaatgatttctaaagttagataagaaaaacaatggaaatacttgtcagaattatagctttgggagactaataagatggctctgtggtcgtgagtgcttgttgttcttgcagaagaccagagtatcattccatgcgcacacattgggaggcttacaactaactccagctccagaagatccagaccctctctggtccctgagctgtgcatatacatgtaaacagacacatacattaaaaaacaacaagaactaaagctgttatgatctggcatataccacttaaaatattgtacgtagcttagctctagttcatctgtggattttagtctttggcaacaaatactgtgcccaaagcctaacgataaatatgcatgatggtaatttgtctatctggaaaatgacctgtaagtttagcgtttgtttggttgtttggttttgagatagaattttatcctagccaaagttggcttcgaattagtgacagtcttccagcctctgtcttccaagtgctagtgttataagtataaacaaccatgcatgtctaatttagcatttaaatggggctatgatatttcatctgggcatttctgcttttcttctaggttctaattaaacccaaaccagtgacatttcaagctacagttgtcagtgaacaaacaaggcagctggtaacagaaacattacagcaagcatccagggtagcagatgccagtaattcatctgctcaggaaggaaaagaggagccacagggttacacagacagtagttcttcttccacagagtcctcccagagttctcaaggtaaggcttactgtacttctgttcatgcgacgctgatgatgtcatgactcagtttctaaacagctgctccttctagggattccaaatcaaactttatacttttgattggattggattttttttttttgtctgtttagtgagagagataaaatcttatttttggcatagcttaacattattaccttttgtcatatgttcatcaagtcattgataggttttttttttaatatgtaggcagtatcaaacaactataacttctagatggcaacttttatgtttttcctgtttggtatgggtaagaagaggaagaagtatacaagaaaaaggaatgtagtttttcaagaatggttgttgctgaaccttgaggaagcatcaaggtgaccagaagtgagctatgagtgggtggctgtacatcctggtttgtatggatcttagtttatgtctgttgttcccacataattattaataacattttatttaactctcaaaaatattccagatggtaatcagtggttatcccaattattagaagctaagcagcacagcaggagataatctttagtattgttctcaatatgacattgttctaggatgtctctcaaaatataaactcatggtctactctgaagctctgagacattgtcttttgttcatattactcagttattctgagtgcccttgttgttgggtgccacaagctgaggatcctatatctgaaacacttgagatgagaatggtcttaggtttcaaattttgtatttgcgtgtgtgtgtgtgtgtgtgtgtgtgtgtgtgtgtgtgtgtgtgaaaaagagaaggaaagtggggtatcttacagatgggatcagagtctaaatgatatccatgtatgtttcatataacccttctacacttagtctgagggtgaggtcacaggtcttgttttcccctgcacctgtgttttgactgtgactgtcatgtgaggttagggatgaggttttctgctagtaaagtcaccttgctcagaaaggttcagatgtggagcattttggattagagctgttcagcctgtgtgtatgtctatgcttgtgcaacctgatgcatataagcaaaagtgttcttctttcctctagtccttgttcctctcttcttctctgcctctgcactaaccttgctggtatgcctgctgcttttttataaaagcactgatagcacatttttttcatattatacaaacactttattattttaattctccaatgatgccttcacattaattttatatggtttacatagttgtatgttatttgttaattatttgttggtttgtaatatgtactaagaattatgtcagatcttattaaagttgagtaaagtacagttcttgcctttttttccccctgaaaatggccttgagcttctgatcctccttccttcatctcccaggtcctggggttacagggtaaagcatcacacctggctagatcttaaatctaggctagtacattagaaaaattcacatacagttgcagcatacacatttttcttagtagcgaacaaaacaatgctaaagactaaaagtccacactccaagaaaaagaaatgcttattcacagagcaagtagaaaatggtctttgaaagcttgtcagttaaaaataaataagctgttgatttcaacaaacaatatagcacttattttagaaagtaagtagtttttctcaccctgctatcagggtaataattgcaagtcattttgctaattctcattttatcttcctgctgattgtaaatcagtttgtaaaccacttacaatgtgtggctctgattgccagccattcctacttgtttatattttgttctacccagctggtggtttcatttttaaaatttttatttattttttatgtgtatgggtgttttgcctatgtctgtacaccagcatacatgcctggtttggaagaggccaggagagggcatcagatccttagggaatagtttagacagtgtgggttgccatgtggcttcttggaatcaaacttgggtcccctgaaaaagcagccagtgttcctaaccattgagctatctctccagccctagttttatttttgtattttaatttttggttctgaagatgagacttatgtatatatagccttatacatggctaacacacgcactgccactgaaataatgatagccttgctttattacttttgtctctagtctcttttctgttgtgtctattgtatgtgtgtacaatttttaagtcttttagccagttaaagagtagttataggtactatgtgatttaacctctaaacagttattttttaggtctctaatttcttatgtcttatccttgtgaaactaaattaccattatcaaagtcaagaaatttaatgtaatactgttagctaatttataattcatctagatatactactaagtgataagtgatgttctctattgctttgtctcctagtcacgttctagctcagggtcacatattacactcagctatgtgacattgtaactatcacattactgttgtcacttccttctctttcccccttcctcctcttctcactgtgtaatcctgattagcctggaacttgatatgtagactaggcaggccataaattttaaaaaaaaaatctgcctgcctcttatgagttctggggattatagacaggtctggccctcctctttgatgttttgagacaggatcttattctctagtccaggctagactgaaactcatggagatctttctgccttagcctcccaagagctcgaattaagtgtatgggccatcatttctgatgccattagcattctttattctcttttgccctagatagcctcttaatcctcactttcccccttgattatgatattttgaagagtttagattggttactttgtagaatcttctttatgatttaattcagtaggaattgtacaggtagatgactatcagcttcctcaggtagacatgatgtctgccacattgatgagaggaatggtggtcacttggttaggatgattgcttctagttttctctgctgtgaagttaacatattcctctttggaattaatgtcagttttggaggaggtactctgagactgtaagtgtagcattcctcgtcagtcacttgtccatacattgtagcatctatcgatgattttttaaagtccattattctttgttctgttctaaggaagaattgatcttttttgaccgaagagttcttttcaagggtttttcctgtacatgctggatgctttagtggtttctaactatacccaccactaggaggcatctaggccccgggtttaattcctgaataggtagagtagaaagccttgggcatcttcttgatgggaatcttaatcaccctggcaggactcatcacaccatattatatatctggtactgttttttatgttaattttaactactttgttttatactttttgttattgttttcttctctgttggcatcttaagaataacaggggaatgattaagcttcatgcttataaactcatttttattgcctcattccaaaacattgtttctcctcttcactttctcctaacatttttagacttttgtttgaatattgatagataataagtttgccaagactattagatgaataacatttttgcctgtgtcactcactgaaacccagatgatgtgttttctgaagctacttgccttctatcttctcaaatagctcttccaagttttctttctcacttgtaaagtgaggtaagtatccttattggtgttcagatttttttaatttttattattttttttacttatatccagctttatttctaaaaggttgtgggttttgtttgtttgcttgcttgcttgcttggttttttgagacaggatttctttagccctggctctcctggtactagctctgtagaccaggctggccttgatctcagagatctgcctgcctatgcctccgaagtgttgggatcaaaggtgtatgccacaccgcccatctaaaaggtttaaggtggattgaatataagattctattaagcaaaccagaagagaacaaggaagtgaattgagagtagacatttaaaggagcagaacatgagtcaaatttgtaaataaatgtcataaagatacagttttaattaagaactcagtttctggcattactttttcttaagaatcatgatcttaggaggccagagtgaaggttttgtttttgtttttgtttttgttttgttttttttttaaaagcaaacatgggtcatataaaatgtactttttgcagaatttcattagctaacttatttggtaatttatattattaaaggtgaaaactaggatatctaatacataatataaaatgtttcccagtgattttgaccacagaacccttttttttgcagaaaattttgtggaattgttgttctctataacattgggacaatgcttcagaggaaaggcttatattctaacacagaaggactatagacagctcggccttagctcggaagagatggcttagggaggttagacatctgggaatcgttgtgtgtgaaggagtggggatggattaggtggggttctgggactgttagtcatgttgtgctctgtggtataaatgaagtgagttggcctttgtaggtgagtggacagacaatagtactgttgtacagatgacagaaagatctatttctactttatgtaaaaaaacaaaacaactttgtatatcacagctgtgcaggcagaactgaaaaggaagtattagaaagtggcgggttctctgatgatgactgcatgtggaagtatgtgaaaaggagtattagaaagtggcgggttctctgatgatgactgcatgtggaagtggtagagggtggaggagaacattgacttttaagatcctgctaagttagaagtcttatgattataaaaggatgtcacagacagtttatgacaaagacatatcatacatgcctgggtttgcctttgagtatagtactaaagtatggattcctggtacctaatatgcagtagacatctaatacataattgataaagaaccagtaaggaacgtctgaagcaggccactatccgtaagaagtacaaaggtctagtttagacatgctaatactttgtagcatacattgtcatgttaaaacataaaacatgttagctggacacctgaatgcctgctgcagaaacaggagatcagattcctggtgtcctatgaccgaagcatctctaggtttgagcgtaagcccaaattgtagaaggggggagactgtcgaaacagtttttacttagttcacactttcattttgtttttgtttttttttaatttatgtattatatgtaagtacactgtagctgtcttcagacacacttacggatggttgtgagccactatggtggttgctgggatttgaactcagtacctttggaagagcagtcagtgctcttaactgccgagccatctctccagccctccactctcattttgtatcacagttctttgggttgctgtctgattcttggtgatcatcatctgctctgtatggacagaaagaggtggcattcgcccagtccctaaggaatggttttatttggagagatgttatttggttagcactcctgtagatacatagtccctactctgaatatttagtgtatctcagagttaggttgcagagactcactctctttgcctctttgcctatatcagcaatgagaattagtttttgtttttgtttttgtttttcaagacagggtttctctgtatagccctggctgtcctggaactcactttgtagaccaggctggcctcgaactcagaaatccgcctgcctctgccttctgcctcccaagtgctgggattaaaggcgtgcgccaccacacccagctgagaatttgtttttgagacagaggcccagactatatggcatccaatttaatgattctctcatatgctcagattataggcttgtgttcatcatgaaaatttatttttaatgtatataaaatggtgcttctctagtataatcatttctcaggttaaattttttcgtattaggacattaggggtgtatcttagttagaaaagcacttgcatagtatacatgcaaacctggtttcaatccccagcactgaataaatcagacatggtggtttatgcctgcaatcccagcacttgggaggtggaagcaggagggtcaggaggttaaggtcattttggctacaaagcaaatttcaaactagcctgagttatatgagagtctgtacctaagcaaacaacattttctatgtatcttattagaatatgtaatgagagactgcagtattcttcacacggcacttggcattgcaagcgaacagccagtccttcccatgtggttgaaagcttagtagaaactgaatgtctctggtgtgatggtttctactcagggtttctgtttgtttgtctttgctttggggttagtgtgctttgttttgctttttaaagacaggatctcatatagtccaatctgggcttacagtactatgccaccacacctgacctgttagtttatgattattaaacattataaacttcttgcatattgatttttttcttcagaaaattgtttcattagaagaatgttgcctttgcttcaatatttttggacatcctcctggctttaaaaaatgtgatgttcttagagggtgaacttgatggttttttttcttgtatttttgagccaccagataatttttgttctgatgcttcaactaagcagcatgattaaaagcagtctcttttcttgttttaaccatttgatatttaccccagaatctgatgctatctgtcagtttttgtttcttgtaacaatctagatctgaactttaggtatcatgtccttgtatctcctccattttcttatacaatatctaggcaaaatggtacaaccttctagctttatagagaactgttaaatatgtgttgcttaatatgattcacattttttatttacatgtgctgaaatttattttcaaatcaaccaaagatcttagaattgaattttcagccaaacccccaacaacctcatttctactgacttttatagtttatgaagcttagttacatatgatcatgtagcttatactgatatttcagtcagtaatgtgtgcatatatacacataaccatacatatacatatgataacagtaatagggtgtgccatatggccttcctctagcaagctatttcttctgagtgtgtgaggattgcctatggttcttctcagaatgtattactgttgttaagcagcccagactatcattgctttacccaccccttgttcctattaaagagcagagctaaaacccaaagaatcaacttgctaataagtgacaggcttccactcgtcacgttacgtcattttgtttctagactgtcttttcttactgtcagtaattcagcaaaatattccccaagtacttaggcttcctatagaaatcttttcatgtacattgggaaaaaccagtctcctatctataacattttgtttttggtgaacacaagcactcacctatatagatgctcacccacgtagacagcagttagcatattgagttgtactttgtctttttacatgttcgtcttttcagacagactgtgtgcttcttgagccttcttgaactattttgtgagttcctttaagtcctttaaatatagatcctgatgcataggtgtctagtgtcaaataaatgtgtgagtgaatagagtcaatgccttctgggacctcacagtcttcttagagaagtcaaggttgacatgtacattaaatacaaagataaacataaatattgctttattttaagagaaactttgtttatagggtttgtttttttttaactaatataaaacagattcccagcctgtagttcatgtaattgcttcccggcgtcaggattggtcagaacatgagattgcaatggagactagccccaccataatatatcaggatgtatccagtgaatcacaatcagccacttcaacaatcaaagctctgttagaactccaacagacaacaggtatgaattcacatgctcagctgaatgaagcgtgttttctctagagaccgctgttacatagtttttataaatttttccccctctggacttatctgtaattattggtacagtttattgttcttttagatgtacataggagtatgaagcatagacagagtgttgtcattagaacagagatagagtagacagagtgacttctacttcaaatggagaatcctcttgccagcagtgggaagggggttgtcacttataagcacaaatgcaggacaaggataggtgtagcccagttgctgggtatatttaggaatgtccggacagatcgaagggtcctgctttgctcatagatactgtcagaccaattgtgtaccataaaacaccattagacttgcttgtaaacattctcatgctctcaccttattttcagatttatttatttgtgtttaagttatttgctagagtgtctgtatttaataggatactatcagttcttctagttactaaatatcttcagtagattctaggacaactctatgtaagttatactggctttttgttataatagggcaacaattatgcaactattttatgggttgtagtgatgatctcatctgaccctttcctgttttgaggaagttagcagagactgagaaaagttgatggccagagccggatctgcttgtgggatcgcagcaggactctagatttggtttctgtgtttaaaatgattgttttgcctttgtcatagtctgcgcttggtgggagcagcctttagtggacttacttagtagcgtttattgtaattctgtgctgtactctatactcattggatagaaatgtagagtattccttctgctaaatgtttttagcctttgacacctttttttccagctgtttgtatttgaaaaaatttaaccatttttatcgatcattcatgtagatagaaatgttgagtgaagagattttgttgaagaagtggtaagaagagtaaaaaagatgcatcttaacatataccattattagttacaggctgttttatcagaaattttagccatacagaagcagagcacctagtctttcctaacagtgaaaagctttatgctttattcctttaagagtcattaaagacttgtaacagttttttggccaaatttgtacacacacacacacacacacacacacacactgacagggtctcattttggcctggatatagcccaggtcagcattgaactcagcaatcgtccttcctcagaaaaggttctatgaatttccctccttattctggggctcaaactcaagaccatgcgtatgctggacaagcacccagtgtctggataacattcccagacccttggatttttagtaagtcaaatgaactaaccaatgggaagtgctactctgggatatgctctagagcaggtcaagctgatgtgaactgagtgtgccagggattactttgaatacaaaggaaataacatcctaggaggagtgaaagaaaaaaaaagagagaaacagctggctggcctggagtaatggggggacttgaatgtgattgcatatgaattattgtaggctgctgttacataggctgtagtctatacaaccatacagagcagtctgcagtttccaattcattgttttcttagccactaatggtaggacaccccagaggtctggttcattattcccatagacagctctggttttagtacttgtttataataaaagtaacttttccccgacttttttatgcagtaaaggaaaaattggaatctaaaccaagacaacccactattgacttgagtcaaatggcagtacctattcagatgacccaggaaaagagacattctcctgagagtccatccattgctgtggtagagtcagaactagttgctgaatacatcaccacgggtaggtgtcctcttaaaacatagtaataaggtagtgctacctttgcggacttcatggggtgctcatttggggaagacatatctatatatttctagctcttttcctgttttactcagagcagattgaattatcttcggagtttccctaactttaatacccccccccccatttccctgactttaatcaatcaatctctctctctctctctctctctcccttatttctctgactttaatcaatcaatctttctctctctctctctctctctctctttctctctttctcactcacacacacacacacacacagacacataccaaaaaaaaaaaaaaaagcagattagatacttaagtgtggtccagcaacaaaatactaatgagatttggggactggtacctatggagaagtgaaactctttctcttacattcgtgtgtagcctgctttctgtttggatgcgttattattttgagatcctaaggagttcaggggtagtgatgtgaataacccagggtgagagagatggcatataaagcaagcccctgtcttgtgtttttataagcagtcactaaaggatactgtaaagtttcaggtatttgaaaattccagatgctgtggagaaaaagatttctttagcattatttgaggagatactaggactggtgaattaaaacttcccagaaagaaaatctgatgaagatagtagaaaactatcgacttcacagatattagcagaaaagcagctgatgtggaggccagtctgctgaggaaaggaatgttagtctctccagtagcctagactagcaaatagtaaatagatgaaaagacctgtgatttcttcccttacttatccttttcagaacgcactgatgaggggacagaggttgcttttccccttctaggtaagtggtgtgcatccatcggtagtgtaatgaaaggttgatgctgactaattgtgggggaaccacttaaatggatgcgctctgctctgctctggtagagggaaggtaagccccactagtaaagggaaggaaaggttattttgaaaataacagtgaagcagacactttgctagaaaagaaaagaattgtctactataataaatggctggtttcggggcttatgtgggccagttaaggtcccatcatctatctcacggatattctttctgtgacctccttccataggtgccacctcttatacactcagccatattgagcattctctttgacctaaaagctagctgctccgggccctgctttgttctgtactagatggtagttttcttagctttcattgaactttagtctcctacactctggacatttggtaagaagaaatgtataggatcttgaaggagaattatttttagataatgttatttgatcttttattaagtccaatttgtttttatttaatttaaaaagtcttactgttggggccggtaagagtgggtgttgcttttctagaggtcctgagtttggttcctggtactcatattgagtggttcacaatcacctgtaacttaaactccgggctatcaaatacctttctttggcctccatagtcacccagatatatgtggggcacttgtgcacacacacacacacacacacacacacacatacacacacacttacttgcacacataaaagtaaatgttaagtgctggagagatggctcagtggttaggagcactgatgctcttccaggggtcctcagttcaattcccagcaaccacatggtggctcacaaccatctgtaatgggatctgatgccctcttctggtgtgtctgaagacagagacagtgtactcacataaatacaataaaaaatctttaaaaaaatgtttaaaaaacttattgtagtaattataaaaaactagtatggtatcaaaatggtctatataatctgataatttcaccagaaatttattatttacctttcagatgtcatttattttgatgatacttttatttaaaaatttcattgatttacttgcttgagtttattgtcataattaatttttctcctatttagtccttttgtaaatgatttaatttcagtatatgttaaaatgtaaatcctggctctttattttcagtttagctgagaatatatggaagattttattaactcataatttaaaatgcacatagtaaaggcatactgtgaaatgcagtgaagtagtggagtgtagaatcaaagggttctaccagtcgaggtggtaccgtttgatcgcatggcacatatagctatatttgtagttagaagctctgaatctgcgagtgtaacgaaaagagagttgtaattgcggctagagctgtagtttagtcctctgaccaccacacaggcacttggccctgtaggtgcagctcactcttgggcattctgctgtttctaagcatggaacagtgctacttgaaatatgttaaccttacaattatgggacattggaggcgttttcataatctcaaaacccctagctcatttacacatttggtttttttaacctatttttgtcacaagggttttcttcccagtggctaatggcatttgagtgttttgtaggtttggatgtggcaagtgtttctacttaaaagttgaactcggggctggtaagagaggccccagactggcacctatgtgaatgggtagtttgaatgagtcctctggcaggagaggaggaaatggggttgatttctaggccttcactcttgctgttctatttgagctaaaactgaggtgacagaatgaccttttttcctgttgacccttttaattttaaggaccattttcaaccatttcttcactggtctcttgtaagaagaaacaagttttatcatcccatctaaacacaggccaacagagcgaggctctgagttttagagctttggtaggaagcacgtagcttcagagccacaggagtagctggggcacggtaggagggtaggagggagctccttctgcagcctcactttgtccttcccctggacccacgaggctttctccgcaagcagttccttgtgtgtaaaggaccgctgcgctgctcgttgttcccattgtccttaatgatggctctggggtttatggaaatggttgttttcctgtgacctcagagagctaaaagtcaagagagaaaagccaacagttcactaaagggtgtcactttaaaggtgtcccttctggatgataaaagttttcacagtacctctccacttttttccccctcatcattaaaatagctctgtggctcccattttgcagatgaggaagcagtttcattagagactttctattagagtcccacagttcctagattgtcaggttctggtcttctgcctctaagtgtgtagtaccactctgggagatataagctcatacttatattgtgcttaaaatgatttgtcactggttacaattgctgtggtgatttctgaagaaacatcaccacctcctctattttcagtcagccatcgctcccagccccaacagccttcccagccccagcggaccctgcttcaacatgtggctcagtcacagactgcgacgcagacttcggtggtagtaaagtccatcccagcgtcttcccctggagcaatcacccacatcatgcagcaggttgtacctccttttcttcttatagtcagtaactacggtattcgccaaataaggctcagtttatcttctatttgaagaagaaggcatacctgaatagtagagtgtatccatctgtgaggaatgaatagagactgaattggggggtctgaacaccaggaaacgattagaaagcggtatgtttctctttttcttttttttaaaacattctagaaacagtatttcagaagagttgggttgtctgggtgaatctcatcagaattggtcactgtctctgtgacattcttactgttaatacagatttactaatagagtaaataagattttcaaaatgaaaccttatttggcttgtttagttgtttgctgctaagttcgtttttgtctttatactttataataaatcattattattattgtgagagcactatgaacaagaagggagataaatattttactcctttaattatatgtgaccaataaaagaaaactcaagagaaggaaataaactaatatcagatagaaatgcttggtattaaggctaatgaagaagaagaaagcctcgttgttaagttgatttgtataagactccatgctctgagctgtgagtacattcatttgattcggaagagtaggtgcatcatccctcttacttgccactcatgtaacatgcaaacccatagtgacagtttgccacacagctgcatcctagatgtcagattcagctgtgactcttcttggtagtctaaatttctttcactctgctgccagcagtcaaatctgactgtataagacctacctggaagacagtgaagaggtgttaaatcaaaactgtgtatcagggcattaggaaacatgggcagttccagttttcaagatagagtagtggtgtaatgtatgacaggataccgggggttaagaacaaggtgcattttgttgtgtcccaaaggaaagccatctgtctaacgatttcactgggtgacagatcctagtctgtcctttactggtaggtcctgacattgacatttctcagtgagacaggctggctctttctcagtgtcactcagaatgatttctcctcccagtgctagttatctcagctgagcacaggcagtcattctcctttcccacgaagaggactgacttatcccctggctcactcccttccaggaaccaggtctttgggaagctgtggcctggtgaacctgagactcatacaccttggtgacacagcctctcctcagggaggcctgttgtgagcattggggtgggcacatctccagacagtatatctggctttgggcactgatggtatgcatgtggccaaagttcttggttctgctctgggtgccttacttctcagttgttgccttctgtctttagacaggtgagcgagcgtccctcaagcacaggcttgagagagtccctgagctggagagcctttctgttctttatgagctgtaaggtcactgtactcctctctaatctgtaggttctgggctccctacgatgatgagtggactggtttttgaagtattcactgtctgagagttaaaattacgagttttgattaaaacttttgattagagccttgaggctctgtgatctttttagactcctcaaaataaatatatgaatctcacatattttccagttcaaggaagatgtgacactataggtgttttttttgttatttcattcttactctctgtctctcttacctaggcattaagcagtcacaccgcttttacgaaacacagtgaggaacttggaactgaggagggtgaggttgaagagatggacacattggatcctcagacaggtctgttttaccgctctgccctgacacaatcgcagtcaaccaaacagcagaaacttagccagccccagctggaacagactcagctgcaagtgaaaactctgcagtgcttccagaccaaacagaagcagaccatccacctgcaggcagaccaactccagcacaaactcacacagatgccccagctctctatcaggcatcagaaactgaatcctctccagcaggaacaagcacagcccaagccagatgcacagcacacacagcatactgtggtggccaaagacaggcagcttcctaccttaatggcacagcccccgcaaactgtagtacaggtgcttgccgtgaaaaccacacagcagcttcctaaactgcagcaagctccgaaccaaccaaaaatctacgtgcaaccccaaactcctcagagccagatggcactcccctcttcagagaaacagcctgcaagccaggtaacagaattttgatagcatgcaaagttaacgcctgtgttcttggattggggggggggggtaggcgaggttttttgaggttgtcaccatagctataacatgccagtagtgctttctgtaggcaagaggaacccagaagcctgattgcactggtgttggtatcaggagagaggggcactgctgatataggaaagcacagctctcagcccgccttctaggtagtttctaaaggaatcactttcagcagtgactaacagtgcatgaacatgacagttccatacctctatgctcatgaacttttacttctgtggcagtgatgctaagtaaactgcagtcttttaaggaacatcattgaccatctatctcccttactagtatacatctttaggtgaagactttaccctctacacttatcatctagataacagaggaaatatatgggtaatcataagaaattttgctaacaaaaatttactattctggattgattatatatatatgtgtgtgtgtatgtttattacaattcatatagaatatgtttgtacagttgtaccttgaagcaaaagattgaaaaaaaatccaacttactttaatttaaaaagattatatgaaatcatttgagtgggatgttaagtctcaaaggaaaactaggctgctgggaattcttttttgcttttgttttttgtttttgtttttgtttttcctttactgcctcatagcttggctggctgaacaaaggttctttcaacccctcctctttccctaggttccttaaaagaaaacagaaccttcccatccaccctcttactaaaacatcgagcttcaaatgtcttcctagtataccgcacgaatgtttcttttaccatattttctggagtgtttgattagtttttcctcaaagagatgtagctataatacacacaaccccaatttgttttcaggtggagcagccaattataactcaaggatcctctgttacaaagataacatttgaggggcgccagcctcccacagttacaaagataactggtggcagttctgttcctaagctgacatcaccagttacaagcatatctcccattcaggcctctgagaagacagcagtgtcagacattttgcaaatgtctttgatggaagctcagattgatacaaatgtagaacatatggtagtggatcccccaaagaaggctctagccaccaatgtgctcactggtgaggcaggagctctaccctccacccatgtggtggtggcagggatgacgaaatgtagagagtcctgttcaagtccatctgctgttggccctcccctaacgaccagaaaaatcgaagcagcaggagtgcctacgacaggccagttcatgcgtattcagaatgtaggccaaaagaaagctgaagagagcccaacagaaattatcatccaggtaagaactgcaaggaaatgagacatctcgggtagatgggaggctgtgggcttgatccattttgggatgtcacaggactagtcagtcacttcaaggaagtaacaaaggacagagatttaaaaactattataatatacaagtttatatttagtttttgttgttagtggtctttttgttttgaaaataatcatagagacttggtggatgtagtcagacagcatagtgtatgaccataagggccatgcctgtgtgtcagctttgtttgatgtctgtaccatgcttgcagtgtgttgactagtgcgtttactcaaaagatcagtggtttcctaggcttatgctttggactcctcagtctgacaaactggaatataactgcttgcccttctgtttagctggatttcagggacactttataaacagttcttgttcctcatctgaatctgtggttcctggaacagtgagacttctgttgactggaatgtctgcagaaacacatttttatgtgtgtttctaaactacttgtacatttaagctgtcattaactgtaaactctgcttcttgtgtcagttagtatttgatcatcttgttaaggagatgtcaccacacagggaacagtttgtcggcagcccaccttcttgatctttaacttctttgttctaaaagtcatcagtccttctgttacagactgagattgaagactaaccctgagtccagacagcccttacaagttatgttttatttctacctcttgatgcaaggtgttaagttttttttttttttccctgatagtagccgttttattttcccaaactggtacacagtttggaaaatatcagagcagcccattttagttcattaaaaattcctacttatagactggtagataatttagaattgacatagagccactgttgtatgcgtcaaaggtcatagaataagctttccatttgcagtgattccaagctatgaaagaatacaagttgactgctgttaaaccaactgagacataactaaagtcaaagatggtaattaaggttaaagtggccattgaattattcaagtattttgtttctatctataaaagtgaatttaatgaattatataattcttaacaaaaagctttgttgtgattcctagttttttacctgaaggctagggtattttagatttgccattcattactttgggctagacagctaatttcactcatctcagtttcctcatcagtggtgagaataaaaagtacctaatttatcgactcttatgtgatggttaataaaattaaggattaataaagataaatgactgcttcaatgtttgttcaacatatgagacctgctactgattttactaaaatggattgtgccaactagaggttagattgctatacacgtttggagtggcttagttgaaaattatctttctgtgttacattagcaggaatgaaatgtagttcattcatgtcaaggattaggagcagaggtgtggtataactgatatcccttcttaaaacgtgtctgtagcacacatggtagtgcatacctgtgatccccacacttgggagggagaggagggggaatctgaagtttaaggtcatctcagctacatagtctgttaaagggccagcttaggatacatgagaccctgtctctgccactcccctccccaaaaaaggttatgatgaaaaaagaatctggtaggaccataagtcttagcatgaggccctagtatttacctagtaatattttttagttgttgaaatggcagacttttggtcttatatttgaaaaccttcactattgctctaaaggtgattgtgctatgactaaacaaatcatcttctctttgagccaccaaaggggtttaaaatacattgtttgtcagcaatcaatcatttatcttaaagatgaagaacaaaaatatagtacagttgaggctgggtgtgaaagtgcatgcttttattcccagcagtggcaggtgggtctcttgtgttcaaggccaacctggtctacagatggagtaccagacagccaaggctgtctcaaaaaaccaaaacaaaccaaaaagaaaaagaaaaaaacaaatggaaaaaagcctgtcttctgagtttggccttctttgttagaagaggcctcctaagggaatagaaagccacagttagagttgtgtgggatttgaggtgggatctagcattaaccctgacagctgtgaccttgaggacatctcttacctcctgtttcctcacgtgttacatggaagctacagtttccacccaacattgttacagatgcagtaggataacgtgtgagatctagcccagtgcttgtcatgggaggtggtccaggacatgccagctttctatgcttgggggtgggggggggaaggacacagtctcctcttggcttttccactataaacattctcttgtgaatcttctcttccaggccattccccagtatgctattccttgtcactccagctccaatgtggtggtggagcccagtgggcttctagagttgaacaacttcaccagtcagcagctagatgacgacgagacagccatggagcaggacatagacagcagcacggaggacgggactgagcccagcccctctcagagcgctgtagaacggtcctagtgtgcagacgccggagtgcactttagagcctgcgtggttaccaaatgtccagggaaacttaaaatttgttatagtaaaaaagaaaaaaaaaaaaagaaagaaagaaaaaagcactttgctcatatttaggctggggacctagaagcattttaacaaaattaaactcacagaggaatgtactttaaaaaaaaaaaatagaaaaagaaaaaaaaaaaagcagaggaaacgatgcaccccatggagcccggcaccttgttggtgctaagcagcgagaagagactttcctgtgagtggtcctcgactgctttccactgagcaaataccaccagagagtatgaaaaggaaaagaaaggagaatatgaagagtttgtatttttgaaatgatgtatctgaacagtttttcaaaaattgtgtttgtttttgcaaatccctggagatgttgatttggctagcattttacatttgctcagttcatgattagtttatgaatacctagggaagtcctggcattggagtccttgctggacggtagacatcagtcaggttgctgcctgggcagtttggggtggcttgtacatgtgctccttggttgtatactaatttattgtggagttccacacttgcctatttatttaatgtaaatgttttgaagcaggccgaatcccttttcctacatgtcctgggaagctggatccctggccttcccaccttcccaccccctcacccccctttaagaagacggattagagaagatttggtccggaagcagaggaaaagacatttctagcccaaaggaaatgctcagtggtgttcctgaaaatgagctctgctcattggatgctttctcgacaccgacgttgcacacccgtgttggactgagactttgaaaacaactttgacttactttggtttaaatcctttgaaatgtatgaaaatgttcacttacagttctaaatgtaatgtttttaagtttttaattttttagggtgcagtttgtttacgtgcaggtgtggtcttgtgattgctgtctatcacaagtagagtgaagggtaagggatgggagggtaagaattttgacaagctgtggcaaaggaaactatacctttcatttttaaaaagtgtaaatagaaaagtttttaacggttttatatgaatttcactataaataagcattttaagactgacaaatgttgaactgtatatacatttatcagcttaactgcccagtttttggtgctgaagtactgtaagtagaatttatcagtagcgtcctaatttctgtgtctacacctggggagaagctgtgatgctgtagttaatcaacttacacaagtgcttacacttgtgtaacttacactgataatctcggcaggagcatccctgagacacctaccttgtggtggtgattgtccccatttctactaggtgaaagttactcacccatagatggagctcttggatagcattttattgtacaaatgtgtttcaacaaccactttgtgactgttcctagctaaggggaaatttaacttctcttgggtcatagacatctttaagaagctgattattctatgaactctctcaccaaaaaaatacacatgccaggacacgtgttaagattttgcatacaattttagggacttaagaactcccaagaccatccatgtattccaggttaagccttctgttatggtcagctcattacttacaggtgtaagtttttatcaaataaaatatcttttggatacacatggatcaggaaataagaacaaacttgaataagttatgttccatctctactatcagcataccatgtccgtgttttgagaatatagcctctctgtgctccagcaggttaaatgacaaatgagtctactttagtctgcttttaaagaatcacttgtgcatatatatttgcacacatacatgaatatcaagtaagatttattttttttcctttgaatggttctaatgccaaatagagcatgattttatgaacaaataatattcactcctattttatgtgccaggtaaggctctagccaccaaggctattacagtgaggacatgggaaatcctacccagatggagcttacaggcaaggcttcctgctcgtgaaggaagggggagcaacaattccagagttctcctcttttttttaatcagcacatattcagcatatgtagtggttttgtctgtgtgtgtggaggacagagatcaaccctggggttgttgcatagaggccatcttcctgattcctgggttgctgttttttaaattacatttttatgtattttatttttgtatatatatgtgtgtgtatgtattcattatgtctgtatacatgtgcaggctggaggacaacttacaggagttggctctcttgccacctgggtcatgggaatttgactcaggtgtcaggcctggcagcaggaggctttacccactgaggcatcttgcaggtccccaccttgttttttgcaacagggatctggagcttgctgactagtatagacctgctgcctgcatagatttgctgcctagcaggtccacttccccagtgctggggttataggcacaagtcatggcctggcttttcatgtgagagctggtttctgtttgtgtggcaagcactgtactgacctatctccccagggccagcactgagtttcttagacattctccaggttccccccaacccttattttacatgtgtgagtgtttggcctatacatttctggtgcaccatatacattcagtgcctacccatggattccctgggactgaagttacagacaatgtgagataccatgtgagtgctgggaattgaaaccaggccctgttagatcagctaccatggctctagatgactcttaactactgagccatctctccaggccctttcttaagtggattgacaatgacagaacatgtctggatccatccttagacatgcttttgctgaagttgatagcactatttctttgttttatgtttaagtccataaattaaaagtaattgcaagctatctctgaagaatatttagagataatgatgtacttcggcaaagccattagaattcttttcatgccgggcgtggtggtgcacgtctttaatcccagcacttgggaggcagaggcaggcggatttctgagtttgaggccagcctggtctacagagtgagttccaggacagccagggctacacagagaaaccctgtctcagaaaggaaaaaaaaaaaaaaaaaaaaaaaaaaccaacaaaaagaattctgttgatcattgaagatttggttttgagttggagatgcagctcagttagtaggatgcttgcctggaatgctcagctctgagtttgattcttagcaccacagaaaaactaggcagggtggtggatgcttataattccagttcttgggggttggaagcaggagaatgggaagccacagtcattccctaccacataatacatttgaccccaaatgtattatctcaaaagagatttggtttaaagtaaactaataaatacctactattgcaggtgtaccttatggtgaattttaaagactcctcttattttttatttattggttttgaaacacgtgtcatgttactatgtagctttggctgacctggaaatcactgtgtagaaaggctggccttgaactcacagatatccagttttacagagtactcaggccatctgcttacacacatgatgtgtgtggctcaatggtttctaggatttatcacagacagggcacccattaccaaaatcaattttagaacatttttatccatcagtgaaagaaagtacctctgacagcattgtcagcacaaccacttctctagccctagggcaccatccgtctttctgtccctgtggacttaccgctctgggtgcctcatttgaatggaatacagtagatggtctttcatgatggcttcacttggtgtcatatctcaagactcatccctgttggagcaagtatcagtgctcccttccttatggctgttcctacacatggctgcatcactttaaaaatcatcagctgatggactcatgttgtcttatttcttagctcctttgagcctatgttgctgccaactcgtgtgcaccagttctgctcaggtttcggttctcctgagtaactacctacctttgaccttttaaggaactgccaagattgtttgccacagagaccaggtgttttgcattcagtctagctctgcatgagggcttcttgccaacacttgctattgactcttctaatgtagcctccccagtatctatgtgtagtggtacctcactgtggttaggacacgtttccctgatagctagtgatgagcattttctatgagcatcttggccattggtttgtctctggagaagtatctctccagtccctctagtagttttataacttcagttgggagtgtgtgaagtgttagaagtattactagcattagaagaaaagtttttctttacttcaccattaaaatgtgtttgagttcttcctctctggtgcagcattgcttgaaatttaaactgcatggtgtcagagttgaaagcttgctctttcaatgcattgctttctatggtccccacagtaggctgcttggatggagggcagcaagaaacagagtaagtgcaaaggaaacagggctgtgtttaaacgcttggctcttctggttattgcatatgtgaagttgagtcagtcacattctctctccacttccacaacagaaagtctaacctcaggactcttaaaggctgggccaaagtaatgtaaaaatgccagtcacgggattaggtgttgcatgtgttttgagtagtcatcccattccattagtcaacaaggagttaaaggtaagagggctcccattgaatgcaaatggaattgccctgacctggccttactgctttctccagaagggcatgttcctaccacctatgaggactggcctttgagagggcagaggaacttggccatgtaacattcagcagccttaggcagcttcccacagaggtccttgattcagtgatttttattggtttgcttggtttttggtttgtttttaatgttttacaaatctgttagagggggtatatgcaggccctttcccagaagggctagtgagaaggtggctgcctctgctttgttggttcacaagcttctgtgttgaactgtacattgaaaagaaaggaaacaggcaccgatttggactcgtgggaaagctcactctgtcttctatgcttacaagtgcatggattttcttcaaggcaggcgagcctgggcttgagccctgatgtgccactttaacttaagctccaaaagaatggagagtggagaggttggagttcttgccctgtatcgcctgaatcaatcaagaagactgctatatacacaagttgccaccttggagatgtccagcttggaaatatcagttgagggtgggggtaccgcagacttcgggagctagtaaaggatacatgagaatcaaagaactttagcttaatgcagtgagtggtaagaacgataatggagaaatactgagtacctgtaagtggggctgctgcagaaatgagcatggcaatctaaaggaaaagtggggagttaagcagagaggaggaggagctatccagggacaccaaacccaaagatggtgtggtgaggagaaagtggaggtgaggttgtgttgatgccaaaggctgtgtgtgtgtatgtgtgtgtgtgtgtgtgtgtgtgtgtgtgtgtgtgtgagagagagaggggggggggggtcgtggggggagagtgtcattgggaaatcagaagattcctaagataccagagctggcagtgaactaatttggtcacaatattgtgttggtgtgtaagaaaatggcatttcttgatgtcactttcagttccttacatcatttaaaaaaccttcagtgcttccctaaaatagtcatttaaatctgacctttggggctcttggccagagccactgccactgttctatctagatttgtatcccattttgctacttctgtgcagttgaagtctcctgcctccagcgaagctcatctggattcctcctccattctctgtcttgtgtcagtcgatagctttttgtctgatgtcctcaactggctttgatagtataattgcgcttcatcgagtgagttagaagttagtttttggaacagtttgagaaggattagtgtggatttttataaagtattttgtagaatctaccaattgtgacatctggccttaatttttttctttttgaggggtttgattagtgactcgctctttatagctcccttaagcttccctgcccccatcagtttgggtaatttgtgtgattctagaattttccctttgatctgtaagaggtctatttatgtgcagttgttcctagtattgttttgatcttttcagcttttgcaggattacagtagtgtctactttcattctttaagcttggctttttctgtatcacataaaatttggtattttgtgatttcatagtctgtaggtattttctatcgtcttatgtgatgcatttgacctgttggctaagaggagtgtactgcttcatttccttgttagtggattttccaattttcctgatagtgacactcaggttgtatggcttggagggaagtacctttacccactgagacattttttctaaaacatttaaatgtttcctttttttattactatgggaaatctattgaatgttctaaatatgtagcagtccattttgaatttataccaacttaacttcaaaagcctgtagaaccccctgttcctatatagccttccctctgtttatgttgtcacaaagaatatttttatgtacctagtaacagatttataatcatttttatacattcatatagatttttaaagtcatgtaaatcattgtcttttaagcctgaggtttctctgggtggtggttcttcattgtggagactgggtcttaccatgtagaccaggctagccatgggcacatccaacccaggcttttgttattttgctggctagcttttgaaagctgtagcaatccatctgtctagtgcctttttctgtacctctcctggtttattttctccttgtgttgtggttactgaagtctttgtttctagcttgtgttcaactggtatttgaaagatttccttggattccaggagctaaacagactaagtatctttgtagatttcgtcgtcttctggcccttcagccttactcagacttccacagatcctagggacccgcttgaagtgacagtttcaggtcgtctgggatgtgcttttggatatccgtctccccaggaaacttccctgcctttttctcctgcactcaaattgatccgtgttatacctgaaccagtcttctgcttgacatgtgcgagctgtccaccgtgtggtaggacagtctcctgatggtatggcaaaacaggcaagtgtgcctggcaactctgttctgctgcttttagagctaggaccagggtcccacaatgaggacatgagctaggcagtgtcacaaagtgccatcatccctgcctcccccacctcaccccatggcaaaatatgtacaacctgaacttaccacttttaactgttttaagaatataactcagtggcctttagtgcactcacagcgttcatccaccgccgtccatcactagaatcttctcttcccagaagcctttgcatagtggcttccctcccattccaccacacacacaaccctccccacaccagttcctggtaagcactctgaagtcttgaagttgtcatctttctttactgagtatttggctgtggctgtaattctcactgtttttctgaactcttaacaaggctgcttctcacattttctgtttggtttccgatgcttctcttgggggatgggagcacaggacatttaatgatgtcactcaaaaccaaggtatttggaccagcaccttggaagagtagaatggtcgttggaatgggaaaggctggcaggttctcatctcagagaacgagggcagggcagaatttaacatccgttaagcctaaggtgcttgctgctcatcaaatagagacgcagtggacagaatggcagaggttgaatgagagtcatccctgggacagtgcagcacacaggctccggatgagcagagccaggaagaaggtggaaggcatggccagaagggtgggaggtgaaactgaacaccaacatcctggacatagataaaggagcaattcattttaaactacttttacatttagaacaactttcaggagatggttttcttcctctacctgtgggttctggggatcaaacagaccatcaagcttggtgacctttgaccagcggctaagccatctcaccagccctagaggaatttctaaaatacaatcaaatacacatcaaatacaatggtccttggaattggcccagaggaagtcatttggtgaccttgggaaaattagttctgatgagattgggggccaattctatatgagaatggagagtattggggaatacagacgacccacgggtgctgtgaacaaaacagggcatggctgtgagggtaagtgcagttaagaggttttagaaaacatgcacagtttcactatgtagcccaaaacacataatcctataaaccctcttgcggtttggaggtgtgtgtcatacatacatagctgttttgggggtgattgcttatcttgagatgagatctcactctgttgcccagcctggtttcgaactcttgggctcaattgattctcctgcctcagtctcccagacagctggaactgtacctggttctattgtttggctcagccttgttttgatgtgagaaattgttcctagtggtctccatcggaggagcatttctgctgtgagagagaactaatgagctggccttggctgagcagagaggatctagctggtactggattctcggagaggtcactgtacagggttctacattggattcagttttctggtgactgaagttcggatcaacacatcacaggatgtcttctgggagcaaacccattgcctcagggtattcacagctgatatcctaaaggtatttccttacgctgtctccatcaactccttttcttctaactcctgcatgttagtccctgaccgcagcatcccatctgtggtgaggagaagggttggtatctggggggaggggagtcgagaagaagaaggtccccctagagccgagacagaagatgctgtttcctatgtaaggagaggtgtgggctatgctacagccagggcatgtaaaggtaaaatgtgatactgggcttagatgtgtgctagggacagtggcttagagcagtcacctagaaactgtcacactcatactgcccacaaagcattgtcagaatctggagttagcaacatggttggaagggctgcttgtccatcgttcaagcagattgcttgaagactctgaggaccttttcctcagttttcttcttccttacaaattcgtgccaccacacttggctttttcacgtgggtgctggggatccaacaggctctcagctggcacagcaagtacttgacaccatctcaccagctcttggcccctacttgttgatggaatcctctttaatcttttattccaagtcaccttccaaaacacttccaacccttaccccttagcctcctcatccacatctcttttctgactgctttcatctgggaccacaactttcactgtgagaatcaaattcactttcctgtcctgagagcagggcctgcataaaggaagcatcaacaagtttattgattgactgtacaaaaccccacaaatcattgcacaaatcatcttggattttgttccttcttcctaactgatgggcacaagcaaatgacagcaataacatggttgtttttaggggaggatgttattgttgtgagatgttattgttgagatgatgttgatgtagcattcactctggactgggggacagtgcccatctctgctgtcattcgttctgtcacttcaaaggacaggaagaacatgggtggtgattttaggatcatattcagaacctcagggaatgagtcatttggggtttgacgacttttccggtgactacagcacaaataagcaacaggacgttgttgatgttgttattgttcattttaaccacggcataaaaccttcagaaaagcattctcatgccctctcgaccgtgagtccatcatctggtatttcttcagaactgttgtgctgagcacagttctaataacttcccaactcagcaatgagagcactgccttgtgggaggaggaggagggatgaaagggaggcaggattcagagctacccccaccccccaaaaaaactactatagtcaaacctaaaagtagaggcagctgagctgacctgcctagggattggaggagtgagggagaggttgcgtctgtttttgttttttgttttttttttcagacagggtatcatacagttgctcaggctagcctcggtatccctgtttagctcaggcttgcctcaaactggaggtctttctgcttcagcctcacagatgcttataggcacgagccacaatgagtagcttttcctgtgccactgagtcacgtgactcaggaaagagttttctcataggaaaaaggtggagcacacagtgtgcttcctggttgtggtggtgcaatggcagggctatagggtggcaggggtgtgaggatggggtggggacgggtatgaggtggctagtcatgttgcgtctgcagtcaagaagcagagatgaatgctggttctgtttgctgcttttatctgcatctgtgtatgcttgcatgagggcagacctgtgttccagtgtatggaggctgtggtcaccctcagacattgctcctcacaattcagtctcgattttttttttttaatttacgtaaattcctgtgggttgcacacccatgttcatgtggaaagggacacaggacaactcagagtgccatcctcatccacttcctttgaacaaggcagggtctctcattggcttgggaactctccagttaggctggttaagctggccactgagtcccagagatcctgccttctccccagtgtagaattccagggctgccactaatacccagtctttttatgccggttctgaggattgaactcagctcctcacacttgaaaggcagacactttactgactgagctatctcccttgccttttgaggcaaggtttcctagtggtaactggggcttgctaagtagacttgactggcaggtcagtgatccctgggggatttaccagtctttatctccttagtgtggggatgccgagagacaggcatgcccttcattcaaccaagtgctattgggagacggtaagaagttccctttgtgctcatgctatggccagcttcgggtagtatcagtaactcctgggaaggtttcctttgcatgtgccttctctctgctgcactttccttctatgtttcctgggggtggggggtggggcaagggggtctcttcttaaatgagcaactcacactagcttttctggccttgtctggagcttgtaaagtaacttaagccactttcaccattctgtcatttctctgaacttactacatctgacagaagaagagcatccttcaaaggttgcactgtctgccacgcattcctccaacttaaggcttaaggtgttttctccaataattgttcctttaaaaaaaaagatatatcgctgttacatgtatcagtgttttccgtgcacataggcccatgtgccatgtggatacagtgcccacagaagccagaagaggacatcaagtcaccaggaaccggagctaaggatggttgtgagttgctgtttggatgctggaaactgaaccgaggtctgaaggtgcttgtaaccactgagccattaatctgccaccaaacggtcccttttcaacttagcattgatcgccctctcctcttccttctcctcctccctctctctgtcaatgcctaccccactcctttttcctctccatctctgttcaataccatcctcccttataaacatgtctcagtataatttcctggaccttcgtcctttaattctgattaatgcagagcaatagtgtacagattttaccttctgctgaacaaacaatgagtggcacagtggtttccaagacactgggcatcaagcaacaaagagcagaattcttaacacccataattgtaccagcataggagaaagcttcactc

SEQ ID NO: 1941 - DNA, 3431 bp, Mus musculus
gcgctctggtatctgtcgccatcttgccccttctgaggcaccgcaaacaaacctaattcctggtgtcccctagtcttggcggaggagccttttagatgagccccgaaaggccgggcagggaggacaagctctttggggctaccagacagaagcagcaatgcctgttgtgtggccaacccttttggatctcagcagggatgaatgcaaacggattcttcgaaaattggaactggaggcatatgctggagttatcagtgcacttcgggcacaaggggacctcaccaaggaaaagaaagatcttcttggagagctctcaaaagtccttagcatctcaacagagcgccaccgtgctgaagttcggagagcagtaaacgatgaacggttaacaacaattgcacataatatgtctggacctaatagttcttcagagtggtccatcgaaggacgtagattggtacctctgatgcccaggctggttccccagactgccttcactgtaacagcgaatgctgtggccaatgcagctgtccagcacaatgcgtcccttcctgtgcctgcagagacagcaagcaaagacgtagtggtttgctattcctacacaagtaccacgtctaccccaacctctacccctgttccaagtggcagcatagcaacggttaagtctccaagacctgccagtcctgcctccagtgtagttgtcttgccaagtggaagtactgtatatgtcaaaagcgttagctgctcagatgaagatgaaaaacccagaaaacgcaggcgaacaaactcctctagctcctcccctgttgtcctcaaggaagttccaaaggctgttgttccggtctcaaagacgatcactgtgcctgtgagtggaagtcccaagatgagcaacattatgcagagcattgccaactccttaccaccccatatgtcacctgtgaaaataacgtttaccaaaccatcaacacagacaacaaacacaacaacacagaaggttattatagtgaccacatcaccaagttcaacctttgtgcccaacattctctccaaatctcataactatgcagcagtcactaagcttgtaccaacatcagtcattgcctccacgactcagaagccacctgttgttataactgcgtcccaggcctctctggtcaccagtagcagcaatggcaacagcagttctacgtcatcacctatttctagtacagttgcagtaacaacggtggtatcttccacaccgtccgtggtcatgtcaacagtagcacaaggtgtatccacatcagcaatcaaagtggcatcgacaagacttccttcccccaaaagcttagtgagtggccctacccagattcttgcacagtttcctaaacagcatcagcagtctcctaagcagcagttacagcaagtacaacaacagacacagcagccagtggcccagccttcttcagtgtctcagcagcagcagcctcagcagtcagcattgccgcctggtatcaaacctaccatccagatcaaacaggagtcaggtgttaaaatcatcacacagcaggttcaaccaagtaaaatcttacccaaaccagtgactgcaactctacccaccagtagcaattccccaattatggtggttagcagtaatggtgcaattatgacaactaaactggtaaccactcctaccggtactcaggcaacctatacccggccaacagtgagcccatccttaggtcgtgtggctacaacccctggagctgcaacctatgtgaaaactaccagtggcagcatcatcactgtagtacccaaatcattagctaccttgggaggcaagataattagcagtaatattgtttctggaacgactaccaaaatcactacaatcccaatgacttccaagcccaatgtgattgttgtacaaaagactacaggaaaaggaacgaccattcaaggcctccctggcaaaaacgttgtcacaaccttgctaaatgctggaggagaaaagactcttcagacagtgccagctggagccaagccagctataattactgctacaagacccatcaccaaaatgattgtaacacagcccaaaggaataggttccgcagtacagccagcagctaaaatcattccaacaaaaattgtgtatggacaacaagggaaaacacaggttctaattaaacccaaaccagtgacatttcaagctacagttgtcagtgaacaaacaaggcagctggtaacagaaacattacagcaagcatccagggtagcagatgccagtaattcatctgctcaggaaggaaaagaggagccacagggttacacagacagtagttcttcttccacagagtcctcccagagttctcaagtaaaggaaaaattggaatctaaaccaagacaacccactattgacttgagtcaaatggcagtacctattcagatgacccaggaaaagagacattctcctgagagtccatccattgctgtggtagagtcagaactagttgctgaatacatcaccacggtcagccatcgctcccagccccaacagccttcccagccccagcggaccctgcttcaacatgtggctcagtcacagactgcgacgcagacttcggtggtagtaaagtccatcccagcgtcttcccctggagcaatcacccacatcatgcagcaggttgtacctccttttcttcttatagcattaagcagtcacaccgcttttacgaaacacagtgaggaacttggaactgaggagggtgaggttgaagagatggacacattggatcctcagacaggtctgttttaccgctctgccctgacacaatcgcagtcaaccaaacagcagaaacttagccagccccagctggaacagactcagctgcaagtgaaaactctgcagtgcttccagaccaaacagaagcagaccatccacctgcaggcagaccaactccagcacaaactcacacagatgccccagctctctatcaggcatcagaaactgaatcctctccagcaggaacaagcacagcccaagccagatgcacagcacacacagcatactgtggtggccaaagacaggcagcttcctaccttaatggcacagcccccgcaaactgtagtacaggtgcttgccgtgaaaaccacacagcagcttcctaaactgcagcaagctccgaaccaaccaaaaatctacgtgcaaccccaaactcctcagagccagatggcactcccctcttcagagaaacagcctgcaagccaggttccttaaaagaaaacagaaccttcccatccaccctcttactaaaacatcgagcttcaaatgtcttcctagtataccgcacgaatgtttcttttaccatattttctggagtgtttgattagtttttcctcaaagagatgtagctataatacacacaaccccaatttgttttcaggtggagcag

SEQ ID NO: 1942 - protein, 1022 aa, Mus musculus
MPVVWPTLLDLSRDECKRILRKLELEAYAGVISALRAQGDLTKEKKDLLGELSKVLSISTERHRAEVRRAVNDERLTTIAHNMSGPNSSSEWSIEGRRLVPLMPRLVPQTAFTVTANAVANAAVQHNASLPVPAETASKDVVVCYTSTTSTPTSTPVPSGSIATVKSPRPDASSVVVLPSGSTVYVKSVSCSDEDEKPRKRRRTNSSSSSPVVLKEVPKAVVPVSKTITVPVSGSPKMSNIMQSIANSLPPHMSPVKITFTKPSTQTTNTTTQKVIIVTTSPSSTFVPNILSKSHNYAAVTKLVPTSVIASTTQKPPVVITASQASLVTSSSNGNSSSTSSPISSTVAVTTVVSSTPSVVMSTVAQGVSTSAIKVASTRLPSPKSLVSGPTQILAQFPKQHQQSPKQQLQQVQQQTQQPVAQPSSVSQQQQPQQSALPPGIKPTIQIKQESGVKIITQQVQPSKILPKPVTATLPTSSNSPIMVVSSNGAIMTTKLVTTPTGTQATYWTVSPSLGRVATTPGAATYVKTTSGSIITVVPKSLATLGGKIISSNIVSGTTTKITTIPMTSKPNVIVVQKTTGKGTTIQGLPGKNVVTTLLNAGGEKTLQTVPAGAKPAIITAWITKMIVTQPKGIGSAVQPAAKIIPTKIVYGQQGKTQVLIKPKPVTFQATVVSEQTRQLVTETLQQASRVADNSSAQEGKEEPQGYTDSSSSSTESSQSSQVKEKLESKPRQPTIDLSQMAVPIQMTQEKRHSPESPSIAVVESELVAEYITTVSHRSQPQQPSQPQRTLLQHVAQSQTATQTSVVVKSIPASSPGAITHIMQQVVPPFLLIALSSHTAFTKHSEELGTEEGEVEEMDTLDPQTGLFYRSALTQSQSTKQQKLSQPQLEQTQLQVKTLQCFQTKQKQTIHLQADQLQHKLTQMPQLSIRHQKLNPLQQEQAQPKPDAQHTQHTVVAKDRQLPTLMAQPPQTVVQVLAVKTTQQLPKLQQAPNQPKIYVQPQTPQSQMALPSSEKQPASQVP

SEQ ID NO: 1943 - DNA, 6157 bp, Mus musculus
gcgctctggtatctgtcgccatcttgccccttctgaggcaccgcaaacaaacctaattcctggtgtcccctagtcttggcggaggagccttttagatgagccccgaaaggccgggcagggaggacaagctctttggggctaccagacagaagcagcaatgcctgttgtgtggccaacccttttggatctcagcagggatgaatgcaaacggattcttcgaaaattggaactggaggcatatgctggagttatcagtgcacttcgggcacaaggggacctcaccaaggaaaagaaagatcttcttggagagctctcaaaagtccttagcatctcaacagagcgccaccgtgctgaagttcggagagcagtaaacgatgaacggttaacaacaattgcacataatatgtctggacctaatagttcttcagagtggtccatcgaaggacgtagattggtacctctgatgcccaggctggttccccagactgccttcactgtaacagcgaatgctgtggccaatgcagctgtccagcacaatgcgtcccttcctgtgcctgcagagacagcaagcaaagacgtagtggtttgctattcctacacaagtaccacgtctaccccaacctctacccctgttccaagtggcagcatagcaacggttaagtctccaagacctgccagtcctgcctccagtgtagttgtcttgccaagtggaagtactgtatatgtcaaaagcgttagctgctcagatgaagatgaaaaacccagaaaacgcaggcgaacaaactcctctagctcctcccctgttgtcctcaaggaagttccaaaggctgttgttccggtctcaaagacgatcactgtgcctgtgagtggaagtcccaagatgagcaacattatgcagagcattgccaactccttaccaccccatatgtcacctgtgaaaataacgtttaccaaaccatcaacacagacaacaaacacaacaacacagaaggttattatagtgaccacatcaccaagttcaacctttgtgcccaacattctctccaaatctcataactatgcagcagtcactaagcttgtaccaacatcagtcattgcctccacgactcagaagccacctgttgttataactgcgtcccaggcctctctggtcaccagtagcagcaatggcaacagcagttctacgtcatcacctatttctagtacagttgcagtaacaacggtggtatcttccacaccgtccgtggtcatgtcaacagtagcacaaggtgtatccacatcagcaatcaaagtggcatcgacaagacttccttcccccaaaagcttagtgagtggccctacccagattcttgcacagtttcctaaacagcatcagcagtctcctaagcagcagttacagcaagtacaacaacagacacagcagccagtggcccagccttcttcagtgtctcagcagcagcagcctcagcagtcagcattgccgcctggtatcaaacctaccatccagatcaaacaggagtcaggtgttaaaatcatcacacagcaggttcaaccaagtaaaatcttacccaaaccagtgactgcaactctacccaccagtagcaattccccaattatggtggttagcagtaatggtgcaattatgacaactaaactggtaaccactcctaccggtactcaggcaacctatacccggccaacagtgagcccatccttaggtcgtgtggctacaacccctggagctgcaacctatgtgaaaactaccagtggcagcatcatcactgtagtacccaaatcattagctaccttgggaggcaagataattagcagtaatattgtttctggaacgactaccaaaatcactacaatcccaatgacttccaagcccaatgtgattgttgtacaaaagactacaggaaaaggaacgaccattcaaggcctccctggcaaaaacgttgtcacaaccttgctaaatgctggaggagaaaagactcttcagacagtgccagctggagccaagccagctataattactgctacaagacccatcaccaaaatgattgtaacacagcccaaaggaataggttccgcagtacagccagcagctaaaatcattccaacaaaaattgtgtatggacaacaagggaaaacacaggttctaattaaacccaaaccagtgacatttcaagctacagttgtcagtgaacaaacaaggcagctggtaacagaaacattacagcaagcatccagggtagcagatgccagtaattcatctgctcaggaaggaaaagaggagccacagggttacacagacagtagttcttcttccacagagtcctcccagagttctcaagtaaaggaaaaattggaatctaaaccaagacaacccactattgacttgagtcaaatggcagtacctattcagatgacccaggaaaagagacattctcctgagagtccatccattgctgtggtagagtcagaactagttgctgaatacatcaccacggtcagccatcgctcccagccccaacagccttcccagccccagcggaccctgcttcaacatgtggctcagtcacagactgcgacgcagacttcggtggtagtaaagtccatcccagcgtcttcccctggagcaatcacccacatcatgcagcaggcattaagcagtcacaccgcttttacgaaacacagtgaggaacttggaactgaggagggtgaggttgaagagatggacacattggatcctcagacaggtctgttttaccgctctgccctgacacaatcgcagtcaaccaaacagcagaaacttagccagccccagctggaacagactcagctgcaagtgaaaactctgcagtgcttccagaccaaacagaagcagaccatccacctgcaggcagaccaactccagcacaaactcacacagatgccccagctctctatcaggcatcagaaactgaatcctctccagcaggaacaagcacagcccaagccagatgcacagcacacacagcatactgtggtggccaaagacaggcagcttcctaccttaatggcacagcccccgcaaactgtagtacaggtgcttgccgtgaaaaccacacagcagcttcctaaactgcagcaagctccgaaccaaccaaaaatctacgtgcaaccccaaactcctcagagccagatggcactcccctcttcagagaaacagcctgcaagccaggtggagcagccaattataactcaaggatcctctgttacaaagataacatttgaggggcgccagcctcccacagttacaaagataactggtggcagttctgttcctaagctgacatcaccagttacaagcatatctcccattcaggcctctgagaagacagcagtgtcagacattttgcaaatgtctttgatggaagctcagattgatacaaatgtagaacatatggtagtggatcccccaaagaaggctctagccaccaatgtgctcactggtgaggcaggagctctaccctccacccatgtggtggtggcagggatgacgaaatgtagagagtcctgttcaagtccatctgctgttggccctcccctaacgaccagaaaaatcgaagcagcaggagtgcctacgacaggccagttcatgcgtattcagaatgtaggccaaaagaaagctgaagagagcccaacagaaattatcatccaggccattccccagtatgctattccttgtcactccagctccaatgtggtggtggagcccagtgggcttctagagttgaacaacttcaccagtcagcagctagatgacgacgagacagccatggagcaggacatagacagcagcacggaggacgggactgagcccagcccctctcagagcgctgtagaacggtcctagtgtgcagacgccggagtgcactttagagcctgcgtggttaccaaatgtccagggaaacttaaaatttgttatagtaaaaaagaaaaaaaaaaaaagaaagaaagaaaaaagcactttgctcatatttaggctggggacctagaagcattttaacaaaattaaactcacagaggaatgtactttaaaaaaaaaaaatagaaaaagaaaaaaaaaaaagcagaggaaacgatgcaccccatggagcccggcaccttgttggtgctaagcagcgagaagagactttcctgtgagtggtcctcgactgctttccactgagcaaataccaccagagagtatgaaaaggaaaagaaaggagaatatgaagagtttgtatttttgaaatgatgtatctgaacagtttttcaaaaattgtgtttgtttttgcaaatccctggagatgttgatttggctagcattttacatttgctcagttcatgattagtttatgaatacctagggaagtcctggcattggagtccttgctggacggtagacatcagtcaggttgctgcctgggcagtttggggtggcttgtacatgtgctccttggttgtatactaatttattgtggagttccacacttgcctatttatttaatgtaaatgttttgaagcaggccgaatcccttttcctacatgtcctgggaagctggatccctggccttcccaccttcccaccccctcacccccctttaagaagacggattagagaagatttggtccggaagcagaggaaaagacatttctagcccaaaggaaatgctcagtggtgttcctgaaaatgagctctgctcattggatgctttctcgacaccgacgttgcacacccgtgttggactgagactttgaaaacaactttgacttactttggtttaaatcctttgaaatgtatgaaaatgttcacttacagttctaaatgtaatgtttttaagtttttaattttttagggtgcagtttgtttacgtgcaggtgtggtcttgtgattgctgtctatcacaagtagagtgaagggtaagggatgggagggtaagaattttgacaagctgtggcaaaggaaactatacctttcatttttaaaaagtgtaaatagaaaagtttttaacggttttatatgaatttcactataaataagcattttaagactgacaaatgttgaactgtatatacatttatcagcttaactgcccagtttttggtgctgaagtactgtaagtagaatttatcagtagcgtcctaatttctgtgtctacacctggggagaagctgtgatgctgtagttaatcaacttacacaagtgcttacacttgtgtaacttacactgataatctcggcaggagcatccctgagacacctaccttgtggtggtgattgtccccatttctactaggtgaaagttactcacccatagatggagctcttggatagcattttattgtacaaatgtgtttcaacaaccactttgtgactgttcctagctaaggggaaatttaacttctcttgggtcatagacatctttaagaagctgattattctatgaactctctcaccaaaaaaatacacatgccaggacacgtgttaagattttgcatacaattttagggacttaagaactcccaagaccatccatgtattccaggttaagccttctgttatggtcagctcattacttacaggtgtaagtttttatcaaataaaatatcttttggatacacatggatcaggaaataagaacaaacttgaataagttatgttccatctctactatcagcataccatgtccgtgttttgagaatatagcctctctgtgctccagcaggttaaatgacaaatgagtctactttagtctgcttttaaagaatcacttgtgcatatatatttgcacacatacatgaatatcaagtaagatttattttttttcctttgaatggttctaatgccaaatagagcatgattttatgaacaaataatattcactcctattttatgtgccaggtaaggctctagccaccaaggctattacagtgaggacatgggaaatcctacccagatggagcttacaggcaaggcttcctgctcgtgaaggaagggggagcaacaattccagagttctcctcttttttttaatcagcacatattcagcatatgtagtggttttgtctgtgtgtgtggaggacagagatcaaccctggggttgttgcatagaggccatcttcctgattcc

SEQ ID NO: 1944 - protein, 1234 aa, Mus musculus
MPVVWPTLLDLSRDECKRILRKLELEAYAGVISALRAQGDLTKEKKDLLGELSKVLSISTERHRAEVRRAVNDERLTTIAHNMSGPNSSSEWSIEGRRLVPLMPRLVPQTAFTVTANAVANAAVQHNASLPVPAETASKDVVVCYTSTTSTPTSTPVPSGSIATVKSPRPDASSVVVLPSGSTVYVKSVSCSDEDEKPRKRRRTNSSSSSPVVLKEVPKAVVPVSKTITVPVSGSPKMSNIMQSIANSLPPHMSPVKITFTKPSTQTTNTTTQKVIIVTTSPSSTFVPNILSKSHNYAAVTKLVPTSVIASTTQKPPVVITASQASLVTSSSNGNSSSTSSPISSTVAVTTVVSSTPSVVMSTVAQGVSTSAIKVASTRLPSPKSLVSGPTQILAQFPKQHQQSPKQQLQQVQQQTQQPVAQPSSVSQQQQPQQSALPPGIKPTIQIKQESGVKIITQQVQPSKILPKPVTATLPTSSNSPIMVVSSNGAIMTTKLVTTPTGTQATYWTVSPSLGRVATTPGAATYVKTTSGSIITVVPKSLATLGGKIISSNIVSGTTTKITTIPMTSKPNVIVVQKTTGKGTTIQGLPGKNVVTTLLNAGGEKTLQTVPAGAKPAIITAWITKMIVTQPKGIGSAVQPAAKIIPTKIVYGQQGKTQVLIKPKPVTFQATVVSEQTRQLVTETLQQASRVADNSSAQEGKEEPQGYTDSSSSSTESSQSSQVKEKLESKPRQPTIDLSQMAVPIQMTQEKRHSPESPSIAVVESELVAEYITTVSHRSQPQQPSQPQRTLLQHVAQSQTATQTSVVVKSIPASSPGAITHIMQQALSSHTAFTKHSEELGTEEGEVEEMDTLDPQTGLFYRSALTQSQSTKQQKLSQPQLEQTQLQVKTLQCFQTKQKQTIHLQADQLQHKLTQMPQLSIRHQKLNPLQQEQAQPKPDAQHTQHTVVAKDRQLPTLMAQPPQTVVQVLAVKTTQQLPKLQQAPNQPKIYVQPQTPQSQMALPSSEKQPASQVEQPIITQGSSVTKITFEGRQPPTVTKITGGSSVPKLTSPVTSISPIQASEKTAVSDILQMSLMEAQIDTNVEHMVVDPPKKATNVLTGEAGALPSTHVVVAGMTKCRESCSSPSAVGPPLTTRKIEAAGVPTTGQFMRIQNVGQKKAEESPTEIIIQAIPQYAIPCHSSSNVVVEPSGLLELNNFTSQQLDDDETAMEQDIDSSTEDGTEPSPSQSAVERS

SEQ ID NO: 1945 - DNA, 5974 bp, Mus musculus
cccttctgaggcaccgcaaacaaacctaattcctggtgtcccctagtcttggcggaggagccttttagatgagccccgaaaggccgggcagggaggacaagctctttggggctaccagacagaagcagcaatgcctgttgtgtggccaacccttttggatctcagcagggatgaatgcaaacggattcttcgaaaattggaactggaggcatatgctggagttatcagtgcacttcgggcacaaggggacctcaccaaggaaaagaaagatcttcttggagagctctcaaaagtccttagcatctcaacagagcgccaccgtgctgaagttcggagagcagtaaacgatgaacggttaacaacaattgcacataatatgtctggacctaatagttcttcagagtggtccatcgaaggacgtagattggtacctctgatgcccaggctggttccccagactgccttcactgtaacagcgaatgctgtggccaatgcagctgtccagcacaatgcgtcccttcctgtgcctgcagagacagcaagcaaagacgtagtggtttgctattcctacacaagtaccacgtctaccccaacctctacccctgttccaagtggcagcatagcaacggttaagtctccaagacctgccagtcctgcctccagtgtagttgtcttgccaagtggaagtactgtatatgtcaaaagcgttagctgctcagatgaagatgaaaaacccagaaaacgcaggcgaacaaactcctctagctcctcccctgttgtcctcaaggaagttccaaaggctgttgttccggtctcaaagacgatcactgtgcctgtgagtggaagtcccaagatgagcaacattatgcagagcattgccaactccttaccaccccatatgtcacctgtgaaaataacgtttaccaaaccatcaacacagacaacaaacacaacaacacagaaggttattatagtgaccacatcaccaagttcaacctttgtgcccaacattctctccaaatctcataactatgcagcagtcactaagcttgtaccaacatcagtcattgcctccacgactcagaagccacctgttgttataactgcgtcccaggcctctctggtcaccagtagcagcaatggcaacagcagttctacgtcatcacctatttctagtacagttgcagtaacaacggtggtatcttccacaccgtccgtggtcatgtcaacagtagcacaaggtgtatccacatcagcaatcaaagtggcatcgacaagacttccttcccccaaaagcttagtgagtggccctacccagattcttgcacagtttcctaaacagcatcagcagtctcctaagcagcagttacagcaagtacaacaacagacacagcagccagtggcccagccttcttcagtgtctcagcagcagcagcctcagcagtcagcattgccgcctggtatcaaacctaccatccagatcaaacaggagtcaggtgttaaaatcatcacacagcaggttcaaccaagtaaaatcttacccaaaccagtgactgcaactctacccaccagtagcaattccccaattatggtggttagcagtaatggtgcaattatgacaactaaactggtaaccactcctaccggtactcaggcaacctatacccggccaacagtgagcccatccttaggtcgtgtggctacaacccctggagctgcaacctatgtgaaaactaccagtggcagcatcatcactgtagtacccaaatcattagctaccttgggaggcaagataattagcagtaatattgtttctggaacgactaccaaaatcactacaatcccaatgacttccaagcccaatgtgattgttgtacaaaagactacaggaaaaggaacgaccattcaaggcctccctggcaaaaacgttgtcacaaccttgctaaatgctggaggagaaaagactcttcagacagtgccagctggagccaagccagctataattactgctacaagacccatcaccaaaatgattgtaacacagcccaaaggaataggttccgcagtacagccagcagctaaaatcattccaacaaaaattgtgtatggacaacaagggaaaacacaggttctaattaaacccaaaccagtgacatttcaagctacagttgtcagtgaacaaacaaggcagctggtaacagaaacattacagcaagcatccagggtagcagatgccagtaattcatctgctcaggaaggaaaagaggagccacagggttacacagacagtagttcttcttccacagagtcctcccagagttctcaagtcagccatcgctcccagccccaacagccttcccagccccagcggaccctgcttcaacatgtggctcagtcacagactgcgacgcagacttcggtggtagtaaagtccatcccagcgtcttcccctggagcaatcacccacatcatgcagcaggcattaagcagtcacaccgcttttacgaaacacagtgaggaacttggaactgaggagggtgaggttgaagagatggacacattggatcctcagacaggtctgttttaccgctctgccctgacacaatcgcagtcaaccaaacagcagaaacttagccagccccagctggaacagactcagctgcaagtgaaaactctgcagtgcttccagaccaaacagaagcagaccatccacctgcaggcagaccaactccagcacaaactcacacagatgccccagctctctatcaggcatcagaaactgaatcctctccagcaggaacaagcacagcccaagccagatgcacagcacacacagcatactgtggtggccaaagacaggcagcttcctaccttaatggcacagcccccgcaaactgtagtacaggtgcttgccgtgaaaaccacacagcagcttcctaaactgcagcaagctccgaaccaaccaaaaatctacgtgcaaccccaaactcctcagagccagatggcactcccctcttcagagaaacagcctgcaagccaggtggagcagccaattataactcaaggatcctctgttacaaagataacatttgaggggcgccagcctcccacagttacaaagataactggtggcagttctgttcctaagctgacatcaccagttacaagcatatctcccattcaggcctctgagaagacagcagtgtcagacattttgcaaatgtctttgatggaagctcagattgatacaaatgtagaacatatggtagtggatcccccaaagaaggctctagccaccaatgtgctcactggtgaggcaggagctctaccctccacccatgtggtggtggcagggatgacgaaatgtagagagtcctgttcaagtccatctgctgttggccctcccctaacgaccagaaaaatcgaagcagcaggagtgcctacgacaggccagttcatgcgtattcagaatgtaggccaaaagaaagctgaagagagcccaacagaaattatcatccaggccattccccagtatgctattccttgtcactccagctccaatgtggtggtggagcccagtgggcttctagagttgaacaacttcaccagtcagcagctagatgacgacgagacagccatggagcaggacatagacagcagcacggaggacgggactgagcccagcccctctcagagcgctgtagaacggtcctagtgtgcagacgccggagtgcactttagagcctgcgtggttaccaaatgtccagggaaacttaaaatttgttatagtaaaaaagaaaaaaaaaaaaagaaagaaagaaaaaagcactttgctcatatttaggctggggacctagaagcattttaacaaaattaaactcacagaggaatgtactttaaaaaaaaaaaatagaaaaagaaaaaaaaaaaagcagaggaaacgatgcaccccatggagcccggcaccttgttggtgctaagcagcgagaagagactttcctgtgagtggtcctcgactgctttccactgagcaaataccaccagagagtatgaaaaggaaaagaaaggagaatatgaagagtttgtatttttgaaatgatgtatctgaacagtttttcaaaaattgtgtttgtttttgcaaatccctggagatgttgatttggctagcattttacatttgctcagttcatgattagtttatgaatacctagggaagtcctggcattggagtccttgctggacggtagacatcagtcaggttgctgcctgggcagtttggggtggcttgtacatgtgctccttggttgtatactaatttattgtggagttccacacttgcctatttatttaatgtaaatgttttgaagcaggccgaatcccttttcctacatgtcctgggaagctggatccctggccttcccaccttcccaccccctcacccccctttaagaagacggattagagaagatttggtccggaagcagaggaaaagacatttctagcccaaaggaaatgctcagtggtgttcctgaaaatgagctctgctcattggatgctttctcgacaccgacgttgcacacccgtgttggactgagactttgaaaacaactttgacttactttggtttaaatcctttgaaatgtatgaaaatgttcacttacagttctaaatgtaatgtttttaagtttttaattttttagggtgcagtttgtttacgtgcaggtgtggtcttgtgattgctgtctatcacaagtagagtgaagggtaagggatgggagggtaagaattttgacaagctgtggcaaaggaaactatacctttcatttttaaaaagtgtaaatagaaaagtttttaacggttttatatgaatttcactataaataagcattttaagactgacaaatgttgaactgtatatacatttatcagcttaactgcccagtttttggtgctgaagtactgtaagtagaatttatcagtagcgtcctaatttctgtgtctacacctggggagaagctgtgatgctgtagttaatcaacttacacaagtgcttacacttgtgtaacttacactgataatctcggcaggagcatccctgagacacctaccttgtggtggtgattgtccccatttctactaggtgaaagttactcacccatagatggagctcttggatagcattttattgtacaaatgtgtttcaacaaccactttgtgactgttcctagctaaggggaaatttaacttctcttgggtcatagacatctttaagaagctgattattctatgaactctctcaccaaaaaaatacacatgccaggacacgtgttaagattttgcatacaattttagggacttaagaactcccaagaccatccatgtattccaggttaagccttctgttatggtcagctcattacttacaggtgtaagtttttatcaaataaaatatcttttggatacacatggatcaggaaataagaacaaacttgaataagttatgttccatctctactatcagcataccatgtccgtgttttgagaatatagcctctctgtgctccagcaggttaaatgacaaatgagtctactttagtctgcttttaaagaatcacttgtgcatatatatttgcacacatacatgaatatcaagtaagatttattttttttcctttgaatggttctaatgccaaatagagcatgattttatgaacaaataatattcactcctattttatgtgccaggtaaggctctagccaccaaggctattacagtgaggacatgggaaatcctacccagatggagcttacaggcaaggcttcctgctcgtgaaggaagggggagcaacaattccagagttctcctcttttttttaatcagcacatattcagcatatgtagtggttttgtctgtgtgtgtggaggacagagatcaaccctggggttgttgcatagaggccatcttcctgattcc

SEQ ID NO: 1946 - protein, 1182 aa, Mus musculus
MPVVWPTLLDLSRDECKRILRKLELEAYAGVISALRAQGDLTKEKKDLLGELSKVLSISTERHRAEVRRAVNDERLTTIAHNMSGPNSSSEWSIEGRRLVPLMPRLVPQTAFTVTANAVANAAVQHNASLPVPAETASKDVVVCYTSTTSTPTSTPVPSGSIATVKSPRPDASSVVVLPSGSTVYVKSVSCSDEDEKPRKRRRTNSSSSSPVVLKEVPKAVVPVSKTITVPVSGSPKMSNIMQSIANSLPPHMSPVKITFTKPSTQTTNTTTQKVIIVTTSPSSTFVPNILSKSHNYAAVTKLVPTSVIASTTQKPPVVITASQASLVTSSSNGNSSSTSSPISSTVAVTTVVSSTPSVVMSTVAQGVSTSAIKVASTRLPSPKSLVSGPTQILAQFPKQHQQSPKQQLQQVQQQTQQPVAQPSSVSQQQQPQQSALPPGIKPTIQIKQESGVKIITQQVQPSKILPKPVTATLPTSSNSPIMVVSSNGAIMTTKLVTTPTGTQATYWTVSPSLGRVATTPGAATYVKTTSGSIITVVPKSLATLGGKIISSNIVSGTTTKITTIPMTSKPNVIVVQKTTGKGTTIQGLPGKNVVTTLLNAGGEKTLQTVPAGAKPAIITAWITKMIVTQPKGIGSAVQPAAKIIPTKIVYGQQGKTQVLIKPKPVTFQATVVSEQTRQLVTETLQQASRVADNSSAQEGKEEPQGYTDSSSSSTESSQSSQVSHRSQPQQPSQPQRTLLQHVAQSQTATQTSVVVKSIPASSPGAITHIMQQALSSHTAFTKHSEELGTEEGEVEEMDTLDPQTGLFYRSALTQSQSTKQQKLSQPQLEQTQLQVKTLQCFQTKQKQTIHLQADQLQHKLTQMPQLSIRHQKLNPLQQEQAQPKPDAQHTQHTVVAKDRQLPTLMAQPPQTVVQVLAVKTTQQLPKLQQAPNQPKIYVQPQTPQSQMALPSSEKQPASQVEQPIITQGSSVTKITFEGRQPPTVTKITGGSSVPKLTSPVTSISPIQASEKTAVSDILQMSLMEAQIDTNVEHMVVDPPKKATNVLTGEAGALPSTHVVVAGMTKCRESCSSPSAVGPPLTTRKIEAAGVPTTGQFMRIQNVGQKKAEESPTEIIIQAIPQYAIPCHSSSNVVVEPSGLLELNNFTSQQLDDDETAMEQDIDSSTEDGTEPSPSQSAVERS

SEQ ID NO: 1947 - DNA, 6364 bp, Mus musculus
gcgctctggtatctgtcgccatcttgccccttctgaggcaccgcaaacaaacctaattcctggtgtcccctagtcttggcggaggagccttttagatgagccccgaaaggccgggcagggaggacaagctctttggggctaccagacagaagcagcaatgcctgttgtgtggccaacccttttggatctcagcagggatgaatgcaaacggattcttcgaaaattggaactggaggcatatgctggagttatcagtgcacttcgggcacaaggggacctcaccaaggaaaagaaagatcttcttggagagctctcaaaagtccttagcatctcaacagagcgccaccgtgctgaagttcggagagcagtaaacgatgaacggttaacaacaattgcacataatatgtctggacctaatagttcttcagagtggtccatcgaaggacgtagattggtacctctgatgcccaggctggttccccagactgccttcactgtaacagcgaatgctgtggccaatgcagctgtccagcacaatgcgtcccttcctgtgcctgcagagacagcaagcaaagacgtagtggtttgctattcctacacaagtaccacgtctaccccaacctctacccctgttccaagtggcagcatagcaacggttaagtctccaagacctgccagtcctgcctccagtgtagttgtcttgccaagtggaagtactgtatatgtcaaaagcgttagctgctcagatgaagatgaaaaacccagaaaacgcaggcgaacaaactcctctagctcctcccctgttgtcctcaaggaagttccaaaggctgttgttccggtctcaaagacgatcactgtgcctgtgagtggaagtcccaagatgagcaacattatgcagagcattgccaactccttaccaccccatatgtcacctgtgaaaataacgtttaccaaaccatcaacacagacaacaaacacaacaacacagaaggttattatagtgaccacatcaccaagttcaacctttgtgcccaacattctctccaaatctcataactatgcagcagtcactaagcttgtaccaacatcagtcattgcctccacgactcagaagccacctgttgttataactgcgtcccaggcctctctggtcaccagtagcagcaatggcaacagcagttctacgtcatcacctatttctagtacagttgcagtaacaacggtggtatcttccacaccgtccgtggtcatgtcaacagtagcacaaggtgtatccacatcagcaatcaaagtggcatcgacaagacttccttcccccaaaagcttagtgagtggccctacccagattcttgcacagtttcctaaacagcatcagcagtctcctaagcagcagttacagcaagtacaacaacagacacagcagccagtggcccagccttcttcagtgtctcagcagcagcagcctcagcagtcagcattgccgcctggtatcaaacctaccatccagatcaaacaggagtcaggtgttaaaatcatcacacagcaggttcaaccaagtaaaatcttacccaaaccagtgactgcaactctacccaccagtagcaattccccaattatggtggttagcagtaatggtgcaattatgacaactaaactggtaaccactcctaccggtactcaggcaacctatacccggccaacagtgagcccatccttaggtcgtgtggctacaacccctggagctgcaacctatgtgaaaactaccagtggcagcatcatcactgtagtacccaaatcattagctaccttgggaggcaagataattagcagtaatattgtttctggaacgactaccaaaatcactacaatcccaatgacttccaagcccaatgtgattgttgtacaaaagactacaggaaaaggaacgaccattcaaggcctccctggcaaaaacgttgtcacaaccttgctaaatgctggaggagaaaagactcttcagacagtgccagctggagccaagccagctataattactgctacaagacccatcaccaaaatgattgtaacacagcccaaaggaataggttccgcagtacagccagcagctaaaatcattccaacaaaaattgtgtatggacaacaagggaaaacacaggttctaattaaacccaaaccagtgacatttcaagctacagttgtcagtgaacaaacaaggcagctggtaacagaaacattacagcaagcatccagggtagcagatgccagtaattcatctgctcaggaaggaaaagaggagccacagggttacacagacagtagttcttcttccacagagtcctcccagagttctcaagattcccagcctgtagttcatgtaattgcttcccggcgtcaggattggtcagaacatgagattgcaatggagactagccccaccataatatatcaggatgtatccagtgaatcacaatcagccacttcaacaatcaaagctctgttagaactccaacagacaacagtaaaggaaaaattggaatctaaaccaagacaacccactattgacttgagtcaaatggcagtacctattcagatgacccaggaaaagagacattctcctgagagtccatccattgctgtggtagagtcagaactagttgctgaatacatcaccacggaacgcactgatgaggggacagaggttgcttttccccttctagtcagccatcgctcccagccccaacagccttcccagccccagcggaccctgcttcaacatgtggctcagtcacagactgcgacgcagacttcggtggtagtaaagtccatcccagcgtcttcccctggagcaatcacccacatcatgcagcaggcattaagcagtcacaccgcttttacgaaacacagtgaggaacttggaactgaggagggtgaggttgaagagatggacacattggatcctcagacaggtctgttttaccgctctgccctgacacaatcgcagtcaaccaaacagcagaaacttagccagccccagctggaacagactcagctgcaagtgaaaactctgcagtgcttccagaccaaacagaagcagaccatccacctgcaggcagaccaactccagcacaaactcacacagatgccccagctctctatcaggcatcagaaactgaatcctctccagcaggaacaagcacagcccaagccagatgcacagcacacacagcatactgtggtggccaaagacaggcagcttcctaccttaatggcacagcccccgcaaactgtagtacaggtgcttgccgtgaaaaccacacagcagcttcctaaactgcagcaagctccgaaccaaccaaaaatctacgtgcaaccccaaactcctcagagccagatggcactcccctcttcagagaaacagcctgcaagccaggtggagcagccaattataactcaaggatcctctgttacaaagataacatttgaggggcgccagcctcccacagttacaaagataactggtggcagttctgttcctaagctgacatcaccagttacaagcatatctcccattcaggcctctgagaagacagcagtgtcagacattttgcaaatgtctttgatggaagctcagattgatacaaatgtagaacatatggtagtggatcccccaaagaaggctctagccaccaatgtgctcactggtgaggcaggagctctaccctccacccatgtggtggtggcagggatgacgaaatgtagagagtcctgttcaagtccatctgctgttggccctcccctaacgaccagaaaaatcgaagcagcaggagtgcctacgacaggccagttcatgcgtattcagaatgtaggccaaaagaaagctgaagagagcccaacagaaattatcatccaggccattccccagtatgctattccttgtcactccagctccaatgtggtggtggagcccagtgggcttctagagttgaacaacttcaccagtcagcagctagatgacgacgagacagccatggagcaggacatagacagcagcacggaggacgggactgagcccagcccctctcagagcgctgtagaacggtcctagtgtgcagacgccggagtgcactttagagcctgcgtggttaccaaatgtccagggaaacttaaaatttgttatagtaaaaaagaaaaaaaaaaaaagaaagaaagaaaaaagcactttgctcatatttaggctggggacctagaagcattttaacaaaattaaactcacagaggaatgtactttaaaaaaaaaaaatagaaaaagaaaaaaaaaaaagcagaggaaacgatgcaccccatggagcccggcaccttgttggtgctaagcagcgagaagagactttcctgtgagtggtcctcgactgctttccactgagcaaataccaccagagagtatgaaaaggaaaagaaaggagaatatgaagagtttgtatttttgaaatgatgtatctgaacagtttttcaaaaattgtgtttgtttttgcaaatccctggagatgttgatttggctagcattttacatttgctcagttcatgattagtttatgaatacctagggaagtcctggcattggagtccttgctggacggtagacatcagtcaggttgctgcctgggcagtttggggtggcttgtacatgtgctccttggttgtatactaatttattgtggagttccacacttgcctatttatttaatgtaaatgttttgaagcaggccgaatcccttttcctacatgtcctgggaagctggatccctggccttcccaccttcccaccccctcacccccctttaagaagacggattagagaagatttggtccggaagcagaggaaaagacatttctagcccaaaggaaatgctcagtggtgttcctgaaaatgagctctgctcattggatgctttctcgacaccgacgttgcacacccgtgttggactgagactttgaaaacaactttgacttactttggtttaaatcctttgaaatgtatgaaaatgttcacttacagttctaaatgtaatgtttttaagtttttaattttttagggtgcagtttgtttacgtgcaggtgtggtcttgtgattgctgtctatcacaagtagagtgaagggtaagggatgggagggtaagaattttgacaagctgtggcaaaggaaactatacctttcatttttaaaaagtgtaaatagaaaagtttttaacggttttatatgaatttcactataaataagcattttaagactgacaaatgttgaactgtatatacatttatcagcttaactgcccagtttttggtgctgaagtactgtaagtagaatttatcagtagcgtcctaatttctgtgtctacacctggggagaagctgtgatgctgtagttaatcaacttacacaagtgcttacacttgtgtaacttacactgataatctcggcaggagcatccctgagacacctaccttgtggtggtgattgtccccatttctactaggtgaaagttactcacccatagatggagctcttggatagcattttattgtacaaatgtgtttcaacaaccactttgtgactgttcctagctaaggggaaatttaacttctcttgggtcatagacatctttaagaagctgattattctatgaactctctcaccaaaaaaatacacatgccaggacacgtgttaagattttgcatacaattttagggacttaagaactcccaagaccatccatgtattccaggttaagccttctgttatggtcagctcattacttacaggtgtaagtttttatcaaataaaatatcttttggatacacatggatcaggaaataagaacaaacttgaataagttatgttccatctctactatcagcataccatgtccgtgttttgagaatatagcctctctgtgctccagcaggttaaatgacaaatgagtctactttagtctgcttttaaagaatcacttgtgcatatatatttgcacacatacatgaatatcaagtaagatttattttttttcctttgaatggttctaatgccaaatagagcatgattttatgaacaaataatattcactcctattttatgtgccaggtaaggctctagccaccaaggctattacagtgaggacatgggaaatcctacccagatggagcttacaggcaaggcttcctgctcgtgaaggaagggggagcaacaattccagagttctcctcttttttttaatcagcacatattcagcatatgtagtggttttgtctgtgtgtgtggaggacagagatcaaccctggggttgttgcatagaggccatcttcctgattcc

SEQ ID NO: 1948 - protein, 1301 aa, Mus musculus
MPVVWPTLLDLSRDECKRILRKLELEAYAGVISALRAQGDLTKEKKDLLGELSKVLSISTERHRAEVRRAVNDERLTTIAHNMSGPNSSSEWSIEGRRLVPLMPRLVPQTAFTVTANAVANAAVQHNASLPVPAETASKDVVVCYTSTTSTPTSTPVPSGSIATVKSPRPDASSVVVLPSGSTVYVKSVSCSDEDEKPRKRRRTNSSSSSPVVLKEVPKAVVPVSKTITVPVSGSPKMSNIMQSIANSLPPHMSPVKITFTKPSTQTTNTTTQKVIIVTTSPSSTFVPNILSKSHNYAAVTKLVPTSVIASTTQKPPVVITASQASLVTSSSNGNSSSTSSPISSTVAVTTVVSSTPSVVMSTVAQGVSTSAIKVASTRLPSPKSLVSGPTQILAQFPKQHQQSPKQQLQQVQQQTQQPVAQPSSVSQQQQPQQSALPPGIKPTIQIKQESGVKIITQQVQPSKILPKPVTATLPTSSNSPIMVVSSNGAIMTTKLVTTPTGTQATYWTVSPSLGRVATTPGAATYVKTTSGSIITVVPKSLATLGGKIISSNIVSGTTTKITTIPMTSKPNVIVVQKTTGKGTTIQGLPGKNVVTTLLNAGGEKTLQTVPAGAKPAIITAWITKMIVTQPKGIGSAVQPAAKIIPTKIVYGQQGKTQVLIKPKPVTFQATVVSEQTRQLVTETLQQASRVADNSSAQEGKEEPQGYTDSSSSSTESSQSSQDSQPVVHVIASRRQDWSEHEIAMSPTIIYQDVSSESQSATSTIKALLELQQTTVKEKLESKPRQPTIDLSQMAVPIQMTQEKRHSPESPSIAVVESELVAEYITTERTDEGTEVAFPLLVSHRSQPQQPSQPQRTLLQHVAQSQTATQTSVVVKSIPASSPGAITHIMQQALSSHTAFTKHSEELGTEEGEVEEMDTLDPQTGLFYRSALTQSQSTKQQKLSQPQLEQTQLQVKTLQCFQTKQKQTIHLQADQLQHKLTQMPQLSIRHQKLNPLQQEQAQPKPDAQHTQHTVVAKDRQLPTLMAQPPQTVVQVLAVKTTQQLPKLQQAPNQPKIYVQPQTPQSQMALPSSEKQPASQVEQPIITQGSSVTKITFEGRQPPTVTKITGGSSVPKLTSPVTSISPIQASEKTAVSDILQMSLMEAQIDTNVEHMVVDPPKKATNVLTGEAGALPSTHVVVAGMTKCRESCSSPSAVGPPLTTRKIEAAGVPTTGQFMRIQNVGQKKAEESPTEIIIQAIPQYAIPCHSSSNVVVEPSGLLELNNFTSQQLDDDETAMEQDIDSSTEDGTEPSPSQSAVERS

SEQ ID NO: 1949 - DNA, 6322 bp, Mus musculus
gcgctctggtatctgtcgccatcttgccccttctgaggcaccgcaaacaaacctaattcctggtgtcccctagtcttggcggaggagccttttagatgagccccgaaaggccgggcagggaggacaagctctttggggctaccagacagaagcagcaatgcctgttgtgtggccaacccttttggatctcagcagggatgaatgcaaacggattcttcgaaaattggaactggaggcatatgctggagttatcagtgcacttcgggcacaaggggacctcaccaaggaaaagaaagatcttcttggagagctctcaaaagtccttagcatctcaacagagcgccaccgtgctgaagttcggagagcagtaaacgatgaacggttaacaacaattgcacataatatgtctggacctaatagttcttcagagtggtccatcgaaggacgtagattggtacctctgatgcccaggctggttccccagactgccttcactgtaacagcgaatgctgtggccaatgcagctgtccagcacaatgcgtcccttcctgtgcctgcagagacagcaagcaaagacgtagtggtttgctattcctacacaagtaccacgtctaccccaacctctacccctgttccaagtggcagcatagcaacggttaagtctccaagacctgccagtcctgcctccagtgtagttgtcttgccaagtggaagtactgtatatgtcaaaagcgttagctgctcagatgaagatgaaaaacccagaaaacgcaggcgaacaaactcctctagctcctcccctgttgtcctcaaggaagttccaaaggctgttgttccggtctcaaagacgatcactgtgcctgtgagtggaagtcccaagatgagcaacattatgcagagcattgccaactccttaccaccccatatgtcacctgtgaaaataacgtttaccaaaccatcaacacagacaacaaacacaacaacacagaaggttattatagtgaccacatcaccaagttcaacctttgtgcccaacattctctccaaatctcataactatgcagcagtcactaagcttgtaccaacatcagtcattgcctccacgactcagaagccacctgttgttataactgcgtcccaggcctctctggtcaccagtagcagcaatggcaacagcagttctacgtcatcacctatttctagtacagttgcagtaacaacggtggtatcttccacaccgtccgtggtcatgtcaacagtagcacaaggtgtatccacatcagcaatcaaagtggcatcgacaagacttccttcccccaaaagcttagtgagtggccctacccagattcttgcacagtttcctaaacagcatcagcagtctcctaagcagcagttacagcaagtacaacaacagacacagcagccagtggcccagccttcttcagtgtctcagcagcagcagcctcagcagtcagcattgccgcctggtatcaaacctaccatccagatcaaacaggagtcaggtgttaaaatcatcacacagcaggttcaaccaagtaaaatcttacccaaaccagtgactgcaactctacccaccagtagcaattccccaattatggtggttagcagtaatggtgcaattatgacaactaaactggtaaccactcctaccggtactcaggcaacctatacccggccaacagtgagcccatccttaggtcgtgtggctacaacccctggagctgcaacctatgtgaaaactaccagtggcagcatcatcactgtagtacccaaatcattagctaccttgggaggcaagataattagcagtaatattgtttctggaacgactaccaaaatcactacaatcccaatgacttccaagcccaatgtgattgttgtacaaaagactacaggaaaaggaacgaccattcaaggcctccctggcaaaaacgttgtcacaaccttgctaaatgctggaggagaaaagactcttcagacagtgccagctggagccaagccagctataattactgctacaagacccatcaccaaaatgattgtaacacagcccaaaggaataggttccgcagtacagccagcagctaaaatcattccaacaaaaattgtgtatggacaacaagggaaaacacaggttctaattaaacccaaaccagtgacatttcaagctacagttgtcagtgaacaaacaaggcagctggtaacagaaacattacagcaagcatccagggtagcagatgccagtaattcatctgctcaggaaggaaaagaggagccacagggttacacagacagtagttcttcttccacagagtcctcccagagttctcaagattcccagcctgtagttcatgtaattgcttcccggcgtcaggattggtcagaacatgagattgcaatggagactagccccaccataatatatcaggatgtatccagtgaatcacaatcagccacttcaacaatcaaagctctgttagaactccaacagacaacagtaaaggaaaaattggaatctaaaccaagacaacccactattgacttgagtcaaatggcagtacctattcagatgacccaggaaaagagacattctcctgagagtccatccattgctgtggtagagtcagaactagttgctgaatacatcaccacggtcagccatcgctcccagccccaacagccttcccagccccagcggaccctgcttcaacatgtggctcagtcacagactgcgacgcagacttcggtggtagtaaagtccatcccagcgtcttcccctggagcaatcacccacatcatgcagcaggcattaagcagtcacaccgcttttacgaaacacagtgaggaacttggaactgaggagggtgaggttgaagagatggacacattggatcctcagacaggtctgttttaccgctctgccctgacacaatcgcagtcaaccaaacagcagaaacttagccagccccagctggaacagactcagctgcaagtgaaaactctgcagtgcttccagaccaaacagaagcagaccatccacctgcaggcagaccaactccagcacaaactcacacagatgccccagctctctatcaggcatcagaaactgaatcctctccagcaggaacaagcacagcccaagccagatgcacagcacacacagcatactgtggtggccaaagacaggcagcttcctaccttaatggcacagcccccgcaaactgtagtacaggtgcttgccgtgaaaaccacacagcagcttcctaaactgcagcaagctccgaaccaaccaaaaatctacgtgcaaccccaaactcctcagagccagatggcactcccctcttcagagaaacagcctgcaagccaggtggagcagccaattataactcaaggatcctctgttacaaagataacatttgaggggcgccagcctcccacagttacaaagataactggtggcagttctgttcctaagctgacatcaccagttacaagcatatctcccattcaggcctctgagaagacagcagtgtcagacattttgcaaatgtctttgatggaagctcagattgatacaaatgtagaacatatggtagtggatcccccaaagaaggctctagccaccaatgtgctcactggtgaggcaggagctctaccctccacccatgtggtggtggcagggatgacgaaatgtagagagtcctgttcaagtccatctgctgttggccctcccctaacgaccagaaaaatcgaagcagcaggagtgcctacgacaggccagttcatgcgtattcagaatgtaggccaaaagaaagctgaagagagcccaacagaaattatcatccaggccattccccagtatgctattccttgtcactccagctccaatgtggtggtggagcccagtgggcttctagagttgaacaacttcaccagtcagcagctagatgacgacgagacagccatggagcaggacatagacagcagcacggaggacgggactgagcccagcccctctcagagcgctgtagaacggtcctagtgtgcagacgccggagtgcactttagagcctgcgtggttaccaaatgtccagggaaacttaaaatttgttatagtaaaaaagaaaaaaaaaaaaagaaagaaagaaaaaagcactttgctcatatttaggctggggacctagaagcattttaacaaaattaaactcacagaggaatgtactttaaaaaaaaaaaatagaaaaagaaaaaaaaaaaagcagaggaaacgatgcaccccatggagcccggcaccttgttggtgctaagcagcgagaagagactttcctgtgagtggtcctcgactgctttccactgagcaaataccaccagagagtatgaaaaggaaaagaaaggagaatatgaagagtttgtatttttgaaatgatgtatctgaacagtttttcaaaaattgtgtttgtttttgcaaatccctggagatgttgatttggctagcattttacatttgctcagttcatgattagtttatgaatacctagggaagtcctggcattggagtccttgctggacggtagacatcagtcaggttgctgcctgggcagtttggggtggcttgtacatgtgctccttggttgtatactaatttattgtggagttccacacttgcctatttatttaatgtaaatgttttgaagcaggccgaatcccttttcctacatgtcctgggaagctggatccctggccttcccaccttcccaccccctcacccccctttaagaagacggattagagaagatttggtccggaagcagaggaaaagacatttctagcccaaaggaaatgctcagtggtgttcctgaaaatgagctctgctcattggatgctttctcgacaccgacgttgcacacccgtgttggactgagactttgaaaacaactttgacttactttggtttaaatcctttgaaatgtatgaaaatgttcacttacagttctaaatgtaatgtttttaagtttttaattttttagggtgcagtttgtttacgtgcaggtgtggtcttgtgattgctgtctatcacaagtagagtgaagggtaagggatgggagggtaagaattttgacaagctgtggcaaaggaaactatacctttcatttttaaaaagtgtaaatagaaaagtttttaacggttttatatgaatttcactataaataagcattttaagactgacaaatgttgaactgtatatacatttatcagcttaactgcccagtttttggtgctgaagtactgtaagtagaatttatcagtagcgtcctaatttctgtgtctacacctggggagaagctgtgatgctgtagttaatcaacttacacaagtgcttacacttgtgtaacttacactgataatctcggcaggagcatccctgagacacctaccttgtggtggtgattgtccccatttctactaggtgaaagttactcacccatagatggagctcttggatagcattttattgtacaaatgtgtttcaacaaccactttgtgactgttcctagctaaggggaaatttaacttctcttgggtcatagacatctttaagaagctgattattctatgaactctctcaccaaaaaaatacacatgccaggacacgtgttaagattttgcatacaattttagggacttaagaactcccaagaccatccatgtattccaggttaagccttctgttatggtcagctcattacttacaggtgtaagtttttatcaaataaaatatcttttggatacacatggatcaggaaataagaacaaacttgaataagttatgttccatctctactatcagcataccatgtccgtgttttgagaatatagcctctctgtgctccagcaggttaaatgacaaatgagtctactttagtctgcttttaaagaatcacttgtgcatatatatttgcacacatacatgaatatcaagtaagatttattttttttcctttgaatggttctaatgccaaatagagcatgattttatgaacaaataatattcactcctattttatgtgccaggtaaggctctagccaccaaggctattacagtgaggacatgggaaatcctacccagatggagcttacaggcaaggcttcctgctcgtgaaggaagggggagcaacaattccagagttctcctcttttttttaatcagcacatattcagcatatgtagtggttttgtctgtgtgtgtggaggacagagatcaaccctggggttgttgcatagaggccatcttcctgattcc

SEQ ID NO: 1950 - protein, 1287 aa, Mus musculus
MPVVWPTLLDLSRDECKRILRKLELEAYAGVISALRAQGDLTKEKKDLLGELSKVLSISTERHRAEVRRAVNDERLTTIAHNMSGPNSSSEWSIEGRRLVPLMPRLVPQTAFTVTANAVANAAVQHNASLPVPAETASKDVVVCYTSTTSTPTSTPVPSGSIATVKSPRPDASSVVVLPSGSTVYVKSVSCSDEDEKPRKRRRTNSSSSSPVVLKEVPKAVVPVSKTITVPVSGSPKMSNIMQSIANSLPPHMSPVKITFTKPSTQTTNTTTQKVIIVTTSPSSTFVPNILSKSHNYAAVTKLVPTSVIASTTQKPPVVITASQASLVTSSSNGNSSSTSSPISSTVAVTTVVSSTPSVVMSTVAQGVSTSAIKVASTRLPSPKSLVSGPTQILAQFPKQHQQSPKQQLQQVQQQTQQPVAQPSSVSQQQQPQQSALPPGIKPTIQIKQESGVKIITQQVQPSKILPKPVTATLPTSSNSPIMVVSSNGAIMTTKLVTTPTGTQATYWTVSPSLGRVATTPGAATYVKTTSGSIITVVPKSLATLGGKIISSNIVSGTTTKITTIPMTSKPNVIVVQKTTGKGTTIQGLPGKNVVTTLLNAGGEKTLQTVPAGAKPAIITAWITKMIVTQPKGIGSAVQPAAKIIPTKIVYGQQGKTQVLIKPKPVTFQATVVSEQTRQLVTETLQQASRVADNSSAQEGKEEPQGYTDSSSSSTESSQSSQDSQPVVHVIASRRQDWSEHEIAMSPTIIYQDVSSESQSATSTIKALLELQQTTVKEKLESKPRQPTIDLSQMAVPIQMTQEKRHSPESPSIAVVESELVAEYITTVSHRSQPQQPSQPQRTLLQHVAQSQTATQTSVVVKSIPASSPGAITHIMQQALSSHTAFTKHSEELGTEEGEVEEMDTLDPQTGLFYRSALTQSQSTKQQKLSQPQLEQTQLQVKTLQCFQTKQKQTIHLQADQLQHKLTQMPQLSIRHQKLNPLQQEQAQPKPDAQHTQHTVVAKDRQLPTLMAQPPQTVVQVLAVKTTQQLPKLQQAPNQPKIYVQPQTPQSQMALPSSEKQPASQVEQPIITQGSSVTKITFEGRQPPTVTKITGGSSVPKLTSPVTSISPIQASEKTAVSDILQMSLMEAQIDTNVEHMVVDPPKKATNVLTGEAGALPSTHVVVAGMTKCRESCSSPSAVGPPLTTRKIEAAGVPTTGQFMRIQNVGQKKAEESPTEIIIQAIPQYAIPCHSSSNVVVEPSGLLELNNFTSQQLDDDETAMEQDIDSSTEDGTEPSPSQSAVERS

SEQ ID NO: 1951 - DNA, 6388 bp, Mus musculus
gcgctctggtatctgtcgccatcttgccccttctgaggcaccgcaaacaaacctaattcctggtgtcccctagtcttggcggaggagccttttagatgagccccgaaaggccgggcagggaggacaagctctttggggctaccagacagaagcagcaatgcctgttgtgtggccaacccttttggatctcagcagggatgaatgcaaacggattcttcgaaaattggaactggaggcatatgctggagttatcagtgcacttcgggcacaaggggacctcaccaaggaaaagaaagatcttcttggagagctctcaaaagtccttagcatctcaacagagcgccaccgtgctgaagttcggagagcagtaaacgatgaacggttaacaacaattgcacataaaatgaatttatccttatatttgggtgaaagaccaagttacagtatgtctggacctaatagttcttcagagtggtccatcgaaggacgtagattggtacctctgatgcccaggctggttccccagactgccttcactgtaacagcgaatgctgtggccaatgcagctgtccagcacaatgcgtcccttcctgtgcctgcagagacagcaagcaaagacgtagtggtttgctattcctacacaagtaccacgtctaccccaacctctacccctgttccaagtggcagcatagcaacggttaagtctccaagacctgccagtcctgcctccagtgtagttgtcttgccaagtggaagtactgtatatgtcaaaagcgttagctgctcagatgaagatgaaaaacccagaaaacgcaggcgaacaaactcctctagctcctcccctgttgtcctcaaggaagttccaaaggctgttgttccggtctcaaagacgatcactgtgcctgtgagtggaagtcccaagatgagcaacattatgcagagcattgccaactccttaccaccccatatgtcacctgtgaaaataacgtttaccaaaccatcaacacagacaacaaacacaacaacacagaaggttattatagtgaccacatcaccaagttcaacctttgtgcccaacattctctccaaatctcataactatgcagcagtcactaagcttgtaccaacatcagtcattgcctccacgactcagaagccacctgttgttataactgcgtcccaggcctctctggtcaccagtagcagcaatggcaacagcagttctacgtcatcacctatttctagtacagttgcagtaacaacggtggtatcttccacaccgtccgtggtcatgtcaacagtagcacaaggtgtatccacatcagcaatcaaagtggcatcgacaagacttccttcccccaaaagcttagtgagtggccctacccagattcttgcacagtttcctaaacagcatcagcagtctcctaagcagcagttacagcaagtacaacaacagacacagcagccagtggcccagccttcttcagtgtctcagcagcagcagcctcagcagtcagcattgccgcctggtatcaaacctaccatccagatcaaacaggagtcaggtgttaaaatcatcacacagcaggttcaaccaagtaaaatcttacccaaaccagtgactgcaactctacccaccagtagcaattccccaattatggtggttagcagtaatggtgcaattatgacaactaaactggtaaccactcctaccggtactcaggcaacctatacccggccaacagtgagcccatccttaggtcgtgtggctacaacccctggagctgcaacctatgtgaaaactaccagtggcagcatcatcactgtagtacccaaatcattagctaccttgggaggcaagataattagcagtaatattgtttctggaacgactaccaaaatcactacaatcccaatgacttccaagcccaatgtgattgttgtacaaaagactacaggaaaaggaacgaccattcaaggcctccctggcaaaaacgttgtcacaaccttgctaaatgctggaggagaaaagactcttcagacagtgccagctggagccaagccagctataattactgctacaagacccatcaccaaaatgattgtaacacagcccaaaggaataggttccgcagtacagccagcagctaaaatcattccaacaaaaattgtgtatggacaacaagggaaaacacaggttctaattaaacccaaaccagtgacatttcaagctacagttgtcagtgaacaaacaaggcagctggtaacagaaacattacagcaagcatccagggtagcagatgccagtaattcatctgctcaggaaggaaaagaggagccacagggttacacagacagtagttcttcttccacagagtcctcccagagttctcaagattcccagcctgtagttcatgtaattgcttcccggcgtcaggattggtcagaacatgagattgcaatggagactagccccaccataatatatcaggatgtatccagtgaatcacaatcagccacttcaacaatcaaagctctgttagaactccaacagacaacagtaaaggaaaaattggaatctaaaccaagacaacccactattgacttgagtcaaatggcagtacctattcagatgacccaggaaaagagacattctcctgagagtccatccattgctgtggtagagtcagaactagttgctgaatacatcaccacggtcagccatcgctcccagccccaacagccttcccagccccagcggaccctgcttcaacatgtggctcagtcacagactgcgacgcagacttcggtggtagtaaagtccatcccagcgtcttcccctggagcaatcacccacatcatgcagcaggttgtacctccttttcttcttatagcattaagcagtcacaccgcttttacgaaacacagtgaggaacttggaactgaggagggtgaggttgaagagatggacacattggatcctcagacaggtctgttttaccgctctgccctgacacaatcgcagtcaaccaaacagcagaaacttagccagccccagctggaacagactcagctgcaagtgaaaactctgcagtgcttccagaccaaacagaagcagaccatccacctgcaggcagaccaactccagcacaaactcacacagatgccccagctctctatcaggcatcagaaactgaatcctctccagcaggaacaagcacagcccaagccagatgcacagcacacacagcatactgtggtggccaaagacaggcagcttcctaccttaatggcacagcccccgcaaactgtagtacaggtgcttgccgtgaaaaccacacagcagcttcctaaactgcagcaagctccgaaccaaccaaaaatctacgtgcaaccccaaactcctcagagccagatggcactcccctcttcagagaaacagcctgcaagccaggtggagcagccaattataactcaaggatcctctgttacaaagataacatttgaggggcgccagcctcccacagttacaaagataactggtggcagttctgttcctaagctgacatcaccagttacaagcatatctcccattcaggcctctgagaagacagcagtgtcagacattttgcaaatgtctttgatggaagctcagattgatacaaatgtagaacatatggtagtggatcccccaaagaaggctctagccaccaatgtgctcactggtgaggcaggagctctaccctccacccatgtggtggtggcagggatgacgaaatgtagagagtcctgttcaagtccatctgctgttggccctcccctaacgaccagaaaaatcgaagcagcaggagtgcctacgacaggccagttcatgcgtattcagaatgtaggccaaaagaaagctgaagagagcccaacagaaattatcatccaggccattccccagtatgctattccttgtcactccagctccaatgtggtggtggagcccagtgggcttctagagttgaacaacttcaccagtcagcagctagatgacgacgagacagccatggagcaggacatagacagcagcacggaggacgggactgagcccagcccctctcagagcgctgtagaacggtcctagtgtgcagacgccggagtgcactttagagcctgcgtggttaccaaatgtccagggaaacttaaaatttgttatagtaaaaaagaaaaaaaaaaaaagaaagaaagaaaaaagcactttgctcatatttaggctggggacctagaagcattttaacaaaattaaactcacagaggaatgtactttaaaaaaaaaaaatagaaaaagaaaaaaaaaaaagcagaggaaacgatgcaccccatggagcccggcaccttgttggtgctaagcagcgagaagagactttcctgtgagtggtcctcgactgctttccactgagcaaataccaccagagagtatgaaaaggaaaagaaaggagaatatgaagagtttgtatttttgaaatgatgtatctgaacagtttttcaaaaattgtgtttgtttttgcaaatccctggagatgttgatttggctagcattttacatttgctcagttcatgattagtttatgaatacctagggaagtcctggcattggagtccttgctggacggtagacatcagtcaggttgctgcctgggcagtttggggtggcttgtacatgtgctccttggttgtatactaatttattgtggagttccacacttgcctatttatttaatgtaaatgttttgaagcaggccgaatcccttttcctacatgtcctgggaagctggatccctggccttcccaccttcccaccccctcacccccctttaagaagacggattagagaagatttggtccggaagcagaggaaaagacatttctagcccaaaggaaatgctcagtggtgttcctgaaaatgagctctgctcattggatgctttctcgacaccgacgttgcacacccgtgttggactgagactttgaaaacaactttgacttactttggtttaaatcctttgaaatgtatgaaaatgttcacttacagttctaaatgtaatgtttttaagtttttaattttttagggtgcagtttgtttacgtgcaggtgtggtcttgtgattgctgtctatcacaagtagagtgaagggtaagggatgggagggtaagaattttgacaagctgtggcaaaggaaactatacctttcatttttaaaaagtgtaaatagaaaagtttttaacggttttatatgaatttcactataaataagcattttaagactgacaaatgttgaactgtatatacatttatcagcttaactgcccagtttttggtgctgaagtactgtaagtagaatttatcagtagcgtcctaatttctgtgtctacacctggggagaagctgtgatgctgtagttaatcaacttacacaagtgcttacacttgtgtaacttacactgataatctcggcaggagcatccctgagacacctaccttgtggtggtgattgtccccatttctactaggtgaaagttactcacccatagatggagctcttggatagcattttattgtacaaatgtgtttcaacaaccactttgtgactgttcctagctaaggggaaatttaacttctcttgggtcatagacatctttaagaagctgattattctatgaactctctcaccaaaaaaatacacatgccaggacacgtgttaagattttgcatacaattttagggacttaagaactcccaagaccatccatgtattccaggttaagccttctgttatggtcagctcattacttacaggtgtaagtttttatcaaataaaatatcttttggatacacatggatcaggaaataagaacaaacttgaataagttatgttccatctctactatcagcataccatgtccgtgttttgagaatatagcctctctgtgctccagcaggttaaatgacaaatgagtctactttagtctgcttttaaagaatcacttgtgcatatatatttgcacacatacatgaatatcaagtaagatttattttttttcctttgaatggttctaatgccaaatagagcatgattttatgaacaaataatattcactcctattttatgtgccaggtaaggctctagccaccaaggctattacagtgaggacatgggaaatcctacccagatggagcttacaggcaaggcttcctgctcgtgaaggaagggggagcaacaattccagagttctcctcttttttttaatcagcacatattcagcatatgtagtggttttgtctgtgtgtgtggaggacagagatcaaccctggggttgttgcatagaggccatcttcctgattcc

SEQ ID NO: 1952 - protein, 1309 aa, Mus musculus
MPVVWPTLLDLSRDECKRILRKLELEAYAGVISALRAQGDLTKEKKDLLGELSKVLSISTERHRAEVRRAVNDERLTTIAHKMNLSLYLGERPSYSMSGPNSSSEWSIEGRRLVPLMPRLVPQTAFTVTANAVANAAVQHNASLPVPAETASKDVVVCYTSTTSTPTSTPVPSGSIATVKSPRPDASSVVVLPSGSTVYVKSVSCSDEDEKPRKRRRTNSSSSSPVVLKEVPKAVVPVSKTITVPVSGSPKMSNIMQSIANSLPPHMSPVKITFTKPSTQTTNTTTQKVIIVTTSPSSTFVPNILSKSHNYAAVTKLVPTSVIASTTQKPPVVITASQASLVTSSSNGNSSSTSSPISSTVAVTTVVSSTPSVVMSTVAQGVSTSAIKVASTRLPSPKSLVSGPTQILAQFPKQHQQSPKQQLQQVQQQTQQPVAQPSSVSQQQQPQQSALPPGIKPTIQIKQESGVKIITQQVQPSKILPKPVTATLPTSSNSPIMVVSSNGAIMTTKLVTTPTGTQATYWTVSPSLGRVATTPGAATYVKTTSGSIITVVPKSLATLGGKIISSNIVSGTTTKITTIPMTSKPNVIVVQKTTGKGTTIQGLPGKNVVTTLLNAGGEKTLQTVPAGAKPAIITAWITKMIVTQPKGIGSAVQPAAKIIPTKIVYGQQGKTQVLIKPKPVTFQATVVSEQTRQLVTETLQQASRVADNSSAQEGKEEPQGYTDSSSSSTESSQSSQDSQPVVHVIASRRQDWSEHEIAMSPTIIYQDVSSESQSATSTIKALLELQQTTVKEKLESKPRQPTIDLSQMAVPIQMTQEKRHSPESPSIAVVESELVAEYITTVSHRSQPQQPSQPQRTLLQHVAQSQTATQTSVVVKSIPASSPGAITHIMQQVVPPFLLIALSSHTAFTKHSEELGTEEGEVEEMDTLDPQTGLFYRSALTQSQSTKQQKLSQPQLEQTQLQVKTLQCFQTKQKQTIHLQADQLQHKLTQMPQLSIRHQKLNPLQQEQAQPKPDAQHTQHTVVAKDRQLPTLMAQPPQTVVQVLAVKTTQQLPKLQQAPNQPKIYVQPQTPQSQMALPSSEKQPASQVEQPIITQGSSVTKITFEGRQPPTVTKITGGSSVPKLTSPVTSISPIQASEKTAVSDILQMSLMEAQIDTNVEHMVVDPPKKATNVLTGEAGALPSTHVVVAGMTKCRESCSSPSAVGPPLTTRKIEAAGVPTTGQFMRIQNVGQKKAEESPTEIIIQAIPQYAIPCHSSSNVVVEPSGLLELNNFTSQQLDDDETAMEQDIDSSTEDGTEPSPSQSAVERS

SEQ ID NO: 1953 - DNA, 127845 bp, Homo sapiens
gccaagtctcttggacaaagagcagagtgcagtgggagcatcccaaagattgatctccatgcttccacttttacactcttattctcattctcacagtatcaaatattatgtctaacatttgaaaatggcctggcattttctcctaaagttgaacacatgaatatttaactttaggacaaaagttgacccaacaatttctctaagtcttgggttcaaatgacttagagaaattcataatttcaataggcggcatgaacaagaatattcagagcaaactgttcacatgaacaaaaacaataaaatgttcatcaatgggagaatgggtgaaaaaatggataaattcacacaatggagaaacaacagttaaaataaatgaaccatagcaacatgcgacaatatggatgactcttagcaatataaataaaaacagtaaataaattctaaaatattacatacagcatcacatacttttcatggtatagattttttttttttttttttgagacggagtctcactctgtcgcccaggctggagtgcagtggcgtgatctcggctcactgcaagctccgcctcgcgggttcatgctattctcctgcctcagcctcctgagttgctgggatcacaggtgcccgccaccacgcccggctgtttttttgtatttttagtagaggcggggtttcgctacgttggccaggctggtctcaaactcctcacctcatgatcctcccgactcggcatctcaaagtgttgtgattacaggagtgagccactgtgcccggcagttctataaattttaacaaagtttttgtaactaccactacaatcaaaatacaaagcagttccatcaccctcccccaactccaaacccttggcagccattgatctgtatgctgttgtgatatttgtaccttttggagaatgtcatacaaatggaatcatatagtatgtaacctttggatattggcttcttttactcagaataatgcctttgagattcacccaacttcttgtgtgtatcttacctcttttttattgctcagtagtattccattgtataaatgtaccacagtttacttattcactcactgaaagacatttggttatttccagtttttggtgaataagaacaaaactgttctaaacactcatgcatgttttcatgtgaaatttttcatttctctaggcaaaatgtgtacgaatgttattgctgagtcatatagtaactgtttgaaagtttacaagaaaatgccaaactgctttctagagtggccatactattttgcattcctatcagtcatgtatgagagttccagttgctctgcatcctcaccaggagctggtgttgtcaatgtattttatttcagccattctattaggtgggtagtggtattgtatcatgattttatttgatttaagagacggggtctcaccatattgcccagggtggagtgcagtggctattcacagacgcaagcacggcacactacagcctcgaaaccctgggctcaagtgagcccagcatctggagatgtctcctgtctcagcatctggagacagtctctgcacccagctgtgacactgtcattttactttgcatttctcttatggctaatcatgttcagtatgttttcttgtgcttattcccatctgtatatcctcttcggtgaagcgtcttttgcctattttaaaatggggttgttttcttacttagatacaagtcttatgtctgataagtgttctacaagtatttttctcccagtttgttgcccactgttgcattcttttaatggtggctttcacagagcattgccttggcagctttgtaacaaatcaattgacctcagactaccacttatagaaagagtatatttacttttccctattccttcagttaggtacagctaaaaaccctggacactatatgtaaaacattatacataaaacaaatgtaagaagaatctgaaaggtgacaagaaggcagaccacctaaggatctggaacccaaggaatacacagaaatgagttccctgggttttcttttatatatcccagattgggtactggagaagctggcaacccagaaatgccaatgggcacagcatttttttttaaaagccctaggaaaagcctgctctgtctagtcaaaggactaggaaagcagcagctttgcaagacagaacatttttagatgataacgtctctactccagataagtaccacgggaaaaaaactacaacccaacccccacccccaccagcaaaggccaggttctaatgagaccactcaacttcctttctccatttctgggttcatgtcagagaatacacagggggaagcttagactttcatcctcaatggacagtaacaaggccctctcctaatacttgcccctcacacttgtcagcccaccacatgtaaaacatggaatttcacctgtacctggtggcaaagaggtgcccttcccttctcaggtgggatggtgtcagacaaggccaagtggagagttgggacttttacctccaaccagtggtaatgaggccacccccaaacccccacctagctaaactgaaatgtatgcatttcccaaaattcttatgtttatgcctgtgagttggccattgctatttctttctcggattttaatagcctttcctcctttttctgttgaacttctatcttttaaggccctacttgcatgctgtcttcttggtgacttttccttactagctcctaggaagtattaatggctccttaactcttttcttttcttttcttttttttttttttgagacggagtctcactctgtcgcccaggctggagtgcagtggcaagatctccattcactgcaacctctgcctcccaggttcaggccattctcctgcctcagcctcccgagtagctgggactacaggcacccgccaccacacccggctaattttttgtatttttagtagagacggggtgtcaccgtgttagccaggattgtctccatctcctgacctcgtgatccgcccgcctcggcctcccaaagtgctgggattacaggaactcttttcttacaacttgctaataccagctaggtgcggtggctcacgcctgtaatctcagcactttgcggggcagaggcggctggatcacctgaggtcaggagttggaagaccagcctggccaacattgtgaaaccccatctctactaaaaatacaaaaatttgctaggcgtggtggcacacacctgtaatcctagctactcgggaggctgaggaaggagaatcgcttgaacccaggaggcagaggttgtagtgagccgggatcacgccagttgcactccagcctgggtgacaagagtgaaactaaaaaaaattaaaaaaaaaacaacaaaaaaaaaacacacttgctaataccatgaacaccatattgtatggcaattatctgtgtatgtgtctgtctcccccactagattatgagtatgtgaagggcagttgatcatgtttagtaatttgtttctccggagcctgacagagcttcacccacagtgggtgatgataaatgaactttatatgtaaattctttaactgaaattatttttagaagaaagaaaagatatagctagcctttagaattattctcatgcttaaaaagcatactttttggttacccaaagcctctgcttttatcatgttagtatgaagctggtatgctgttctatatagtttgttttcagattgatctttttcccctttagttccttctacgcacacggatcattttgttttttaaatttaatattcatccatctaaaaaaggtatcatgacatggctgggcacagtggctcctgcctgtaatcccagtactttgggaggccaaggcgggtggatcacctgaggccaggagttcaggaccagcctggccaacatggtgaaaccccatctctagtaaaaatacaaaaattaaccggatgagggggcacgtgcctgtaatcccagctacttgggaggctgaggcagggttaattgctcgaacctgggaggcggaggttgcagtgagccaagatcatgccattgcactccagtctgggtgacaagagcgagactccatctcaaaaaaaataataaataaataaatttaatattcatccatctaaaaaagatacaatgacatggcctggtgtggtggctcacgcctggactcccagcactttgggaggctgaggcgggtggatcacaaggtcaggagtttgagaccagcttggccaaaatggtgaaaccccatctctactaaaaatacaacaattagtggggcatggtggcgcacgcctgtagtcccaactacttgggaggctgaggcaggagaatcgcttgaacctggaaggcggcggttgcagtgagccgagatcgtgctactgcactccagcctgggcgacagagtgagactccatctcaataaataaataaatagataaataaataaataaataattggtctcaaacactggctatattttatggaaaataaagaaagcctctgaaagcagaacctagaggcttgagggtagggtcgagagctgtagagaatcattcctagagatcattaatgcctctgagagcggaacctaaaggcttgagggtagtcaagagctgtagagaatcattcctagagatcattaatgcttctgagagcgtaacctggaggcttgagggtagagtcaagagctgtagagaatcattcctagagatcattcctgatcaaggaactagcatcagagctgttatgaatcagtggccctggcgtgcctcctttattcccctttctgattaaggtctacagtggtttttccatgcctgtcccaccattgtatgttggatgtgtggggaaaaggtaacttgtctctttagttcccgagtctttacactgaaagcaactgcacctaagaaaactaacccatatctggacttgatttaggtgacaagatcttggacctcaaacctaagcatgttgccaaaatgggaagactttgggtggtaggaatgagtccatttgcatgtgggaggaatatgaactgttgtggacagaagatagactatggcagttgatatttctaaaaatgagcacagtaatattctggtgttccaggatgctactatgcttctatcaagagataaaatctatttcccctttccttgaacctgggtgggtctgtgactgattccagacaacagccaatgtcaactgctggtcttatgaatgaatgagccctcataagattccagacctcagtcttcaaatttcccttgctgatgtcaagaggagtagagattaactgtccccactaagtcccacccaaattggagattcatgagtaaaacagataatttaggccacagcaatggttatggaatcacagataaccagacctccttaacacctgtgtgttcgggggaagagtcttctggtgatatttgaatttggacaaatgagttttctctagggcttggtttcctcaactgtaaaatggaacaataattaccaagtcataggaatgttgtaaggtttaaataagataagcaaggtgttcttttcataatgggtctgtaataaacgctacgcagtattatttcaacttattcccaccagttgttctagctttactgctttgtacaaattcaccttcagagtacgtgagttttatatacatttatacaaacatatataaaatctgattttatatctaaatctctctgtatacatattgcaacattatagcttctgtaacactcttggatcacttgctctggggcaatccagttactatatcccaaagatgctcaagcagccttatagggaggtctacatagtgagaaattgaggcctctttccttgctgactttccaaccaatgtgagtgaggtaccttggaagctgatcctccagccccagtcagccttcagatagctgcaactgcttgggagaccccaagccagaaccacccagctaagccactcttgattccaatagaaaatgcaaaaactgtataaaaatttaaaaaattattcttgttttaagtcactaaagtttgggataatttttcttatgcactaagagttaactaacagctatatcaaacatgaggaaagatgggaaactgatcacaggttgaggactatttcggggtcgatggaaggacagagatggttgaataaacttgaaagtactgattgagactgaatttgaaataaataaccatggggtccaggacagaaaggaaaaaaagtaaatccagcaaaggggaacagatttcttttttaaaaaaatttttatttatttttttgagatggagtttcgctcgttgcccaggctgtgcaatggcgcgatctcggctcaccacaacctccgcctcctgggctcaagctactctcctgcctcagcctcccgagtagctgggattacgggcatgtgccaccatgcctggctaattttgtacttttagtagagacggggtttctccatgttggtcaagctggtctcgaactctcgatctcagatgatccgcctgcctcggcctcccaaagtgttgggattacaggcgtgagccaccgcacctggccaggggaacagatttctgtgtattttcccagactagaggtagttataatcatgtctaataggatagtaagtctcagttttccttctttggttgagtgtagagtggctctcatttaattcaccacacatttcctggagccaaagtgcttttatttaaaatcatggctctgttacttacaagcttgttaccttgggccagctatttaacctctctatgccttagtttcttcattcataaaatggggataaaagtgtatctgtaaggttatagtagagattaaacaagttaatgtgtataacgtgatctggaatacagaaagtcctatgtaagtattagctattattcttattatatgctaggctctacagtacacagacctgattggttcctctcctcaaagagctcgttgtccagtcaggaagattttcttttctttttttttgagacagagtcttgctctgtcgcccaggctgaagtgcagtggcgcaatctcagctcactgcaacctccacctcctgggttcaagagattctcctgcctcagcctctcgagtagagtacctaggactacagatgcacaacaccatgaccggctaatttttctatctttagtatagacgggatttcaccatgttggccaagctggtcttgaactcctgacctcaagtgatcagcccacctcggcctcccaaagtactgggaatacaggcatgagccaccatgcccggccaggaagattttcaaataaatggccataattcagtgttctgagctctgtaacaaggtgtacactaagtggtaggggagcagaggcagggatgtctgtcttatcctagagggaaagacaggggcaggataagctttttgaggaaaaagtttgagtctaatccttaaggaagagcatgttgggaacatttgagactataaagcagtcacaggcagcatgggaaaggtagtttctgactgcaaaataaatacggttaggagaaaagggaagatgtgaactgtagtatgtaatgaccagcaccatcaacatcacctgggggcctgttaagactataggatccaggccttacctgatatctatactaccaatatttgcgttttaacaagatcctcaagcggttcctattgaccattaaagtttagaaccactggtctagagcataggctctggagccaacataatcaggtttaaatcccagctttagcttttttttttttttttttttaagatggagtcttgctctgttgcccacgctggaatgcagtagagcgatcttggctcactgcaacctccacctccctggttcaagcaattctcctgtctcagcctcccgagtagctgggattacaggcacatgccaccatgcccagctaatttttgtatttttagtagaggtgggctttcaccatgttggccaggctggtcttgaactcctgacctcaaatgatccacttgcctcagcctcccaaagtgctgggtttacaggcgtgagccaccatttacttatgtgtgactttaggcaagctattttgcttctttcctagactttagttgcctcctttgtaattagagataataaaagtttccacctcataaagttgttctaaggactgaattactatgtaaaatgcttagaccagtatgtggcacttagtaagcacaaggattgactataataattcatcactcatatgctacttcttaaggtcagagtcagttttataagccccttgtctttcgatttgtactccattgtagaggagtagacattcattgtcattttgacattcactgtagaggaaaggacatttggaggtcagaagacctgggattacaaagcctagctctcttccaattcctagctccgtgaaatttggtgagtccttggtacatctatgtttttctcattcatagtatgaaagaccttaatcgtacctgtcacactgaaatgttgcgaggctcaaatcaaataatatatgttaaagtacaaaaatcctctatgaagatttcacttactatctttccaagagttcttaagcaactggatgcataggaaggtcagggagacagcggagggagggcctggtgattaatatgttccactttacgattttctgaaggtgtaggttgggtttcaacaacagtgactttcctagacctcggagggtatttttagctaatgggcaaatagtagtaggaaacttaaatgctgttatttaccttctcttcctaacctacagttccactcaagaacatgaagagtctcatacgtttgtatagtggttcacaacttacaacgtttacgtggtgcatcacaagatccctatagggtagtattaacccaatttttcaagaaggaaactatgtctggaaattgtagaatgcacattaaaaactctttctgacgagcgtttctaccggatccgatgttacccaaagtacaaaatttaaagagggaagtcaatcacaagatttcattgaatcttcagtatcaggcaactggcttctattttatggccgcaaataactatatattgggccccttttctcacctgtaaaataggaacgaaaagaccttctccacaaataagatgaaataagaacaaaggctgagggtgaacctaccacgtcgtagggcctcaaataaattccttctccttcttgcccttgacagagatagcacgagatatcactaccattcccacttcacacgtggaggaaatccaacgcgagaacgctcggatttccccttctttacttgcaacaactccgtaacccgcaaatcggctacggacaactgcgatgtccactatgttagttctcgtagcgtggattctctctcctcaagatgccatctggggggctagaggccactaataattgccctcacgatcgaagaaactcgatcctaatcctcgacggcacttcaggaacaaagctgctctcccatcgtccctaacctcactaccgtaaaggtcgcagcagagcccctgctccaaccgctagcgccatcttggccgctacgtgtgacgccacacgtagcagagagcgcagccgattggctgggagacggcagcccaggagaggcgcgcgaagccagagacaggagggtatgcaggagaaaccaagggaactacaatcccggccttccttgcgcgtacgacagcaaacctggagcgaaagaggttggagtttggattcggaccacaactcccagcaccctccgcgatgtctgtccttttctttcataacgcggaggaaaagaaggacaagatgaatggaggccttttggtgtttgttctccgaaaggcgggaaaagcgaactacacctcccgactggccgcgcgcggctgcgcctgcgccctgttacctgtcgccatcttgccccttcagaggcaccgcaaacaaacccaattcctggtgtcccctagtcttggcggaggagccttttagatgagccccgaaaggccgggcaggtgggtgactctcaggcagggtcctgggaagagctggcaggccagccaggctagaggagcgccgggccaagcattcggagcccggcttggggctcccagccccatcctccgttgtttcctaacgggatcgtggggctccccggggtggactcagggggactctggctggcctggtgctgggactctgggggtttagctctgggagactcccggtgagtccaggtcgtctggctgggtatccgctggcttactctctctcggttgtcctctccgctggggagggagtgaggcgcgggtgccggccgggacccctgacaacagctactggcccagaggggcttgggtcgtggacttgacattgggaccggcgccgagaggtccgggtgaggagcctgggctggctgctcttgttgtggtgctgctagggagtgcgtgtttggagagggggcggggcgggcttgtctccttgacacttgagtggggaaggatcctacaagatcctggttccccgagcgggctccggaaactactgcccgggtttccgatgcgttgcggccccgctctggggtcccctggctaggacgcgccgggatgccgtgacgtggtgctcggttcgagcagtcgccggccgcctccaagatcctgtcgggaggcggggactggcttgtggagggagaggattcctttggctctgccccttcttcctcctccccaccccttttctttatgtcatactgccggctggggcgcgcagtccagttcttcttgccttgggtttgttctgagctgagaggactatgggaagtagggggaggggggctcacctcgggacacagagttggagttagcagccccagcgcctggaacgggatatagcagttatttcggttcggtgtctgacttctaggctagacagtgagctcgttcattcattcattcatccattcgttttgctcagtcgcgtcaaccattcacttacccatttaacaaatacttagagcggctctactctgtgctaagcaggtattgcgcgtgcccccagagccgtgtctttttgtcttttacactaggaaattcccagttctaagtaagttcctggcagctcaactgttggtaaatggctgtttaataactacaggatcaaaattcatattccattaagacttgagagagtatatatatatgtgtgtgtgtgtatatatatatgtatatatatatgtgtatatatatatatatgtatgtatcgttccaattttagtatatgtgttgctgaagcgagcacgaggagttatttattaagtttctttaacttgctaggagctttacaaattttatctcatgtaattcataaatgaggaagctgacaggagtcaacttgccccaggttggtagtaccacctgtttattaaatgaaatgccagccactatgaaagaactttatatatagtgttctttaatacgcgtaacaaactgggtggtattacctctgttttatagatgtgtaaagcttaggctcaaccagtaagttgaaaagttgggactagaaacctagaggtgtctggctctaaagcctgtgttctttccactgtgatagttcaaatgacttaattcttgatttctcaaaagttggaaagtgtggtggtgagaaaggattgtaaaatagtaatatctttttggtttacttcttagcctgtgactggatctccaggtgagtggccccttgaatgtactttggtactttggtaatttgactttttttttttgttctggtagggaggacaagctctttggggctaccaaacagaagcagcaatgcctgttgtgtggccaacccttctggatctcagcagggatgaatgcaaaagaattcttcgaaaattgggtatgacgttcattgtttgttttttacctctctctgataccttttttccctttctgcctaggtcatagctgtttgcatggatgtcatatctcacgctacatcagaaattctttggagatacagttcccatcttactcattgttgtttccctcagtgcctaacatagtgctttgtaaatagtaggtgtgtgaattgtaataatactagtagctaagatttattgagggctacttggctattctgagtcttttttatacaacatctaatttaaatattttaagaattagctttgtcctttgaaagcctaaaaggtaggtgttttttgtttgtttgttttgtctcgtctccattttacagatgaagcttagaagccaaggtaatggtgatagacatggagtcagtatttgaaccagggagtatgctttcagtctcactttaacatactcttaaccttcatgattgtatgtgtcaattacatactatttctgaattctaagttgatgtaagccatgctcactttttcaaattatattttactatcaataataaaacacattttatgcttgtaatttattatttagtgcttcttttcccttacagcagcctttctcaaccagcattgagggaaagaattaaaccctaatgctaaggtatccattgtatgtaaagaactaacttcgccctgtgcatctagagtgctattagttattactttccttgggaaaattgagaaaaagagttattactcaaatcattttgtgttctgtagttcaaatgaggatctttggttgagaaatgctgccttagactatgaggaccttgtcttatttaccactgtagtctctggctagcacaataaatgaaataattgaaaaaaataatttgaaaaagaagattaaatgttttggcagtggatatgcattatttagatatctgtgattttaaaggaaaagtataggtcttgaatttagacagacctggggtcttggtattattacaaatgacccatgtgaccaaggacaagttatttattcttcctaaatttgttgatagttttgttaaaacaaaaaaaaagaggataacactctctgcctcattagtttgttacgtgtgttaacagtatacataaagggcccgtcatagtaaatctttgttgggaatttttctttgtaaatcagatagaatcatagctgctctggccctgcctgtcctttttattccacccaaggccactatgaggatttcaaatcactttttagcagcatcttttaaagcaagtctaagagagttgtttttggagagggtgtgggggatgtcaatcttttttttttttaaccaaacttttagtcctaatctgaagatagttttctacacttgcatacaattaatataacttgttagttgccgattataaagttggactcatatttatttgatagctgaaattgcagaacatatcacaaagacagtagattgaattggggtttctgggcttgggggcctttgaattgagagattatgtttaaatataaaaatggtaacctttaagtctaaatttattcctaatttaatcagagctgtgtgggtaatgttgctgcagagtgcttctatataaaagaaaacagtcatctcgtatggtaatatcatcttcattgacccctcatattgggaggtgagctttgatagtgatttgccaaagacttcctccccacccgttggcttattatcataacaatgaaacctttgaattgtcttcacatgctaactctaggtccaaagtttagaaaaggtacatacagtttttaaaaattagctgtatcctttaaaaaatagttataaatcattttaatataagatgttaaatacttagattttacatacatataaagaaattgggatagagaatttctttatatatactgaatgtgtcagtgctagataaatgcttccttctctctgtcttgcctctccccttccctatttttgtgatcattcctgagctgtagctccaacacggggctttatggactatagtgtatttgaatggctgatttaatggaccaaattgagggctttatataaatggtttggcaaatctttcgtttttggaatgttcatatgtgtttgttattttattctacttttatattaacactgtgatagaattgcttgaaaaataataccagaaattcaactaaatttgaggtatgtgaagatctaaggatacccatcaaaatggacatcaacaaatgtgaaggaggttgggaagctaatagggttctttacaatgagtgaatttcttgtgaagaggaggaagtgatgtggattctatagctgtggtaactgtgttcagagtcccagttttgtgtgtgtgaggttgccatctcttgattttgtacatgacttcttagacttgaaatgtcagaaatatttgttgtatttctttagttaattttattttctctgaagtaatgtcttgatcatcataaattccacaggtcacaagtgtcaacttctttttcatttttctcaaactattccctcactttgacctcttcatttctttttatggcattgccattctcctaaacattttgcaggctgcaaaatctgactgccttctgtcattacttcccacaatcaatcaattactgagtcctatcaaataaaaacattttagactggaaatagaggcttttctcagtctggccacaaactacttttccatttttaccgttctctgttctcttccatgtgtgaactaaaatctttaaaatagttatttggatatatttcttaggtgccttgttggattttaatcaccttgaggatagggattttattttgttcctagaaatattctccatgataccttgtagcagtaatgttcaattagtagtttggtttgagttagggactatccaagtacagacatatttttactgcccttagtataaaactctcaaacatagttactgactgttactggaagttactggaataatatgaaactatctgttcttttactctatttcttttgtacatttgctttttttttttttttccctgcctgcctggcacacaattctctttctgattaaagcttctgcttctacgctagatgatgtatttctcttctgcacttaactccctgagggcaggattagcgcaccatttggtatatataatgggactcaatactgatctgttgaataaaatatttcataaatgggggaaggcataaacatttagagtatactgcattcttggttatccctaatgctttttctggactctattctgggtccgataaaagctgaaacatgtttcctgaaactaactatttccttcactactctgagcagcagagctttgtccttcaagagtgaccaccacattgaaatgtctacatagtatccaacacaggttgaacatgcaggatgtttaaacttagggtcatttggttggaacagacattccttttttttttttttccttctgagacagagtcttactctgtcacccaggctgaagtacagtggcatgaacatggctcaccacatcctcaacctcccaggctcaagtgatcctcctacctcagcctcctgagtagctgggaccacaggcatgcactaccacccccagctgatttttaaattttttgtagggatggggtcttgccatgttgcccaggctggtgttgaactcctgagctcaagcaatcctcctgcctcggcctcccaaagagctgggattacaggtgtgagccatgatgcctggccagattttttttttttttttttaagacaggatctcgctcagttgcccaggctggagtgcggtggcatgatcacagctcactgcatccttgacttcctgggctcaagtgatcctcccacgtcagcctcctgagaggctggaactacaggtgtgtaccaccacacccagctaattttttgtattttttttgtacagccagagttttgccatgttgcccagactggtctcgaactcttggactcaagcaatctgcctccctcggcttcccaaagtgctaggattacaggcatgagccactgcacccggcctgacagttttatttcttaatggttaattctgtggagagagtgcaatgaagatgtctagtattaggattcagtatattatgtcctagttgctgcaagatcatttcatgtttatgtttcccaattagtcattttgatgatagtttttatagatgcggaggatcttgcttctggagggtacctacaaagtcccttctaggtaaggaaacaggtttagagatgagaaaagacttgctgaatgtcacataactaataagtggcagtgctggagtcagaatattttgttccaatattttttccattgcatactatttacagtactttcgattacacaggagggaggtagaatatagtttgaattcttaggcaagcctaaggaattattttaagagttgattaatgaagataccttttagtaatgctgaaaacgtctcagccttgttacatcagttggtgcctattcccagttgttggtatcatttgtgttatatgttttttagtgacaatgtgtgaaacaaaatatctactgttagatttttctacctaaacattttatatacatgacttctgtgaggcaatgaaaaacaaaatataaaattataaaagtcacattttaatgttattagataaaatttttgaaaggaatttaaaacaatatttttatttaattatttttagtttttttgccctgaagtttcactatacatagccatagtattaaaatattaaaggcctatcttgataaaataattttcttcttttagaattggaggcatatgctggagttatcagtgcacttcgggcacagggggatctcaccaaggaaaagaaagatcttcttggagaactatcaaaagttcttaggtaaattattgtaaatgtttgtgagactctagaaatttcattttgggggattttattacttatcactctcaaattaagtaactgtcaaattaagttgaagaacagaggtgttcaaattgttggtgctaagagactccatcccagttgtgcgctctgttacagaaaattgtataatttaccatttattgtgtaatccagaatgaatataatccagaatgaagagcgtgcaaactcttcagaaagacttgaaggcagtttatcttacttttagcccacctggataagggaggtgcttttgacataggtgaaggaaagaagagcagtaactggatgtgatgatctagagtggcatttgttggagggaagaggtgatgtgaggaagatgccttaatttacataaatgggtagtgattatgtggtcatggccttaaacatagtcttttttaagtgaaaatatggaagaggctcttcctgttacttaacattaatatagggatgttattaagccaaattctcaatcttactgtcttcatagttaacaatttgtatttgtttgttgtttatatttctcataaattctgttttgtagcctcttaattctgttttggtccatattagagatttagcttaaatagtatggaatacaatttgaagagtggtattcattttattgagtatttatgaatggaatgggtataaccttttaaaaagttgtttactattattaactttacatgtgtttaatcaggattaatataagcacatttttaccattggtaacataatgtaatgtagaagatatgcagctaaagtattgaataataaaggaatattaccctggtgttaagttgtatagtgtatagccacaggaaacagattatcttgccactccatttgtttattatattcattgaacattaaattatagactcctaagccttagaaaagaccttagaaaactttcttgtaagtgacaaaatcctcttctcagcagtcacaattaggaagccgttcagcatctgtttgcatgtttagatagcaggaagctctgctaatcttacccatggtctgacatttctgagatttggaagtaataccttgatatcaggctgaatttgtcttcttatgatttctaatttgcaactaaatatttcttcagttacacagaattagtatgaatccttttctaagatgttaaagcatttgaagatatatatattagactcctgtctatatcttttcacaaagcaatcttgtcccccttctccccccaaaaatgttgacttaaacattaatgaaagtatagaaagagctgcctgcttggcagagttctataatggctatttttcttcatagcatctcaacagaacgccaccgtgctgaagttcggagagcagtaaacgatgaacggttaacaacaattgcacataagtaagccattagtcgtaccatccctgattttttatgacatagtataacacagttttgaaacagtcttcctattgtgtagcagattcctgagtcttttaagtaacaatatctctatactcagggatcctgatcatagcagtaaaagtgatattaactgtttattcagttgggtttttttttgcatttggttaggcaagctttaagtactcaggtcaaatcctgttacaatgtaatctctgtctaactaaaaatcaccacaatttagcagatgattcacttacttgaggccaagttcagtaacaaagtattgtgacccctaaaattgaaagccctttagaggttctttgtaatggtatttgatatgttattaccttataaataggcgttgtaacttttttgatatctgactcattatttcatgtattttgagattcagaaaaaaatgtaaaatttgtgttctgtctttaagaaatatgaatataacatctcttaatttatttttaaaaagccaaaaaaataaaacgattaaagattcttaccaaattgttttctgatcattataactatttaagaggaggggtggagggtggtagaggattgagggcagggattaagccttaattgagtatgtatggagacagtgcctcctaaagaatacaaaggaacagaaagtagcctttaaatgtttgtacaagatgataaaacatttcataaaatatgttatagtataattcatttgttttttatttttatgttttaatgttaaataaaactaaagggaaaaattcagtgcatttccataatgtgataacttaaacattgtatttaagtcaattggcaatatttgaattgaccccaaagagcttcatcttgtgcttcactgtccctcattttacttaacataaaatggggtgctaccttttcaacaacgtagtttgaaggttgagctgtttattctggaattttgagattcttcagtggtaggtatgcactgtagaaatttgggaattttctattagagatgtttagtaatctagttgctaggctaacatggttgaaacactcagatattagtcaatgtgttccttctttaatttgctctaagcttttgaattggggtgctctagaagtaatggtaactgcgcctagattctaatttgagaactagtaataggaaatttatgtgctagagaataaagtagtaaaccttagcttgcattcagaggcacttagaaacaaattagtattgtagaagcattggaaaggtattgtggggcaactagttgtaagttgatgcatcagtttcatacttaaaggataacatttatttagtctccttttccttttttcccctttaaagaatgaatttatccttatatttgggtgaaagaccaagttacaggtatgcaaataggttattattatttcaggctttttcttgtatttatttccaaattgaagctctcaattattcaggggcacattattccatttatgaattaaccatgccccttgctttccttctcttcccctcctccccctcctaatactgcccaccctttagccattttgctgcttgggagtacctctagtcagagggtgggaagggagaggaggtgaaaattttaattagtcattttactacttgttagttgtcctggaaaaggtttggtggaagaatttacaagtatttgccaaaatatttttggataatatatgagtttctttaatctatttgacctctccctttccctcctctctccatcagcatggataattgagagttggcttttatctgcctgtgtttcctcttttttctctcctttctgatttctttaatacataaatttcatttttttgaaaagagtttacttcagtgtataattttgagcttcttaggtttttctatattcttgttttaatatattattgttttagttggatcagatgttttatctacttgttgagctcaaggggtcagtgagtggggattggtgaggaaggaatagatctctcattctttccatctcctctgccctcttcccctcagaagtagcaacagagcctagttccaaagattatctataggagggcttcatactccaagcctagaaaaacaactaaaggaatgcgcctgaactgactgcattccctttctcctcccctcccctccccccactcaaaataggagttaaggcctgaaggaatgtggttgaaaggtgatgagaaagctgagaagattgagcacaaaggagggggaaacaaaaggagtgggatatctgggatcaaagaaaagcctttcttgtggcttgaaacataacacgtgtttattgtttggcaccaggccacttattaagtagtttgatactcttaattcagtttttaattatgtcagaatgttacagtattaacgccttggatgtcaaggagcttcggattttttaattggaccactcttgcccatgttgtctctagattcaggagaaagtgtctatctggaatttctgctctcttaatcctttccccatcactcagacattcacaggatactgggtcagtttctgtgtgaggatgaggatttcttactggtgccttatacaccaaaggatatgtgggccaaggtagtttcattagtataatcttagatttctcagaaaagggactggagcaaggtttcccctgtcatacttagtataaatagagagacacttttatactcacactaaagtatctcagtgaagccctccaggaagatgtttagtctataaaatctagtttagataacttgtgtaactaatgcatatttacacttacatcttcattactaagcaaataggaatttctgatctaattctaacatgatacttaatttttcactcaaagtttgagcatgtttgcatgagtagaaatttggaagatttatagatctttctaaaagttgcagttgtgtcttttgcactgcaagttttgtcttttcagtagcatatgttcatgtgcttcaaattattaatcttccataatttctgccaccacttaaacaatgtaccaggtaagtgtagatgtcacttaatttgtgtggtaaactctcaccaagcaagcttattagtgatattataataaactgatagcaaaataaaagtaagccaagaatatgctgaatagcttttagaattttttcctctaacaatgagcttttctgtttctttcttgtttgtaccattctttgtttcaaaagtagcatcaacttggggattatataataacaaatttgtgagtgttactgaagttttaggaattcccctttcctttgtcttaggtaggactgtgttaaaccataaaggaatttacacattttccacagtaacccagctggattcatcggctcttagaaattcctttctgagctgaacttaaatccttaaattgtaaaagtgatttattccattcagtgaaagttggtagtaattcaacagcactatccagttggtatacatcaaaggcaaaacccatttgaaaaattttatactttctacttatctgtcaaataatttcagtagtatgattatgctggtcgaaggagacatttattagttgcgtgaccttaggcaagttatttgatatctctgactcagtttcctcatctgtaaaatggaggtaataatactaccaaattcataggattgaagagttaatacatgtaatatgtttagaacaatccttgacataagtgcttaatgataactatcatcattactatcattattagcattatcatttttccactgctcactaacaagggctttatactcttatctaaatctgagaatgggtggacatacagagtcttaaactctaagttagtttgaagaacctatggtttcaaatgcagaaatatttcagatttagtgtgaagagattgattatttcggagtgaatttaaacttcagcactaatcattagtcagggtctttcatagagccaagttaagagaagtgatacaactacgttttgatatttcaacctctggttggattcttggaataaaatttgctccaggaattttgggtagagaaactgagaatggtgtttgcttagagagttgaattgtctcaattccttcttagagtgaagggtggtataaataaataaaagtaatggtgcgtttcttctagtgtcgttagatctagtctgtttttaacaggaaggataataacaatacattgtcagtgacacatacggttatatatacagcactcttctgttcttttctacttaggctcccttgtttactgcctcagtttcccttgtttgaaagccttagaacctctggccatgcaggcagttagataattttcaaaaggttcagtgaattccatccttaattaaggaaaatctgacttttaaaattataagtgctttttactttcttgtgttaattataaaattaacttctaaaaattagttgaaatactagttttcattagtgatagcagatttaagttaatgaaaccaaggccgatatttatttagaaggcataggaagatttcttgtagtttcagttatgttcatgataagattcagattatagaataaactgtgtaagaacctaagtgtgtgacattccttgaattataattattcataattttgatcttgcttgcttaaaataaagcctctcctattcactcagggcactttttataatttaaaaagttatatatgtttgagcatatatgtttgatttgtttttagtgattgaaaacccttgtagcagcgctttcttttttgtttagtatgtctggacctaatagctcttcagaatggtccattgaaggtcgtcgattggtaccactgatgccccggctcgttccccaaaccgcctttactgtaacagctaatgctgttgctaatgcagctatccagcataatgcatctcttccagtgcctgcagaaacaggaagcaaggaaggtgagtagaaaaatatgcctgtgttagagattacttttcttagaatcttcaagaaaatttcaagaaaagttgtcttatttttcatctacttttattctagtgtttaaaggttatgaaacatagtaggaaactctaattctgaaattagactgccaggtttttagccttagacaaaatttagtctcccttttgtcgaaggtgtgaattatgttaatcatcaaaattgcaaaaacctcggaatggatttttgatatcagtgtgtcttgttaaaaatgaatagaaggccttaatggatgacattagaaaataaataaggtaacagaagtcatttagctactaaaaaatgattctgaactgatagctttagaaaataaagctgttttcattttctggaatcagtgatatatgctacttctttgttctggttaatgaatgtgctgaatccattccctggcagaagggttttatcattatttatctagtaattgacacatgctttaaaaatcctccaatgctctagaggccaccaagagtaatattaaatttgagagagcatatttggattgactcaagtagtttagtttgatgttgcatgacaatgaccctaaaaacaatgcatttgtcaggttactctggggaattgtctttgcttacctagcaatggccatggaacagagtaagacactttttttatgcatgacaggctctgttttagggtgagaaaaggtatatttggaggaagacagtgtataaacttggcctccatcgagttcttccatctactgactctcaggtagagtggaaagaatacagagtttccactagtcaaatccatgtttgaatcttaatttgtcatttcctagctgtatgacctccagcaagtttgagcttctgtgagccttgggttcctcatctttaaaatgagaatgtgatgttgtgagaattagtgaagatgtatggaaaggatttagtgtgtggtactcaataaatggtgcctataacctattcttactgttgtttagctgtatcccttcgttgaatgataggttgaaatatgatgttgtcattattttagttgagttgttgtgctgcttggatggcaatgactagcgagttgatttatagaaaagaacgtttccttgattgttccctagtggccacattggaaattgctaaggttagggaaaaattatccacccatatcattggtgctgctattagtattaaaagggaatacaagtaagtgcctgttgtcccactcctgccatgagtgaaaattattttcattttttctcagtataattttaaactttatttctttgtaactgtgtttttctccgtcagcaatgtcacctgtagacaagctgttaaatacttgggaaaaatctatttaagtgataattttcaggaaaggttattaatgccttttaatctgtggacctaatacctagtactggcctctgacttctgatcacatgaaaatgttaaaattggcctgcaataaaaataatttttttgtatgcctggacagttttggtgaaagttaacagcaaacttttttatcgttccttcagtagtggtttgctattcctacacaagtaccacgtcaaccccaacctctacccctgttccaagtggcagcatagcaacggttaagtctccaagacctgccagtcctgcctccaatgtagttgtcttgccaagtggaagtactgtttatgtcaaaagtaagtgatattctcagtgttatcagggccttcttggctaaatgctgcagtctaggctctgattagacctgccttcctggattaaatcattggtccactagctgttagtaggttagtttttgaagattttaaagaattcctttctttacatatgactaggtatatattgcttttttaatcagttctggggtttcagaagtgacttcattttcattgtctgtgggtaatctgcctttgaactgtgttatccttaagaattcacttttttgattgtcatgaaatagaaatgttgtgaatagaaactgaaggaatgtgcttatgtaatttattcaatatttctcctataattttaatctttgtagtattttcttagattattttatataatgtattatccagctgttatattcagtgaaacattctagagagcctatctttatttctaattgactgtaatttttgaagtttcttttgtttgtagtttttaattccttgattctaccctatgaagcagtttggtgtcctgttcatttttttttcatttttttgtttttaatttctgttaagacaatgttgctttatatatacattttgtaatttataaagaaaaggggccgggcacggtggctcacgcgtgtaatcctagcactttgggaggccgaggcgggcgaatcatctgaggtcaggagttcaagaccagcctggccaacctgacgaaacctcgtctctactaaaaatacaacaacaacaaaaagttagctgggcgtggtgacacatgcctgtagtcccagctactcgggaggccgagacaggaaaattgcttgaacccgggaggcagaggttgcagtgagccgagattgcgccactgcactccaccctgggcgacagagcaagactctgtctcaaaaaaaagaaaaaaaaaaaagaaaagtggttaatttggctcacgattctgctggttggaaagtccaagtttgggtgaggatcttatgctgcttcaactcaaggcagaaagtggaaagagagcaggtgtatgcagagagatcccatggtgagagaggaagtgagagacagaaactgaggaagccagaatcttcttaaattttattttttgctttgtttttcctgtcaactggaggtgattaatatttgattttcatttttctcaatatggttataaacttgatttctttgtaacttagaggtaaagtttgctgttttagacaggaacaattctaggtctttgtcggccccgtttaaattaaaagttaaaaaattgaaggtgtaggggttatattttattactaatttcatgagtcatgctatataattgtttatgtctgctctgcagagattttctatgttaagttgctgtgtttcatgtttctcacttgatttttaaaaagtctacaaaaacagttgaggctttagttcataaagaaaaaacgcagaatctaggactattaattaaatttatatctgatttctgcagatttagccaaggtggtcttttaaaataactgtagagacctactttttgatcatttttaaaacactaggctggagccgggctcagtggctcacgcctgtaatcccagcactttgggaggctgaggtgggtggatcagttgaggtcaggcgttcgagactaacctggccaacatggtgaaactctgtctctactaaaaatacaaaaactagtcaggtgtggtggcgggcgcctgtaatccgagctatttgggaggctgagacaggagaatcacttgaacctgggaggcagaggttgcagtgagctgagatcgtgccatgcactctagcctgggcaacagagtgagcctccatcttaaaagaaaagaaaagaaaacaccaggccaggcatggtggctcatgcctgtaatcccagcactttgggaggccgaggcgagcagatcacctgaggtcaggagtttgagaccagccttgcaaacatggtgaaacctcatctctactaaaaatacaaaaaaattagccaggtgtggtggcaggtgcctgtaatcccagctacttgggaggctgaggcaggagaatcacttgaatctgggagacggaggttgtggtgagctgagattgcaccactgcactccagcctgggcaacagtgtgagactccatctcataaataaataaataaataaataagtaaaatactgaaagtgcatctcaaacatgaagaaactatttcatataatatgtagttttaagtaacaggaagattattgctttatgctcagaagtcataccaacaacattagtttgagatgtaattgtttatttacctaactttgtatgtgcaaggcactatactggggaaacaaaccaataagacttagtcattaccctctgggagccccttactaatgggagatatgtagacaatcacattgccatctggtaagtggtacagcttaggggagaggtggattagctttgcttagaggaataagggaaagcttcactaaggagatggcttgtaggatgatgattgcagaatgatgaagaggtcattgatgttaggtggtattccccaaggaacaatagtatatggatactcagagatggatagaatgtggttaaggtggctttggggaatggttagcagttcagaatcccaagattataggggtacatggggttggatgtaacaggtattgtgttcttggaaagatatggagtcttgaatgatatggtaatgattttgtgcctcatcttgtagggagataaaaactactaaaggattttaggcagtgcataggcatgatgagatgtgaaattttgcaactagtagtaggattgagggtagatagaagtggacagactggaagcatggacatcttttaggtgattgttgctaagatacaggcaggagataagaaggcctgacatggccataggtttaaagaaaggagggaaggccaggcacggtggctcacgcctgtaatcccagcactttgggaggccaaggcgggtggatcacctgaggtcaggaggtcaagaccagcctgggccaacatggtgaaaccctgtctctactgaaaatataaaaattagctgactgtggtggcgggcatatgtaatcccagctacttgggaggctgaggctgaggcaggagaatcgcttgaacctgggaggcagaggttgcagtgagctgagatcacaccactgcactccagcctgggcgacagagtgagactttgtcttaaaagaaaggagggaaggcagccgggcgcggtggctcacgcctgtaatcccagcactttgggaggccgaggcggatggatcatgaggtcaggagatcgagaccatcctggctaacaaggtgaaaccccgtctctactaaaaatacaaaaaattagccgggcgcggtggcgggtgcctgtagtcccagctactcgggaggctgaggcaggagaatggcgtgaacccgggaagcggagcttgcggtgagccgagattgcgccactgcagtccgcagtccggcctgggtgacagagcgagactccgtctcaaaaaaaaaaaaaaaaaaagaaaggagggaaggcattcagagaccacttctctgagggaagattgatagaacttattggctaatggcttaagacagagagaggacaaggatgatataaagattttaaaaataaagtgtataatgcaagattagtttggtatacatatagcagtattgtcattgcccttcaggtgtaagctgttcagatgaagatgaaaaacccagaaaacgaaggcgaacaaactcttccagctcctctcctgttgttctaaaggaagttccaaaggccgttgttccagtctcaaagacgatcactgtgcctgtgagtggtagtcccaagatgagcaacatcatgcagagcattgccaactccttaccaccccacatgtctcctgtaaaaataaccttcactaaaccatcaacacagacaacaaacacaacaacacagaaggtatgtggtggagggagtctctgcctgccaattgtttctttcagacagtatgattcagatttaataaacatgcactgagtgcttactatgtgcttggcattatgctggggatgttcacatcttttactttgtttaattttccagataaggctttgggataggtattattatttcagttttgcagatgaggctttgcgatgttaaatgacttgcataatatgacacagccgaatctcttctaagaattgtgctctattttatagttgtaatcctatttggaaaaaatttaaaatagaaaaaaattttaacctatatttgtatgaccttccctgtagcaactcaggttttaatttgccaaagtagtaaagttgtcaggtgtttcatagaagaaaggaaggatataattaagtgaataacttttgttatcttctttttaaattctttgtatgctgttattaattcattcctaaactcttctctaaatatgttgaagtcattattattttgtcagtttcatgtttttagacccctctgtcttcccacactgatctggatggaccataatggctctctaggcttgttgtacacctatatttctgggatctctctttaaccatcattctgatcttctttgttagtttctttgcttattttgccagagcatatcctccagtagctacctggtgtatgggtggatggaaagtaaatttttggggaccttgcatggtagactgcaaatttctttattctaccttcccactttttttatggtttaactaggaaaagtattctaggttggaagtgattttccctgtgaatttttgaagatgttgttgctctgttggcttccggcttccattattgattttgggaagtccagtaccattctaatttcagatactgtttttctctttacaaactttcagtaactttcagaattctgaaatttcaaggtaatgttccttggtgtgggtctttatttcatcgattaggttgtatactcagtgggcccttttattctgaatatttatgtccttcaattctgatacatttcttgagttatttgatttgtctctgttttctctttttggatcacctgttatttgcctattgaactgcctggattgatccatttatctttctcatttccattttccatttgtttgcattgttttcctactctaatataatggaaaaagcctgtattttggaattggacttcttggattcagatcccagcttttgccacttactagctgcgtgactgtgggaaaactaaactctctacccgagttttctcatctataaaacagagaaaacaatgtatttattttataggatttttgggtgtaaatacatgaaataatatatgaaaaattgttacagccttgcacgtagtaaatgttcagtatttttattttctttatcatttaattttatttttcactacatttatagagtttttcatttttgctctcatactttaaatttctagtaactctttttctctcaaagttcctttaaaaaaaaaaaaagcatcctactctttcatagaagcattgtattctcttacctaatgagattcatgacaattttttaaatgttttcttctttcatgttctctctgtaagttccttttatctatttgttttgatctcttttatttagttttcttaagtgtctggctgtctgcttacgaatgaaaataggcactaaaaaggtgacagaaagctctgtgtgtatgggtgggacatgctgactggtgactttcatcgtaaattgacctagctggactattttgttcaggaacatccactacccctttacctccaccatttgtcactgtctttagggcttttgtttggactggtaggattgttcagaaatatcccagtctcctgcctcgagtaatataagcctggttggcagtgttttgtttgggggttaaatagagggaaagggctgggtgggctcaccattcatgatatatatactttacttatctcctctgtttttagcgtagtacctggccccccagatgtgcctgatgtcattagatttctttgtcaatctccctcatgacagtaaattcttagccttcccttaggatgggggagaatagctagggatctaaatcgttcttaaacagattttcaactaattttcctctcttcagttgcatgtttatccccacttcagaagtatctggtgttctcaattcctgagtctttctggggctcacaaatgcaggctgccttattttttgttactctttactgccttaggtttttacactcttagatatgcttaatccattcttatttgtctgtttttcagtttccaaactttatagctgttgtcacctttttgttttgaccttataggtttatgtgccttttcccttttaaaaaaaaatcccttcatgctgttttagagggattttggggaaggactggaggtaaattctgtgttcggtgtatggtctttcaacctttgaatctttactcctgtgataacttccccttaaagaacctcctcgagtttcttgcaaagatgtcactatataatatattaaaaattatcattattagtaactagaagtgataatgagctgatctgtgggatgtaattctattttcagtctgaagatgagggattatggtatggtattagaatcaaacaaaaactttgagagtcaagagtcctgggttagaaccctagttcttctagtatgacctaaataaattagtctttctaaatctgttcactcatttatgagatgagaatgatgtcatcttaggacattattgcaaggattaaatgagattggatatttaaagagcaacataaggtatgtattcaacaattgttagttccttcccttgcaggtattttatggagtgtagagttttgtttatttacactgttgattaatgagctgttccaaataaatgaattcatcagttcattgaagcatatcccttcatatatagaaattaactatttttgatgacttcttaagttttatactgaggataatttttacatttttatttgatgactccaagataatctttctgaatgtcactttttatatgctattatagttattgctttctaagctggccctatattaggtggcatcagtctgctgtgccctgaatttttaagtctacttactataacgcttttaactgcctttgttgctggatcttattttctcagtaattcttctctcttccctgcttcttgtctagtcttttaatttagtatttgagaaatagtaaagcaaagctgtagctaaaagcgtacctacctcccatccatatccttctattcctgtactctgttttattgttattcattatacttacaactagttgatattatattgcaaagttgtttatcttctatttctcccagggactataagctgctaagggtagagactttgtcttattcttcaatgtattccctagtatttagaatagtacctggcatgtagtaagtgctaattaatatttgttgaatgagtaaattaattaatgaatgaatagaagtatctggttccaatactggcttagctacctcccttgagcctgtttctttgtaaaataaagatgatcataggccgggtgtggtggctcacacctgtaatcccaacactttgggaggctgaggcaggcggatcacctgagggtaggagttctgagaccagcctgatcaacatggagaaacgctgtccctactaaaaatacaaaattagccgggcgtggtggcacatgctactcggtaggctgaggcaggagaatcgcttgaacccgggagacagaggttgcagtgagccaagattgtgccattgcactccagcctgggcagcaggagctaaactccatctcaaaaaaaaaaacaaaaaaaaaaaacttaacgtagtacatacagtgagtgctcagtaaatgtcacctaacactattaacttttcagtcttcttcggtggacttagctaaaaatacgtgtagtagatgaggactcagtgaagtttgtgaactttttttaagttcattgactttaccatatatttatttttattttttttcttctgaattttcaattgagaatggatagttgaggttttcagacttgggatgtttgaaagagggcatatttatctcccaagttatatatgagccataccatgagagttcaggttcagaaccttagatttggcttactatggttaaaaaaaacaaatgtttaaaacaaattaaattaaaaataagactcattcattccacaaatatttattgagcacctactatgttccagatgtaaaactgtactcttttacttcttgtgtactcaatgccattacttttattattttgtggacaagctgatatgggtaggactaataaatgttcttggagttttatgtttttcttttgcttgggtaattggatttttctgaaatctatccaaggctgttgccattattgcattcactttggatttgtcacaaatcctgtataaggcaacttaggaattattgtaggtgaagtgatttttatattaagtataattatttatgaatttgtggactttattcaaattcaaataggtaatatattttcagggtagacacatttccacctgtgttaatgtggtgccttcattttaaatataacattgatgcagcacttatatatcagagcagcagaatttagctttatgccttcatgtgcttgattgatatttttcattttgtccttagggtgcaagtcccagcactcttaaggagtttttgtgagtgctagaaggtcagtaatttgaattatggcctgaataaacactgtttggttcacttggttttaaacccctatacttcctcctgttgtaatgagtaactttaaagtacaagtaggtttcctccaaggtggatctctaatgaaggataacttcttttcagatcagaaatcatcttgcaggctgaaatctcaaaatagatcttatcatttgtatctgtaacctaaaatatgctcttaaagactctagattcattttgctgaagttttgtcttaatgttaaagcctacatgtatactctaattctgaaattgcaaatatttggtacaagtgtgaatgcttcccttgcccttgcccatgacagacattgctaattaactgtggcatactttcctgctaagccttggtgaattcttatctgggcctcaaagtccttataagcattgtgctccaggaagctactacaattagttcagaactggcaaaagtgaaccctaattgccattactactctaatggtttggctgtggcagcagctgtgaattctttggattctcagaggtatcagaatttgggaaaaaaataagagaagttttaagtgaaacaaagtatattgaaatgcattttcagattgatttgatgtataatgcctttactgatatccttttcacatttattaagtagtagtaataagctactaataagtaccatttgttgactgccaaatattgacaacctgctatgtgcctagcactatgtcagatgcttaacatcattatatcgtttaatccttgtaatgactttgcaaggtaggtattattatccccattttatagatgaaaattggagcccagagattccaacatgtccaggggcctgccatttttaagtggcagaggcaggatctaagtgcaggttcatttaagcttgtggtctttttgccatattggtctacttctcagcttgtatcatggttgattgttgttttctaataatgctatataggtatttgctgatcaagtctatctataaatatgctggttgactctatataggtgtttgctgatcttatgtatctttcttgatgcctcaaataattaactaacaaaccccttaaagtaatggacaagtacttatatcttgtaattctctgtaacactggataagaactcatatctggtaattctctgtaacactcaaagtatataataacaatgttatggtccgagcttctttgagatgtaggtcctgagtacagatatattcagtaaattttgactgactcacttctggccttctttagaagtgatataaaaatgaaaaagaattttcccttaaattctttagatttttcaaaacagtttttcttttctagctaggtacaaataatttcatttaaagaggaaggagataatctgctcttttttgggttttactataccaccccagaataaaaatgtgatactacagacttctaaataatttttgtgttctcatttgtaaaatggggataataatagtacacgtatcatagaattgttaggagatttaaataagccaatacatattagccctaggagctattcttgattccgttcttttccttaaccctgccattttcattcatcaacaaatcctattctctctacttttcaaaataatctgactttgatcacttttctttatttctactactaacactccggtgcaggcagcctctatcattttctgcttggtctgatgcaatagtttaagtggtctcactgcttcccctcttgcctcttatcatgtagcagctagagtgatcttttaaaatatacatcaaattttgtttttcttcctacttaaaatattcctgtggctttctattatacttagtataaaaatctaaattccacatttgatgtagcctctgcttacttttccaactcctctttgccctatgtgctttttgctacactgctttcttttctgtttttaaatttatcaagctacttctgacattagttcctttccttcatactattctctctgtctggaatgatttgtcactaaatcatctacagttttctagttatactggcaaaaccttgacatctctttcctgcctctctttttctccattcttcatatcaatatacaagcaaatcctgttggctttacctttgcagtgtattcagaatctgttcactttttacttcttccaccacaaataccttgttcaccatcatccctgcctggtttgttacaggagcttcttaatttgtctccctgtttctaccttcattgccctactgtactttttacctaataggtagagtaatgattttttaaaaaatggactttattttttaaaacagttttagatttacagaaaaattgagaagatagtacagagttctcatatactctgcacccagttttctcattctctttgttttgttttttaccaacttcctgataagtctcctttattctgaacattttacattggtgtgatacattgttatagctaataaagactattaatgcattaatgttaattagatccatggtttattcatatttccttggtttttacctattgtctttttctgttccaggataccatattatatttagttgttatttctctttaggctcctactgattcctctttactgtgaaagtttctcagactttccttttttttgatgaccttgacaattttgaggagtactggtcaagtatcttgtagataccccaactgttagaatttgtctgatgttcttctcatgattagactatgattatgggtttttggacagaagacctcagagagaaagtacctttttcatcacatcatataaagggtatatactgtcaacatgctcttacatggtttagtccttcattacttctctgcagttgtctactactactttgtaccctatacatttctatcccgttcactagatctttgaagtttcttgaacataccaagcttgcttctgctttagggcctttgtatttactgctccctgtgctgatggatggtcttctgggtagcaccatggttcatatccctacttccttctggtttctgttcatatgtcaccttactgagaggtctttattgaatacattacttaaaaaatcatacagtgctcccatcattctttattctcctaccatacttttttgtctcttccatttgtctctgcgtgacatatacttacatttctgtttatttctctcccactactaaaatgtaagctacttgaaggtatcagctttgtttcttttgttcattcttctattctccagcgtctagaaccatgcctggcacatagtaggtgctcaataaatatttataaacgaatgaatgtttaaattactttctagaaagagtgtgccaatttatactccctaagtagtatgctgaaatgtctactttcctgtatcttatacagcgttgatgttatcttttaaaatatttgatttgtaaaattgttgcttataaatgcattttgatgattactagtaaaggaaaattttaatatatttttagttgtatattctctgttgaattgcttcttcgtttttcataagctatttttaaattatatataactaactgtgagtctagatacattagtagtttagtaggtacataaaaataacttattttttattccttaggttattatagtcaccacatcaccaagctcaaccttcgtgcccaacattctctccaaatcccataactatgcagcagtcactaagcttgtaccaacgtcagtcattgcttctacaacccagaagccaccagttgttataactgcttcacagtcctctctggtcagtaatagcagcagtggcagcagcagttctacaccatcacctattcctaatacagttgcagtaacagctgtggtgtcctctacaccatctgtggtcatgtcaacagtagcacaaggtgagtgctgtttcacaatttaattctgtcacagttgctgtatggaattttgaagaaaacttggtgggtatgtttctctgctttggatatgaaggtccctactattagacccaagatcaccaccccatgtaccccagtttgagaatgtcaagatggtcggtgattccattttcttatattaatatgcttgccccaagttgttttgcacaatacctaattacctgggctgctaacattcacaaaatgtaggttaaatctcgtcactataaatttcaaagggctgtacaaatatctttaatataatgaaatttttaaatgagaaatttgaaattatattaccataggttcttcagaggaaacatcaagtacacatcctcttcaaagtaaatgataagaggtaggaggaagaagatggtttcaaggatatgccatttgctttttcttcagtctcctacatttttcttttctttttttttttctcgttgagacagggtctcgctctgtcacccaggctggagtgcagtggagcaatcttggctcactgcaacctccacctcccgggcttaagtgatcctcccacctcagccttctgagtagctgggaccacaggcacacaccaccatacccggctattttttttgtatttttggtagagatggggtctcaccatgttgcccaggctggtctggaactccggagttcagacaatccacccgcctcagcttcccgaagtgctggtatgacaggcacgagccactgtgctctgctagtctcctaaatttttctgtatggatagatgatggaaatattaactgaagagcaactgagacctgaactcaagggcaattgctgcttaatagcagagtaggccgggcacagtggctcacgcctgtaatcccagcactttgggaagcggaggcaggtggatcacttgaggtcaggagttcaagaccagcctggcctgtaacatggtgaaaccctgtctctactaaaaaaatacaaaaattagccgggcatggtaatgcacacctgtaatcccggctactcgggaggctgaggcaggagaatcgtttggatcacttgaggtcaggagttcaagaccagcctggtgaacatggctgtactaaaaaaatacaaaaattagccgggcatggtagtgcacacctgtaatcccagctactcaggaggctgaggcaggagaattgtttgaacccgggaggtggagattgtagtgagctgagatccagtcctggtgacagaccaagaccctgtctcaaaaaaaaaaaaaaaaagcaaaggaaaggaaatatggaaatctgagttccattttagcttagtttcttaatacctttgtgttcctcccatatgaaagacaagacaaatagcatatcatcagaaatgtcctttttttagtgttcgtaggtcttaagagagtgattagagggaagcatatattatatagaattcatacccatatttatagtctgtcaaagggagcttggaaacaatatagaagggtacttggtattagttttcattgagttttatgtgaataatatataacttaagacagattggggcttggaaatattctagtttatgaactaggagtgaatgcaagcactcaagtaggaaaacagtgtcttgattgctttaatgatgtattatgtattttatgtaactgttagcaaggaagggattacatagatatggatgcagtcagtatttcttcactctgcagctgttatagtaggatatgggagcatctgtcattattttctagttctgatacccatttaatgtctcaatcaatgacaagaagtagcagtcttcaaatttccttttatgttaccttaagtaattaaaaaaaattccaacatttctatttatacagcagtgaatgagaatatagtcctgttaaatacagaaatatatattttttgagatagagtctccctctgtcgcccaggctagagtgcagtggcatgatcttggcttcctgcaacctccgcctcccgggttcaagcaattctcctgccccagccaccccagtagctgggacctcaggtgtgtgccaccacgcctggctaatttttgtatttctaatagaggtggtgttttgccgtgttgcccaggctgatctcgaactcctggcctcaagagatcctcccgcttcagcctaccaaggtgctgggattacaggtgtgcaccaccatgcctggcctaaatataaaaataatttttatacagaaaatttgtttaaaatgttggttacaaacatgttccgaattcaccattttataatttgaaggttgagagaaggaaaggccacctgactcctcactcgactgatccgtgtatcaacactaatataaattatcatctgttgatagttgtttttctctgccaatactcatcaaacagtttgctggttttactgtattagaaagattactgtttttctaaggtagatggtactatttgagatgagagatatttctcttggttactaataaaatatcttgaagcaaaatgaatattccaagcttctaattttcattcttaattttctccaggtagccactgaatctcttaggaacttaggactttcttcattttctcctttgcttcttagcattctacatctctttgagccttaagtaattataggggagctggatgtgacatctcagagatttctcttaaagtcactggaagttaatagagaatgaaggatgtaaaagtaaactctgagtatagatactcaaggaaacgatgtgattattttgtttctgttcgagatatttaatttagatgttattagtactaagaaatcaaggaattttattttttttaaacaaggtaaatattgatggaaatggtaacacagactgcgtttgtgattgtgcctgcaggacttctgtagcagctcctgtgtgggtacatcaggcaagagggcattcagtgtctcctactatggactagagacatattgttttagggctgatgtatctctggttgtgcctgtagggatagctggttgtagaggggaaagggtcttagcagtaacttggtaaatgactccatgtttgtaagtgtagtgatggtccacactgcattaattgatgtagttatgtctcttttaacttagcagtcttctctctcttttgtccttgcaacttacttgttgaagaaataactaatttttctgagagtttcccatagtctggattttactgatttcatctgtgtattgtagtttaacaaggtctcctgttcaatgcatttccataaaactggtagccaaatctaggagcttgattagattcaagtctgattgtttttggaaataggaagaatgaacattttataagtggtggtgtatgcttcttgttgcatcgttttaagagacacataatgtctgttttttccctttagtgatgttaacattgactagaggatacaagtgttaccaaatggttttaatagctattgataatctttgcctagatctattattttattggttgttgcaaaatgcattttatctttattttcatttattagctagaattcttaaagaagtactttcctttattattattgcttaccctgaggtacaattcatatgggaaaagcaggatacatgcatgattatttctctttatttgtatgttttcagatgaattggttcattggccaataagattttcactccccatattactaagatttttgatgtctatcaatatattgcagatcttccttctggtgctcacattgttccatccttgccagtgggagcctcttagttggtttctaaattcttttgacacaactacattagtctttaatagtgtccttgttttgtggtatgttgagatgttccaggttcatcttgtacattttctcccctagacttgaaattagacatttcttcagggagtcctggtttcttagtgaaaaatggtgtttagataccacaatctgggcattgtgggggtggtcattactactgtattggtcattgtttctgcattttattggtggatagagctacagttcttttctgtttaagaggaaatatatcgtcgtttcatactgatattaccaattccaatttataattatgggttttaactttttctatttgtatgtttgtatttttttctgtcctgatgattcaggaaggatctttaggaatcagaaaatcctgattcctaatgattaataaaattatacctttaatgtattgtataatacataatagtttcagaataacagaaccaatatgattattgaacataaatttttattgtagttatttagtttttaagggtattctaaggatatacaatcaaattactgtatttaaaagtcacgtgaaattcttttctctgtagtcaagcattataggttaatttatttctgtttttttttttgtttttgttttttgttttttttggattgtcattttgaaaatttttgctaaattttatttataattatataacatatttatgtagttccaaaatcaaatccacaaaatcaggtatgttctgagaagtctgtttatctatgactccaacagtctgttctgtcctccctgataggtaatctttttaatttttatttctcctttcattttttagcatataagcaaatatgtatttattatattttacttttttcttagataaatgtaatatgttatacaaactgttgtgcactttaatgtttggaaggagtaatttttaatttggtggttataagtctggtgctggtaatacagaaagaggtaatagctgaaatgtggtttgtgtgtatagaaggaaatagtttatcttagatgactgcttcttcatagttgattcatcttcctttttcctccagattttgtacttaacagactagaagctgtaattagcttttattgttatctctcaaatccattctcaaatgggctattatttcttagattgattccactttttattctgcctgtttcttagattaattgttgctactgttttttttcttttactttggtgagaaaaatttgctctcatcttgttctttttatgttattttatggatttcatgaattatttacccaatgttgtgacactcttctgctgaccttttattttccctccttgacccatcttcaacctaacaagttacttccaattacgttgtttccacaaatactcctgctgtctgcactttatatactttctttaggctggccctgaatgcagtttctgttttccattcccatttcacaaaataccttccctgtgaaatccccccttatcagttcaacatggttcccatttagtatctaaaagcatttaaaagttatttaaaacctaacaatattagtaggtcagatagtttaggagaacaatagagaacaaagcgctaccagtaatcccaccactataccacaatagcactttctattttctatattattacctttttacccatgtgaataatttttttttttttttttttttgagactgagtctcgctctgttgcccacgctggagtgcagtggtgcgatcttggctcactgcaatctctgcctcccaggttcaagcgattctcctgcctcagcctcctgagtagctgggatacaggcgcgtgccaccatgctcagcaaatttttgtatttttagtagagaaggggtttcaccatcttggtcaggctggccttgaactcctgacctcatgatccacctgcttcagcctcccaaagtgctaggcttacaggtgtgagccaccgcgcccggccgtgaataatattttttacatatttggaataaaaagttcatattctatttggtagcatgctttcttcatatatcgttgcttcgttaacatttttctataaatatcctaattattttcagagctgtttaatatttttattattgttgcataatttattaaatttattataatatataatgtataataatttattaaattattcccttattgttgggtatccagtgtgtttccagggtttgatattctagatttaactatagtgaacatctttgtgaatttaattgagccttccattttcttagaaccagcactcaggagcaggattaccaaatagaagaattggaatttttttgtagagtttactaaataccgtattttgtccccatgaactatataccctttcagaatatttcattagtatctggccactattaagtccttattcttcttgttttaaaaaaaaaatggggcagagggaataattttggcgattaaagaaaaattgagtagcatactgcttaaccagtacagtttgatcatccctaatccgaaaatctgaaatctgaaatgctctaaaatctgaagctttctgagtgccagctgatgccacaagtggacaattccacacctgacttcatgtggtaaattgcaattaaaacacaggtgcacaccacacagtttattcagcgttcccaagggaaaaaagactccttctgccttctgtagcagtgatatatcttttccttgtacacccagattcccctcacacaagcacttccacagagggtaataaaatggcatgtatgcaggctggatgcgccaataacaggttccccgcaatgccccacatggggccaagacctatgtgcatcacttactgtgtttttttgcttattttctgttctgtggtgtaaagatgttgaaaatgtccaaaaggcctgcagatacccctgaggggtaatagtgacaaggacacaaagaagcacttatgtttatctatagcacagaaagacaagctgttggagaaactggacagtggtgttaagtgtgcagtgtgttgcagaagagtatggtgttggaatgactaccgtatatgacctgaagaaacaaaaggataagctattgaaattctgtgctgaaatcgtgaacagaagttaatgaaaaatagaaatacactgcacaaagctaaaaatgaagatttcgatcacgtattgaaaaagtggatccatcagcattggagtgaactcatgtcacttaatggtaatactggtcatgaaacaagcaaagatctatcatgatgaactaaaaattgaaggaagctgtgaatattcaacaggccatttgcagaaatttaagaggagacacgacattacagttttaaaaatttgtggtgataaagcatttgttgatgatgaagcagcaagaagttcattgacaagtttgtcaaagtcaccgctggtaactatcttatgccagaacaagtcagtaatgctgatgaaacatcactgttttggtgttaatgccccagaaagacactggctatagcagatgagacagctaatacaggaattaaggatgccaaggacagaataactgggatgggatgtggtaatgtaggaggcactcataagtgctgtgatgggcaaaagcttgcattcttgctgtttttaaggagtgaatttcttaccagtctgttattatggtaacaaaaaagcatgtattactagggatatcttttctgattggtttccaaacatcttgtaccagcagcttgtgctcactgcagggcagctggactgtgcaacgatggcaagattttatttcttgatgactgttctcatcttccagttgaaattctcctcaaaaataatgtttatgccatgtactttcccccagtgtgactttattaattcagccatgcggccaaggtatccttagaccagtgaagagttagtataaaaatgctttcttgggggagttgctggcaaggtagccgaataggaacagctctggtctgcagctcccagcgagatcaacacagaaggcaggtgatttctgcatttccaactgaggtacctggcttatctcactgggactggttagacagtgggtgtagcccatggagggtgagccaaagcagggtggggtgttgcctcacccaggaagcacaaggggttgggaaactccctcccctagccaagggaagccatgagggaccctgctgtgagggacagtgcattcaggcccagatactatgcttttcccatggtctttgcaacccacagaccaggagattccttcgggtgcctatgccaccagggccctaggtttgaagcacaaaactgggtggccgtttgggcagacaccgagctagctgcaggaggtctttttgttttgttttgttttgatttgttttgtttttgagacagagtctttctttgttgcccaggctggagtgccatggcgctatctcggctcactgcaagctctgcctcccgggttcacaccattctcctgcctcagcctctcgaatagctgggactacaggcgcccgccaccacgcccagctaattttttgtatttttagtagagacggggtttcatcatgttagccaggatggtctcgatctcctgaccttatgatctgctcaccttggccttccaaagtgctggtattacaggcatgagccaccacgcccggccaggagtttttgtttttcataccctagtggcacctggaacaccagcgagacagaaccattcactcccctggaaagggagctgaagccagggagccaggtggtctagctcagcaaatcccaaccccatggacgccagcaagctaagatcaactggcttgaaattctcgctgccagcacagcagtctgaagttaacctgggatgctcaagcttggtggggggaggggtatccaccattacttaggcttgagtaggtggtttttcccctcagagtataaagaaagccaccaggaagttcgaactgggcggagcccactgcagctcatcaaagctgctgtagccagactgcctctctagattcctcctctctgggcagggcatctctgaaagaaaggcagcagccccagtcaggggcttataggtaaaacacccatctccctgggacagagcacctgggggaaggggcggctgtgggcacagcttcagcagagttaaacgttcctgcctgccagctctgaagagagcagcagatctcccagcacaacatttgagctctgctaagggacagactgcctcctcaagtgggttcctgacctccatgcctcctgactgggagacacctcccagtaggggttgatagacacctcatacaggagagctctggctggcatctggcaggtgcccctctgggacaaagcctccaggggaaggaacaggcagcaatctttgctgttctgcagcctccactggtgatacccaggcaaacagggtctggagtggacctccagcaaactccagcagacctgcagcagaggggcctgagtgttagaaggaaaactaacaagcagaaaggaatagcatcaacatcagcaaaaaggatgtccacacagaaaccccatctaaaagtcaccaacatcaaagaccaaaggtagataaatccatgaagatgaggaaaaaccagcgcagaaaggctgaaaattccaaaaaccagaatgcctcttctcctccaaaggatcataactccttgccagcaagggaacaaaactggacagagaatgagtttgatgaattgacagaagtaggcttcagaaggtggatattaacaaacctccccgagctaagggaacatgttctaaccaatgcaaggaagctaagacccttgaaaagaggttaggggaattgctaattagaataattagtttagagaaaaacataaatgacttgatggagctgaaaaacacagcacaagaactttgtgaagcatacacaagtatcaatagctgaatcaactaagcaggagaaaggatatcagagattgaagatcaacgtaatgaaatgaagtgtgaagacaagattagagaaaaaaaggatgaaaaggaatgaacaaagcctccaagaaatatgggactatgtgaaaagaccaaacctgcgtttgattggtttacctgaaagtgacagggagaatggaatcaagttgggaaacactcttcagcatattatccaggagaacttccccaacctagcaagacaggccaacattcaaattcaggaaatacaaagaacaccacaaagatactcctcgagaagagcaaccccaagacacataatcgtcagattcaccaaggttggaatgaaggaaaaaatgttaagggcagccagagagaaaggtagggttacccacaaagggaagcccatcagactaacagcggatctctctgcagaaaccctacaagccagaagagagtggtggccaaaattgaacattcttaaagaaaagaattttcaacccagaatttcatatccagctaaactaagcttcataagtgaaggagaaataaaatccttcacagacaagcaaatgctgagagatttttgtcaccaccaggcctgccttacaagaactcctgaaggaagcactaaacatggaaaggaaaaaccagtaccagccactgcaaaaacataccaaattgtaaagaccattgacactatgaagaaactgtatcaactaatggacaaaataaccagctggcatcataatgacaggatcagattcacacataacaatattaaccttaaatgtaaacaggctaaatgccccaattaaaaaacacagactagtaaattggatagagagtcaagacccatcggtgtgctgtattcaggagacccatctcatgtgaaagacacacataggctcaaaataaagggatggaggaatatttaccaagcaaatggaaagcaaaaaaaagcaaggattgcaatcctagtatctgataaaacagactttaaaccaacaaagatcaaagaagacaagggcattacataatggtaaagagatcaatgcaacaagaagagctaactatcctaaatatatatgcacccaatacaggagcacccagattaataaagcaagttcttagagacctacaaagagacttagactcccacacaataatagtgggagactttaacaccccactgtcaatattagaaagatcaacgagacagaaaattaacaaggatattcaggacttgaactcagccttggaccaagtggacctaatagacatctacagaactctccaccccaaatcaacagaatatacattcttctcagcaccacatcacacttattctaaaactgaccacataattggaagtaaaacacttctcagcaaatgcaaaagaacagaaatcataacaaacagtctctcagaccacggggcaatcaaattataactcaggattaagaaactcactcaaacctgcacaactacatggaaactgaacaacctgctcctgaatgactactgggtaaataacgaaattaaggcagaaataaataacttctttgaaaccaatgagaacaaagacacaatgtaccagaatctctgggacacaggttaaagcagtgtttagagggaaatttatagcactaaatgtccacaggagaaagcaggaaagatctaaaattgacaccctaacatcacaattaaaagaactagagaagcaagagcaaacacattcaaaagctagcagaagtcaagaaataactaagatcagagcagaactgaaggagatagagatacgaaaaacccttcaaaaaatcagtgaatccaggagctggttttttgaaaagattaacaagatagaaagactgctagccagtctaataaagaagaaaagagagaagaatcaaatagacacaataaaaaatgataaagagaatattaccactgatcccacagaaatacgaactactatcagagaatactataaacacctctacgcaaataaactagaaaatctagaaggccaggcgcagtggctcatgcctgtaacctgcactttgggaggccaaggcaggcagatcccctgaggtcgggagttcgagaccagcctgaccaacatggagaaaccccatctctactaaaaatacaaaaaattagccaggcatggtggcacatgcctgtaatccctgctactcgggaggctgaggcaggagaattgcttgaacctgggaggtggaggtagtggagattgcgccattgcacacccagcctgggtaacaagagcaaaactccatctcaaaaaaaaaaaaaaacctagaagaaatggataaattcctggacacatacaccctcccaggactaaaccaggaagaagtcaaatccctgaatagatcaataacaagttgtgaaattgaggcagtaattaatagtctaccaacaaaaaaagcccgggaccagatggattcacagctgaattctaccagaggtacaaagaggagctgctaccattccttatgaaactattccaagcaatagaaaaagagagactccttcctaactcattttatgaggccagcatcattctgataccaaaacccagcagagacacaacaacaagaaaatttcaggccaatatccctgatgaacatcaatgaaaaaatcctcaataaaatcctgggaaactgaatccagcagcacatcaaaaagcttatccaccacgatcaaactggcttcatccctgggatgcaaggctggttcaacgtatgcaaatcaataaacataatccatcacataaacagagccaatgacaaaaaccacatgcttatctcaatagatacagaaaaggcctttgacaaaattcaacaccccttcatgcttgaaactctcaataaactaggtattgatggaacgtacctcaaaataataagagctatttatcacaaacccacagccaatatcatactgaatgggcaaaagctggaagcattccctttgaaaactggtacaagacaagaatgccctctctcaccactcctattcaacatagtattggaagttctggccagggcaatcaggcaagagaaagaaataaagggtattcaataaagggtattcaaataggaagagaggaagtccatgtggagaaattggaacacttttacactgttggtgggagtataaattagttcaatgattgtggaagatggtgtggcgattcttcaagtatctagaaccagaaataccatttgacccagcaatcccattactgggcatatacccaaaggattatacatcatgctactataaagacacatgcgcatgtatgtttattgcagccctgttcacaatagcaaagacttggaaccaacccaaatgcccatcagtggtagactgggtaaagaaagtgtggcacgtatacaccatggaatactacgcagccataaaagaggatgatttcatgtcctttgcggggacatgcatgaagctggaaaccatcattcttggcaaactaacacaggaacagaaaaccaaacaccacatattctcactcataagtgggagttgaacaatgagaacacatggacacagggaggggaacatcacacgctggggcctgttggcgggtggggggcaaggggagggatagcattaggagaaataactaaggtagatgacaggttgttgggtgcagcaaagcaccatggcacgtgtatacttatgtgacaaacctgcatgttctgcacatctatcccagaacttaaaatataataaaaaaatgctttcttgaacagcatactaacagcagtgaacagaggcatgagtgtggatgattttcaaaaagagtttaacatgacggatgccgtatatgctgttgccaatgcttggaacatagtatctaaagacacagttgtgcatgtctggcacaacctctggcctgggactatgtttagtgatgatgatcaaagtagtgactttgaaggatcttgtatgtcaaatgagaaaaaaatgatctctgacctctcctccttacatttgcaaaaaaatataccttcagagtctgtctggaaggtgggtgaagtggatatttaagaagtttttaacgtccataatgaggctccagttactccagttgactgatagtgaaatagccaaaatggttctgaatcaaggtggtcataatagtgatgatgaagatgacattaacactgcagaaaaaagtcctatacatgacatggtgaaaatgtgtgatgatcttactgaaggactagagcagtgttcatttataacagaataacaaatcatgtcagtttatacaatcagagagaaaattctaaagcaaaaactgttgttaataagacagatgaggctgggtgcagtggctcacgcctgtaatcccagcactttgggaggctgaggcaggcggatcactagaccaggagatcgagaccatcctggctaacacggtgaaaacctgtctctactaaacaaaatacaaaaaattagctgggcctggtggtgggcgcctgtagtcccagctactcaggaggctgaggcaggagaatggcatgaacccgggaggcggagcttgcagtgagctgagatggtgccactgcactgcagcctgggcgacagagtctcctggtctctcatctgcttctgatgcttcttattacctaaaaacaaacacagaaacaaaaaacaggatacagtagccttttaatcaaaacacaatatcataggtatagactgaaagcctgtcttcatttgttcttgctcttgtttaacagctgatacaagtattctggtgatactactgtgctgctaggttacccagaacatattattttttaacggtatcagtagtaggtaatattttttactgttaaatacttatgtgtaagtaagtgtaagaaaataattgcttatcagtagcatacaagttcaaagttaggaatggtggtgatacctaacaaccgcagatcgtccacatgggtgcccaagatagtgacacctttgctttctgatggttcagtgtatacaaactttgcacaaaattatttaaaatattttataaagtttatcttcaggctgtgtataaggtttatgtgaaacaaatgaatttcatgtttcgacttgggtcacatccccgaggtacctcgttatgcctatggagatattcccaaatctggaaaagattcaaaatatgaaacacttatgatcccaaagattttggataagtgatactcaaactttatatcattttacacctgatttttttctttaatatctatgagtatgacacaaaacacaggtaatgtttttaacatttatgcattatctttccccttcacttacatgactttttaaaaaatgttctttgaacttcatatttctctaaggctcgtgttaaaaactctgagtatttcatatttattcaaaattaccaatgtagcctgaactacagttcttccaaacatggattaatgtctttgtttcagtgatattcacagtagcccatttttttgtgtgtatttaaatgtttcataaatttaggctgggtgcattggctcatgcctgtaatcccaacactttgggaggccaaagagggagggttgtttgaagctaggagttcaacatcagcctgggcaacgtagcatgacctcatctctacaaaaaatgcaaaaattagccaggcgtggtggtgtacacctgtaatcgtagctactcgggaagcctgagtcaggaggattgcttgagcccaggatttggaggctgcattgagctatgattgtgccactgcactctagcatgggcattaaaagaagactgtctcaaaaacaaaaacaaagtttaataaagttattgttacagagcccatggattatttatgctatttttttttgtttttttttttattttttagctggatctggagattcttatatggattgttaatatccaaacttacttgcaaaatacgatgtgattgaatgaatatctttacataaatctgcattgatcaagtgattggtttttcacaataaaatttattatctcacaaaaccagaagtccagaagggaggctcaagttaggcattagctcatttgagccatcaaggaatttcttttcacctttctctttgcttttcttggtaattcttgggtaactcttggggcttttttcttgggtaattctcatcctgggcaagttgagtacatttcaggttctacatctagctgtgacaatgtcagagaaaaaagagagaatccccttctgtgggtctgtcttaggaaagaaaaaatctttcctagaagtcttccatgagattctccttatattatgctggccacaactgtgtcatatgtcctacctaaactagttctttgcaaaagtaatggggccaccatgactggcttagatcaattaggaattgcctgtatggctggcttagggccagccctctgaaagtacatgccaatgccttgtggattcttcaggaaagacaacagattctattagaaaagaggagggcagaggagaaaggaaattaggacaggcaaccaagagtgtatgctgcattcgattatttaataaatggttttagaataattgacttttcatttggttctgtgcatgtccatgttacttggttgatggacttgatcagattcttcttgttttctttttttttttttttttggtctacttgttatgtcagttactgaaagggaagtgtaaaagtctgtagctatatttgtggctttgtacatttctccctttaattctgtcagtttttatacacacacacttaggattattgtgtcttcttgatggattaacccccttttcattatgaaccattcctttttatctctggtaacccttgatgttatcaccagtgtttccatgtctgtcttttctgatgttaatatagccactccaactttcttatgattactgtttgcttgatgtatcttttttttttttttgagatggagtcttgctctatcgcccaggctggagtacagtggcgtgattttggctcactgcaacctccacctcctaggttccagcgattctcctgcctcagcctcctgagtagctcagattatgggcgtgcaccaccacgcctgactaatttttgtatttttagtagagtcagcgtctcaccatgttggccaggctggtctcaaacttctgacctctggtgatccatccacctcggcctcccaaagtgctgggattaaaggcacaagccaccgtgcccggcctacttgatgtatctttttttcattattgtattcttaacccatctgtgcctttgtatttaaaatatatctcttatgaacattgtatagttaggtcttttctctcagtctgataatctctgacctttaattggaaggtgtagtccatttacatttaatattaattatcggtaggattgagtttaagtctgtcatcttgacaattgtttttatttgtctcatatgttccttgttccttttggtctcttttccagtcttcttttatttatttatttttattgattttttttttaaggattccattttatttcctcgactcggtagctacacttaaaaaaaaatagttgctctagagtagggttctcaacctccacattgttgacattcttgaccagataattttttgttcttgaagttgacctgtgcattataaacctgactatccactaggtgccagtagcatatgccccccgacccctgttatgaaaataaaaaatgtctccagtgattgtcagatatcctgtgggatgacgagaggcggaaaaattactattggttgagaatctagctttagagcttacagtatgcattttcaatttataacagtctaccttgaaataatatactatttcatgtattgtgttagaatcttaaaagagtacttctatttcctctctcccttccttgtgctatggttgtcatacactttaattctatatgtatttataaacttcacattgccttgttaatctttttgcttcaaactggtgattttcttttaaagaaattacaaaagaggggaaaacatgtcttttaggtgtaccaggttcatcttatacttttcctattccagccttggaatcagtcattttttcaagaagtcttggtttcttatagtagaaagtaataattagaagctaagatctgggttctggatatgttcattgctagggtgtgtgtgtgtgtgtgtgtgtgtgtgtaaacacatgtacatctgtattttcatatattaaaagctgagttcatagtgatacatccaatttcaatcaaacattgcatgttaacttgtttcctctctctctgatagtgaaaaacctaacttctattatctcgaatatacttatatatcagtttcctgatatgtaaccaaataatagttgctcctcccctatgctgttgttgcctcctcccctgtgcaggtgctgtcctcattcctttcaggctctgacatctgcatactcttacctcagctcagctgatttcttcttcttttttcttttttttttttttttttaagagataggggtcttactctggcacctaagctggagtatagtggcatgatcatggctcactgtagtctctaactcctatgctcaagggatcctcctacctcagcctcctgagtagctgggactacaggtgtgtgctgccatgcccggctttttttgttttttgtttgtagagacagggtcttgctatgttgaccagggtgctcttgaactcctgacctcaagtggtcctcctgcctagcctcccaaagtgctgagattataggcatgagccactgtgtccagccccgcctgagttctgacaccttccctcagctacccctttgcatggatgcctatctcaacctggtcagctctgacagccatgccagggccaggtggccctcctaggcagaagccctcacccagtttggactctgtactcaccctagccaccgtttcctacggataccctgctgaagctttgagatcctgcgctaggtagctcacaccgtggaagcccactttatcccacttaggttctaactttacatgctgggttatcccgtgaactcttctcagtgtagatgctctcctcctcctactctggctcccatggtaagccagtctccagagtgaactctgtcacctcatgctagactactcttctgcttagctgcctagctgtccatcctgctttataccaccagatggcttttgtatggaattgtttgggtagctaagggggatggaagaggaagaagaccttgtagttgttaacacgaaacatttattagtttgtaatgatagactcgtgtgatcatttgattgtcttctctgacctttctcagggtagggactgttccatggataccaaatagtttccccaggatctagcataaagtatgtactcaagtttttattgaataaataaatattcagaaagattaagtactttaatcaggtcatacagctattatgtttttatgtgttgaagacatggatttaaatacacttctggctgggcgcagtggctcatgcctataatcccagcactttgggaggccaagaccagtggatcacttgaggtcaggagtttgagagcagcctggccaacatggtgaaacctctactcgactaaaaatacaaaaattagccatgcatggtggtgcgtgcctctaatcccagctgatcgggagtctgaggcaggagaatcgcttgaaccgggaggcagaggttgcagtgagttgagatcacgccactgcactccagcctgggccacagagcgagactccatctcataaataaataaataaatacaattctctgattacaaaaataaatacaagcatcctgaatgctttcacatcagatacttttcctgtacaaaagtatgtggaaatcacagtgatggcagcggtggcccatctggtagctgctgcagagatgctgcagtgggggaggcatcgccagggctgcccattccacagagcccgcagggagccaggaacagataggaaccctactctcttctgagttggcagggcaggagccccgccctcctgggtgcagctccagtgggtgcagtggactccaggtgaagtcctcagacttagaacctaagtgtgggataaagtgggcttccatgagtgtgagctacctagcacacactcaggtggagtgagaagttaacagggctttttctggcccgcctgtggccacccatgaaccaatcagcatgcacttcctccctgctgagcccatgaaaaccctggacttagccagactccaacagactggggaaaacctgcctgtggaaaggagctacccgctgtgggtctcctccccacgcagacctgggcatccgtgtgctctcaggggccagggaagcccccccttcccttgcagtctccgaagtgcctgctcctgctgcctggcctctccccgctcctgctgtctgctccggtttcagagcaaagttgaggcctagcctgggtgctgttgccacccagctgggtgcacaccacttggggtggcactgacgtgccagccccctgccgcctgaaccgcccccacccccagactttgggtgccaatgagcacgggaaggaggccaaagggggtcgagggtgggttgataagggcctgcaggcgccccttccccaaacagcctgggctctgtgattgatggcagcaggaggcagacaggctcgtgagtgcaaaggggtgggtcccggtgaggtcccaccctcaaaccagggatggcctgaagcatggggtctgggctgtcagttccaggtggagtcgagactggagtgagaagttacagggctttttccggtccattggccgcccatggaccaattagcatgcactttctcccttctgaacccatgaaaacccctgacacagccagactccaacagacgtggggaagatctgcctgtggaaaggagctacccactgtgggtcttctctcagctgaaagctgaacactcgttcaggagaccttcttgtagaaaggagctactcgcttcggatctcttgagagctgttctgttgctcagtgaagctcctctccgccttgcttaccatccagttgtccgagtacttcattcttcctggatgcgagacaagaactggagacccgccaaatgccgggactgaaagagctgtaacacaaacagggctgaaacatgttcccctgctccccatgttaccagtgacaggagagaagagctgcagcccttgggggagcccagacctaggggctccccaagcctgggctctgacaccctcttagggactctgtggttctggtgtctccaagctttcgggcgccactgtgttctcgttcagatgcggatgcccgcagcagaagctgtgtgcggtacatctggtccagccgcagcctcgcatggagcttggcatctctgccagtgcctggagctgcccgccccactgcagcagctggcatctgtgcctggctcactgttgacaggtgtgggatccgggccggtagcacgagccaagcaccgcctgcagggacaagtggacagaatgagcccagtgggcaagcaatactcaggtagaaggtgccgccggccacagacgtttctggctggtgaagtgacaccccagagatcccgtgacaatagtttagttagggagttacccatgtacatgattatcttcatttaatataagaccatacattatgagtgccatataaagtttaatgctttaggtagtataaaaatatctttcacttggataactttatactcattgagtcataaaatgttggcactgaaagaggctccagagatagtctagttcagcacaaccaagcaatacagaacatacatgttactagtattcaggaaggagtggggaactatgtaagtaatggaagtaagccttccaggtgattctgactaccttgcctgcctgcctgccttcctctcctttcctttcccttccttccttccttccttccttccttccttccttccttccttccttccttccttccttccttccttcctttccttccttcctttccttcctttccttttcttctgtcgcccaggctggagtgcagtaatgccatctcggttcactgcaacctctgcttcccaggttcaagagattctcctgcctcaccttcccgagtagctgggattacaggtgcctgccaccgtgcccggctaatttttgtatttttagtagagatggggtttcactatgttggccaggctggtcttaaactcctgacttcaggtgatacgcctgcctcagcctcccaaagtgttgggattacaggcgtgagccactgtgcccggccttcttgtctcaaagtgtccctcagtctgtgattgatcttgatctgcacaacagctcttagagacacagggcaaggaaaaattcaacaagtgaggatgctgaggtctagagagtcatagcgacttctcaagttttatcctccatctttatcattctctagagacattttacataagaacgtgatattatttaaaaccttttctgtaatacagtgtatttgtcatggtgaggatgtggtagagaaaggtgtgaaaaaacatcctaagtacttgagaattaggctattagtttctttttattgtatcagcagtgcttaaaaagttaatatgatgagttatattccaggttctctcagttaggaatattaacttattgatagataatagtccttttagatagttgatgaattcagaaaaattacagatgaaaaacctgcgagagggaagaatatctgaaactcatacatctttagtgaaagttactagtactccttacctatgtgtgcttgctaatattagaatcccactgaaaagaacctcatataatcagaatctttttgctgtggatatgttgagtatgcccatttacaacttttcatatgattatttaatgattcagagttcttaggaaatgactttttctgtttttattaaaattttttttcctcttcaccattctcagagaaaagggaattatcttgttcaaaagatgaatgtgagttatttcaaggatactatgtttaaactggctgattagaacctgaaaaataatatttgaaaaatatataacatataaataagattcaaaaattaataaaatcgctttgttcttatattattcacattgagaacctacattttctaatagaaaatctgttaagagacaggtctgggaacatcctgtctgataatttgtttctttcattctcactcttcaccaagggaaaatcagttcatttttaaaatctgagaacaatggttacctcccttgaagagtttgaagactagatatcagatatgtaaggtgccacacattttatctgacacttactaggtgctcaataaattgtactttttgttgatttccctattctttaaactattatctactataataaccagaagtaactttaattttgctttcctatcaaattctcttttcccttactccttttctacaggtgtatctacatcagcaatcaaaatggcatcaaccagacttccttcccccaaaagcttagtgagtgccccaactcagattcttgcacagttccctaaacaacatcaacagtctcctaagcagcagttatatcaagtgcaacagcagacacagcaacaagtggcccagccttctccagtatctcatcagcaacagcctcagcagtctcctttgccacctggtattaaacctaccatccaaatcaaacaggagtcaggtaactggaaaatgtttataagatatggtaattcttctttattcaccagtttttttagtcttccagtccatgaacacggtatgtctcttcatttatttaggtctttgactttttcatcaatgttttacagctttcagcatatagattctgtatatgttttgttagatttgtacctaagcatttcattttcttgtcgtgattataattggtattatgattttaatttcaatgtctacatgttttttgttagtatataaaaatagtattgatcttgtatcctttgaccttgctgaactcacttgttctcagagtatttacatagattccttgggattttctgtgtatgcaactatgtcatctataaatagggacagttttgtttcttcctttccaatcaattgctgtttatttctttttggtgttttattttattgtctagaacttccaatactatgctgaatgaataagagtgaggaaagtggacatccttgctttgttcctaatcttaaggagaaaacattcagtttttcaccattaagtacaataccagctgtaggctttttatagatgctctttatcaggtagacggagtgcacttctgctactagtttttggggagtttttatcatgaatgagtgttggattttgtcaagtgctttttctgttcaattaagttttttcttgtttagtctattgatatgctggattatattgattgattttctgttaaaccagccttgcatatttgaaataaatcccacttggtcatgatatataatttttaaaaatacattgctggattcaatttgtctctctattcatgagacattttggtctgtaatattcttattttatactgcctttgtccaattttggtcaggataataccggcctcataaggtgagtttggaagtatttatttcctttctattttttggaaaagactatgtaagattgatgttaattctttaaatgttcagtagaattctccaatgaagccatctgggcccggagagttctgtttttagaagcttttaattgatgaattccatttctttattagttatgggacttttcagattatctgtttcatcttggttttggtagtttatggttttgaggaattgatccatttcttctaagttgtcaaatttttgagtgtaaatttgcttgtagtagttctttactattcttttaatggctataggatcgatattaatgtcctgtttcatttctgatattggtggtttgtatctttctttgtcagacttgctatttattgcatttaaaaatttattgaattttttaagaactagatttttgtttcattgatttttcctttgcttttctgtttttaattttattatctttattatttctgtcctactttctttaggtttattttgctcttctaatttcttaaggtgggaacttagattattgattcaagacatactctcttttctaattacttagcatttagttccatctatgtaaagacatttgtcacaaatttctctcggcactgtgttagctgccttccacatattttaatatgttctgttttcatttttattcaattttttgtgtaagacttcttctttgacccatggattatttagaattgtgttgcttaatttctaatggagatttttctgggtttgtttgtttgttttgctattgatttctagtttgatttcattatggtctgagaacacactgtatcatttcaattcttttacgtttattgaggtttgtttcttcacccacaatatgttcaactttggtgggtggtccatggtgctcgtaaaatatctatgctgccgatgttgggtggagtattctatatatgtatatcaactagattctgttggttgattatgttgttcagttctcctatatctatgctgaattttctgcatagtagttctattagttgatgggagtgaagtaataaagtccccaactaattgttggattctagtactgcaaaaacagctatctcagtttttgctacatgtattatattttgatatatctattgtttgatgcatacatatttagaaacattgtgtcttcctggtatattgatcctgtctcattatgtagcgttcctttttttctgcaattaattctctattttttttaaatataaaggctgattttaaaaaatttccattcttaaaatttaattccaatttaacttgtaaagtctgccatataaattaatgatggtaactagcctgcattagtatatttagtgcatgtaatagagaactatactgactggaggggagtgagttctattgccttgtaaagtatactttatctgtaattaatatagccactcctattttctttttattcatgttcacatagtgtatttttttctcatcctgttactttcaacctacttttattgttgtatttgaagtgagtttcttgtagacagcatacagtgtagttatatatttttatatcaactttgccaataacttgtttttgtttttgagacggagtctcgctttgtcacccaggctggagtgcagtggcacaatctcagctcactgcaacctccgcctcctgggtttaagcgagtctcctgcctcagtctcccaggtagctgggattacaggtgcacactaccacgcccaggtaacttttgtatttttagtagagacagggttttaccatgctggccaggctggtctcgaatgctgatctcaagtgatccgcccacctcagccttccaaagtgctaggattacaggtgtgagccactgcatctggccaaccaatcttataacttttttttttttttttttttttttttttttgagatggagtcttgctgtgtcgcccaggctggagtgcaggggcgctatctcggctcactgcaagctccaccttctgggttcacaccattctcctgcctcagcctcccaagtagatgggactacaggcgcctgccaccacacccggctaattttttgtatttttagtagagacggggtttcaccgtgttatccaggatggtctcaatctcctgacctcgtgatccgccctcctccacctcccaaagtgctggtattgcaggcatgagccactgcgcccggccccaatctttaacttttaaatgatatatttagatcatttacatttaaggtaattgttgatatggtagtggttacatgtgccgttttattttgtttgtttcttttgtttcttgtttcttttttcttgcctatttgtagtttacttgaagaatttttagggtttcatgttgacttattattttaaagtatattgttttgttctgttttcttagcgtttgcttatggtattacagtatacatgtgttggccatgtgaggccaggagtttgagaccagcctgggcaatataacaagacctctgcccttttgtagagaccattttttggtctctacaaaaaatttaaaaattagctagaaatggtggcatgtgcctgtactcctaggtacttgggagggagcaggaggattgcttgagcccagaagtttgaggttgcagtgagctatgattaaaccactgcactccagcgtgggctacagagtgagagcctatctcaaaaaaaaaaaaaaaccaaacccaaaacaataaaaaaaatacttatgtcgcctatcacatttgaccttttcactgcaaattactctatatttgaaataattttatctttctagtaaaaaagggagatttcaccatatctaatgttacttaatataatacttaatgttacttaatgttaatataatacttaatgttactggctcagagactttgccaaaggatagaaataattcataaaacagatagctcctaatctcttcccaaaggaactaactccatttataccagagcatggagaagttcaagactaagggcattctcaagaacagtgaaggaagtggtgaaaggcaaccagaaggagattcatggatgtaatgaacatatagtctagactgcagacagtttatagagaagaagcagataatataaaagctgggaagagccttcatgaggttagaagaaatatcaaaaatgaaccccagaaactgttccttcaaaggagccaaaattcggattacagagtaatgtatgctccaaagctttcctgaaaacaacagagtaatcaaccagcagttaatagagtttaacagctgggtgtcgtcaaggaaagaatagaaaaaagccaaactaataccactgtcatcccaaagtgactgtaagtatacccagagcagtgtctccatgaggaataatatcagatgcttagatgaaggagcatgggctggagagggaataaaaagacttcactaaaataactgatcccatcactaaacaaataactatgcaaataacaataacaaatccctggtgaggggaaaccagtacccaggtactgcatggtcatccctcagtatccgtggaagattgcttccaggaccctgttgatactcaaatctgtggatgttccagtcctttataaaaaatggtgtagtatttatgaaacctatgcacaccctcctgtatactttaaatcatctctagattacctataatacctaatacaatgtaaatgctatgtagctgttatactatattgtttctgtacttgtattattttttactgttgtattattatttttgttgtctttttcctaaatatttttgatccatggttgcttgaatctgaagatgtagaagttacagagggctgtatgtatattatctaaaatgtctaatttctaacaaagacataaggaggcaggtaaagaaacaggaaaatattacccatacattagaaaaacaaacaaacaacagaaactataagagcaaccagatgtcagacttaactgaaaagtactttgaagtagccattacaaatatgttcacagaactaaagaaaaacatgattatagaagtaaaagaggctatgaggacaatattacatcaaataaagatcaataaagagatagaaattagtttttaaagagagccaaacagaaaatctggaggttaaaagtaaagtcactgaactaaaaaatgcacgagaggggttcacgtgtagatctgaactggcagaagaaagaatttgcaaatctgaaaaacgatcaatagaggttatgtgagctgaagaacaaagagaagaaacaatgaagaaaagttaacagagcttcagagaaatgtgagacattaaatacaccaacatacatataatggaagtacgagagttgggaagagagaaaagaaaagaaatattcaaagaaataatggctgaaaacttttccaaatttattgaaaagcagtaacatatgtttaagaagcttaacaaattacaaataagataaacaaagatcataaacagacacatctcagtaaaattgctgaaattcaaagacaaaaagaaaatcttgaacacagcaagagaaaaacaacatatcacttacaaggaaattgcaataaagttacgtaagagctgacttcccagtggaaacaatgaagccagcaggcagttggataacacatttgaaatgaaaaaaaaaaaaaaaaaacccaccaactaagaatcctatatccagcaaagctagctttcaaaaatgaagaaagactttaccaaataaacaaaatctgcaagagtgtgttgctagcagacccaccttacaagagacactaaaagaagttctatgaatagaaagaataaggaaaaagacagtgatgtctgctgttgacacttatattccatattataccagaggctcaagtaagagaaaatgggcaaaaaaaaaaaaaaaaaaaaaaaagcatccagattgaaacagaagaaactctaccccgtttacagatgacatgatcctttatattatttttttttaaaaaaagcatccagattgaaacagaagaaactctaccccatttgcagatgacatgatcctttatattattaaaaaaaaaaaagcatccagattgaaacagaagaaactctacccctatttgcagatgacatgatcctttatattattaaaaaaaaacaaaaaacaaaaaaaaccactaaggaatctactaaaagatattagaactaataaatgagacgtgtttggaaaggttgcgggatacaaagtcaacacacaaaaatctataaattagcaatatacaatctaaaaagtgaaactaacaattccatttataatagcaccaaaagaacaaaataggaataaatttaacaaaagaaatacaaaatgtatactctgaaaactacaaaacattgaaagaaattaaagatctaaataaataggaaagcataccatgctcacagatcagaagatttaacattgttaagatgacagtgctccttaaattaatctatagattcaatgcaacctatatcagaatctcagcagacttcttcgtagaaattgacaagctaactccaaaattcatatggaatttgatagccatatggttagccaaaacaatctttaaaaaaaagaagtaaaaatcacaggcaggagccccagcatggtggctcctcccggtaattccagcactttgtggggctgaggcaggtggaccacctgaggtcaggatttcgacatcagactggccaacatggtgaaaccctgtctctactaaaaatacaaaaattaactggccatgatggtacatggctgtaatcccagctactcgggaggctgaggcaggagaatcacttgtacctgagaggcggaggttgcagtgagctgagattgcaccactgcactctagcctgggtgacagagcaaggcgtggtctcaaaaaaaaaaaaaaaaaaaaaaagaagaagaaggagaggactcaaatgcttcctgatttcaaaatttactacaaaccaatggtaatcaaaacagtatggtaccggcataagacatatagatcaatggaacagaattgaaagtccagaaataaaaccgtacaactatggtcaactgctttttgagaaagatgccaagatcattcaatgggggaaaaatagtctttttaacaaattctgttgggacaaatgaatagatatgtgcaaaggaatgaagtgagacccttacatcacaccgtatacaaaattaactcaaatgaatcaaacatttacacttagaggtaaaactatcaaactcttagaaaaaaacttagggtaaatctctaacatactggatttggcaaaggattcttggatataacaatgaaagcatgagcaacaaaaagaaaatagaaaagttagatatcaaaaactgctgtattcaatttaatttatttatttatttgagacggagtcttgctctgtcacccaggctagcgtgtagtggcacggtcttggctcactgcaacttacgcctcctgggttcaagcaattctcctgcttcagcctcccgagtagctgggattacaggcgcgcaccatcacgcccggctaatttttttttttttttgtagagatgggttttcaccatgttggccaagctggtctcaaactcctgacttcaagtgatccacctaccttggcctcccaaagtgctgggattacaggcgggagccactgtgcccagctaactgctgtgttttaaaagataccatcaagaaagtaaaaagacaattcagagaatgggaaataatacttgcaaattacatatccgaagcaactgtaccattttacattcccaccagcaaatataaactgtaccattttacattcccaccaccagaaataaaaccatacatgtacatgtaaaatggtacagatatatgagtttttatatatatataatatatatatataaactcttataactcaatggtaaatagacatataacccaattttaaaatgggtaaaagatccgaatagccatttcttcagggaaaatatataaaagatacaaaaagcacatgaaaacatgctaaacatcattagttatcaggtaagtacacatcagaatcacagtgaaatatactttacacaaagcagactgcctagaatcaatgtaacagaataacaagtgttgacatggatgtagagaaacaggaatcctcatacactgctggtgggaatgtaaaatggtactgttgctttggaaaacacgtcagtttatcaaacaattaaattaaacaaagaattaacatatgatcctgagattccactcctaggtatatatacaagagaactgaataccaaaaaacttgcatacaaatattttcagcagcattattcgtaatagccaataggtgaaacaatccaaattcatatcaatggacaaacagataaacaaaatgtgaattttaattagccataaaaggaatgaagtactaacacatgctacaagatggatgaacctcaaaaagattacattaagttcaagaagccagttacagaagaccacgtattatatgatttatttcatatcaaagtccaaagtacagaaatctacagacagaaaataactagtggttacttggggctgggggtaggaaactgaatgaatgggtgcaaggagtagtagatcatattatggggtttccttttgaagtgaagtgttctaaaatcaattgttatgatggctgaacatatctgtgaatatattaaataacattacattgtacattttaaatgtgttcattgaatgcttagtcaattatattttgataaagctctttaagaaaagaaaattcggccgggagcggtggctcacgcctgtaatcccagcactttgggaggccaaggcgggcggtcttggctcactgcaacttacgcctcctgggttcaagcaattctcctgcttcagcctcccaagtagctgggattacaggcgcgcaccatcacgcccggctaattttttttttttttttttttgtagagatgggttttcaccatgttggccaagctggtctcaaactcctgacttcaagtgatccacctaccttgttgtaaaactataaaaatatacaatagcgtgataaataccatattccagatagtggctctggggatgtggagagaagaatagtggtattacttcatagaaaataatctaaaagaaatatggcggctgggcacagtggctcacgcctgtaatcccagcaccttgggaggctgaggcgggtggatcatgaggtcaagagatcgagaccatcctggctaacacggtgaaaccccatctctactaaaaatacaaaaaattagctgggcgtggtggcaggcgcctgtagtcccagctacttgggaggctgaggcaggagaatcgcgtgaacccggggggtggagcttgcagtgaaccaagatcacgcccctgcactccagcctgggcaacagagcgagactctgtctcaaaaaaaaaagaaaaaaaaatttcaggccgagcacagtggctcacacctataatcctgacactttggtaggccaaggcgagagaatcacttgaggccaggtgttcgacaccagtctgggcaacatggcaagaccccaactctacaaaaaaaatttttttaattagccaggtatggtggcatatgcttgtagtctcagctgaggctaaggcggcagaattgcctggtgtacttaagcctgggcaatagagcgagaccttgtctctaaataaataaataaaatttaaatataaaaaatattccagggcattaaaaaaaaactttcaaaattctttcttggaaatacacataatgctcaaagaaaaacctggcaaaccctgcacacaaaaaagaaaattacagactgaaatcacatttggttatcaatatattgtattgtctaacatcataccagtttaaattccaaaagacttaaatacaaaaattataaactgtgatggaaaatctggaagcattaaagaccacactgataaattcaactacatataaacaaatagtgttttgcacagaaaaccccatgaagtcaaaagacaaataaactggaaaaaaatctgcaaatcatgaaatgcacagaataccaattattctgacagtgtaagaattcccagaaattgatccaacaggaaagtggaaaatggatacagatagcacacaaaaagtgaattacaaagggcactaaaacatataaatagtttctcaaactcactcttaataagggaaatgaaaaatgaaaaaaatactgagataacatccacccgcccctatcacattggcaaaaatccaactgcttgaaaatatactggtgggaagggggcactgtgaggaagctgggactcgtacattactggtaggaaaataaatcgaaaatcccgataagatgaaaacttggcagtatctgtcaaaactgacatagcagtcatacttctggaaatttatcctacagatacacatacaaaatgacactatataggcttattcactgcattttgtttgaattttaaaaaaagaaagactggaaacaaccttacaggggattcattacataaattacgattctggcgtactttatagagtttacaggttcagttccagaccactgaaataaagtgaatatcacaacagaggaagtcacaccaaagttttggtttcccagtgcatataaaagttatgtttatattatactgctgtctattatgtgtgtaattgtattatgtctaaaaaatgtacataccttaatttaaaatacttcattgctaaaaaatgctaatgaccatctgagccttcagagaggtgtaatctttttgctggtggagggtcttgtctcaatgttgatggctgttgactggtcaggttggtggatactgaaggttggggtggttacagcattttcttaaagtaagacaacagtgaagttggctgcatggattgatttttccttctgtaaaagatttctttgtagcatggaatgctgttttacaacattttacccacagtagaacttctttgaaaatggaagtcaatcttttaaacgtgccattgctttatcaactaagtttatataatactccaaattgcttgttgttatttcaacaacatccacaggacagggcactattatttcattagaagattccatctcaagaaaccacattcgttgttcatccatgagaagcaactcctcatctagtcaagttttatcacaagatagttatttctctcactgaagacctaaaccactcaaagtcatccatagaggttggaatccacctcttccaagctcctattaatgttgatattttgacctcctcccatgattcaaaaatgttctgaatgcatctagaacagtgaatcctttccagaagattgactttgcccaaatccattagagaaatcattatggcagctgtagccttacaaaatgcattttttttctttttctttttctttttctttttttttttttcttttttttgagacatagtctgtcagccaggctggaatgcagtgacacaatcatagttcactgcagcctcaacctcctggctcaagcagtcctcccacctcagcctcccaagtagctgagactacaggcatgagccatagcatgcctggctaatttttttaaaaaaatttttgtagagacagggtctcaccatgttgcccagactggtctcaaactcctgggctcaaacaatccacctgccacagcctcccaaagtgctgggactgcaggcatgagccaccacacccagcctaaaatttatttcttaataagacctgaaagttgaaattattccttgtttcatggcctgcacaacggatgttatgttagcaggcatgaaaacaatattaatcttgtatatctccatcagagctcttgggtgactaggtgcattgtcagtgggtagtaatattttgaaaggaatcttttttttttttttatgagcagtaggtctcaatagtgggcttaaaaccttcagtaaaccatgctgtgaacagatgtggtgtcatccaggctttgttgtttcatttatagagcacaggcagagtagatttagcatcctttttaaggaccctagcattttgcgaatggtaaatgaacatcagcttcaacttaaactcagcaactgcattagtccctaacaagagagtcagtctgttctttgaagctttgaagccaggcattgacttctttatctatgaaagtcctagatggcatcttcttccaataaaagtctattttgtctacattgaaaatctggtgtttagtgtagccaccttcatcaatgatcttaggtagatctactggataacttgctacagcttctccgtcagcacttgctgttttgttttgcactttgacattctgtagatggtttctttccttaaaccgcatgaaccaacctctgctagcttccaacttttcttctgcagattcctcactctcctggccttcatagaaatgaagtttattaactggcctaatttcactatcattgtgtctttggaaacaagcaggcccaaggagagggagagagatgggagaatgtccagttcgtgaagcagtcagagcacacacaacatttattgattaagtacatcatcttacacgagcatggtttgtggtggcccaaaacaattataatagtaacatcaaagatcactgatcaccgattaaagtaacagatataataataaaaaaaaactttgaattattgtgagaatcatcaaaatgtgacacagacataatgtgagcgcacactgttggaaaaatggtgcctatagacttactcgacgtggggttgccagaaccttcaatttgtaaaaaacactttgggaggccaaggagtgcagatcaccggaggtcaggagttcgagaccagcctggccaacatgatgaaaccctgtctctactaaaaatacaaaaataaaccaggtgtgttggtgggtgcctataatcccgctactcgggaggctgaggcagggagaattgcttgaacccaggaagtggaggttgcagtgaaccaagattgcaccactgcactccagcctgggtaacagagcgagactccgtctcaaaaaaacaaaaaacaaaaacaaacagacaaacaaaaaaacacactagtactgagaagcacaataaagcaaagtgtaataaaacaaggtatacctgtatcactgtagaatgaagaagcaatttaattttatgtactgactatattaaaaagatctctaagatacattgttaaaggtgggggggaaagcaaggtgcatgtgttatgttttacaagtgtgtaaagaggggaggtataagaatccatatttaaattttcttgtatttgtggagactctgacaatatataagaaactaagcttttgttaatggcaagggagaactagacagaggacaaggaaagaggacaagttattcactctaactttttatactggtcagtttttaatgaatgctttctctattcaaaaaaataaaatatagaccaggtgcagtggctcatgcctataatctcagtgctttgggattctgagatgggagaattgctttagctcaggagttcaaggttacagtcatcatgccaccgcacttcagcctgggtgacagaacaagacgctgtctctaataaaaaaattaataaactggctgtgtttggtggctcatgcctgtaatcccagatctttgggaggccaaggcagggggactgcttgaagccagagttcaagatcaccctggactataaagcaagaccctatctctacaaaaatagtaaaattagctgagtgtggtggcatatgcttgtattcccagctactctgaaggttggggcaagaggattgcttgagcctagaagatcaaggcagtgagccatgatcacaccattgcactctaccttgggtgacacagcaagaccttgcctaaaattaattaatatagtataatgtaataattgattcacaaataaaaatgccattgatacagaccttagaaactggaaccttgcagaaataggaagtatctagggtggggtaagtgacagacttctctgacagacccctgctttacgcactgagtgctcacagagtcggggtaaggggttggggagcagccaaaggtcctcacagtttgcctcgcttggtggtggagtcactgcctcacaagccagggcaagggctatcagtacttcagtatactcagtggtactgtgcccaaggtagagctttgtccacaaactgggggctgggcagaataagagagctctcacatccatactgctcttgcccagaacttagccttagtagtaggtagctgagtgcaggatgatataatctgaagtctggtttctcctgagaagaaaacctttcaactgggagctggcagagaaggaatcccgagttcttcttcactgcagccatctggaatggaatgtaccccttgctgagctagtagtggggaaggaggaaatgctcttggtttaaataccacagattttgcctttctcaatgaattttttgagattttattgagtagatgttttttcatttattatttgcccttggcacgatttctggaccctttcaatggtggttttataatttttaccagcttcactgggttagggggccagcagagcccatgccgccgtgccagatatcaatatttggaatggctttaagtacattggaattactttcttttaagagactgtagaattctccaatgcaactatctgagcctgctactttttggcaaaggggtacagctcctgaaatttttatctgtggaaatttgtctatttacattttttctcttttctggggtcaatattgataagtaataacttcctagaaaattacctatttgatccagattttaaacttatttgcatataattgagcaaagtcattttaagattatcttaattttttctctgtgtgcttatttctttagaagctcctttttatatgtgctttaagaattacttaattgtggttgggtctggtggctcacacctgtaatccctttgggaggccaaggctggtgggtcccttgaggtcaggagttcaaaaccagcctggccaacatggtgaaaccctgtctctgctaaaaatacaaaaaaattagccgggcatgatgacaggcccctgtaatcccacctactcgggaggctgaggcaggagaatcacttaaacccaggaggtggaggttgcagtgagctgagattgcaccactgtactccagcctggagacagagtgagactccatctcaaaataataataataataaaataataataactgtaattcactaatgaaataaatactagaaattattccccccacaaacctcagtgcttaagatttattataatcagaatcttaaaatttccataataattactgaatttttactgttcattatgaactttacagttgtgatttatttaatcttaacaacagccttatgaggtatatactaatagaatcattattttatggatgaggagactgagtcacagagattatgtagcctgtctaattatatacttagatgtcataattttaacaactttgttggctacaagaaatttaaaattatgtaaggctattaaataaatagatctgtttgcttcctaatgtcttaacctaaatcaccatctcaaaaagtaatataattcttagttgtctataacaacatattttaactcatgaattatttcagtgaagatagtagtggggaaagagtgttaccaaaaatttccttccttagctaccaatttaaatttatagttggcataggaaattttattttaacccttttctcatttaccccgagaatacttgctggtggtgcttgcagctgtagcatttaccccaagataactttgccaggaaatatcttgctttgattattatttttgcattgctctagtatattgactttggaaacaaaagacattattctatttatagcattctgtttttagtagtggtatttccgtttacaaaatatagtaattctcaattgctgaaaatgtcaaatcctagaagctagcattcctatgtgtgatgttaacatagttctcaaaaacagtttttatattttattttcacattgaaaatcactcagatttgtttcagcctcaaagagcatgtttatataaaattaaatgaatgcaggcagcaagctacactttttttttttctaaatgggaaaagggttaaaagaatgtttacatttggaaagtcaatgtaacaattatggcattataaagaaaaatttagaaaatgtaaaaaaaaaaaaaaccataaatcaccaccctagcactttagttttatttttgcctatcaccttcaagttcttgtccacacacatttttttgtgtaggtagaataataatgtatctttttttgtatcctgtatttgacaaagtgagctattaaaaattattttaaaagaaggcagttaaaaaattcaaacaaaaaatgttctttgtctttataattttcaacagcttttatgtaagtttaaggagttgtgtgaatattttggcgaagttggggatacataaaagcacattaccttttgtttctgacctcttatgctagtcctttcatcctaagtatttgtatggaaaggattatttgcctgtaaagtcaagtccagtggataatttggtttgaaagctcttgtataacacaatcatagacaaaagatttgtttttctttatgaagtttgttaatgcaatgttttagttgcatttctgaaatgagaaataaactaagaaagataggaatttgaggaataaaagtttagagtttcatcagtattaaaaaaaacttctctttagacaagactgagtaaatgtgtgtgactactgccctcttgggttggtataagggacatgtatttaaaaataatttgtgctgagatttatctttcttctttcaaaggtgttaaaatcatcacacaacaggttcaaccaagtaaaatcttacccaaaccagtgacagcaactctacccaccagtagcaattcccctattatggtggttagcagtaatggtgcaattatgacaactaaactggtaaccactcctactggtaagttctcttgagcatcagttcatttattcatcatacattcatcaaacagtttctctgtaccagcaatatgcttgacacttgggatatagagattaatgggacagtttttcaaagaggcctttcttgattctcacacccctactgactgccctgacgttaactttcttttgttattctttctaatgatcctttgttcttttcctttatagcacttcccataatttcttaggtatctagttgtatattgatttgtttgatattgttccttttattggaccataagctctgtgagcgtaagggaccatatcctttttatttaccacatatatagagctagtctgtaagtaggtgctcagtcaggatttgctgaatgaattaaaacagtcccaacccacaaggatttcactctgatgaagttgagaagagtatatgttacattacagtttagtaagcgttactgagactgagggaagcacagaatggtattgtgccctgataggcaagcaaccagcatatgctggaggaagtgacagtgttgaacattttggatagtaacactatctaaaatgtgaccttgagcagattacttaatctctctaaatgtttttctttgtttatttgtttttgtttttttccttgtttatttaaatgggataataatacctatgccataacgttattataagtactaaatgaaatcaggtatgtagaaagtccccggcatagtgctcaatagttgtcactattaatattataattagccattaccgttattttaaatgtatgactctttaaccaaactttttgaggatggctagtatttagatgacagaatttaaatagtgtaaaatgatacctgtctcaagcttataagctgtcatttattggccagtgtgtaaaggtcattacagacattgcacttcatatcctttaggctttattatctccattttcagcaacttccccaaggtcatgtagccaaaaagaggcagaactggggattgaaccagtttgactccaaaacctgtgctttcttttgttttttaaattgcagtaaaatatatataacatgaaatttaccattttcaaatatatagttcattggccttaagtacattcacattgttgtataaccatcaacaccatctatctccaaaacgttttcatcttccgaaactgaaactctgtgttcattcaacaataatgcttcatttccccactttctgaagtccctggcatcaccattctaccttctgtctctatgcaaagcctgtgcttttaaacactattattctttagtatttttatcatacttcccctaaacttttctaaatagataacagtgttatgcatatatgattcttcatgttatggaaaagtagtgaagaataatattttgtctatttatgtgtctgtgttataataagtgtttctttttttaacaaaaacttaatttgaaatttttccagatgtaatttgccaaattcaaactatgtatccatatagcatatttactttgcactagttttgtgggttttttttttttttcattcagatgtatgcttataaccaatataaactaattctacttattgttcctcccgttctccctttttgggtaatggttgtatttttcaaaggtgaataacttggtaaaagcatttttttggggggggggaggaggcgagtattgaaaatggctatcaaagtggtccgtgaatttgattatcatgaaagatttcttcaagtgaagatgatgttatcttagtcatttttttttcattctccctaaggctattgatgcttaatttaggaatagcctttctgagttactggatttgtaagaaactacaacagactcatgtagttagcttttaattcctgtttggagaaaagaaaaaagtgttagaaatagtggggaagggtataaaatcttttgagacacatgaagaaaaatagtctaacaggtctaaagttgaggaaataggtaaatagagaaaattttaggctaaagagaaatattcctggcaactctaggcagctttaactttaatctttactaaaatgatagaataaccaaccctttaaaggtggacgtatatttagagggtagcagagtacaaagcaatgaaagtttgtaaaactttaggcaaacaatactgccttatttgctcaatgccaacattgggtttggcactaagacagcataaaacagatgcagagaccttaaaatctatgacagaaatatctaaaatactctggcaggaaagatgattaaatttgtttcttttggcataaaactagtagaagaagggtagtggaagaagggaacagagttaactctactttttcttgggttagtaatttgatgcaacacatcacaaaattttatgtgtaaaattaatttaaattgacttggctgtagtacttgctatatgtgttgaaaactggctgtaaaattataaattaatgtcttgacaccttgaaattccattttcaagttatagcaatgtagattatatggaattacagttaaactgtattaattatcattcttctgtaagcaatgacaagtttttcttttggcttttccctttctataggcacacaagcaacctatacccggccaacagtgagcccatccattggtcggatggctgcaacccctggagctgcaacctatgtgaaaactacgagtggtagcatcattacagtagtacccaaatcattagctaccttggggggcaagataattagcagtaatatagtttctggtaggtatatctgaaatatgttaaaggtataggtggccttcattgagaggaaaaaaaaaacttacttcattgaaggattatatttgatctcaattttttgcttagaaatctaaagctttgttttagtccttatgtttcatgattaaataaagtttttagttttaatattcaatattcacatataaagcttttgatagttttaaaatggaaagaacctttagttgcttttagtcagagtggaaagattatagtttaaatttgcatagagatttttcatttgcaaagtatccttctatttgtcaacctattcagaccccataacaactctgaggtggttgctattgtgctgaatttacaaatgaagatagatttggctttagagagatcaaattgacctgtccaagaccaattagagttagaaagtggaagaactcttatttgttctgaatatgttttagggaacatatctcataatttcaattactgatgtcactttagtttattaaaaataaaaatatttgaatactttatttgccttttgccatttatattaactttgcttttcagaaatattttactttaatagtgaaagccaaccatctgcctatttattggtatattgaaaccatacctggtttttattggctcattaatctctgcagttcttgggttgtggaccctaatgtggaatgttaaaatggcatctgttttcatcgattattatttttaattaaaatgatgtaaataatcccagattaagcaagactgtagactttaattatctaccatttttgtagacaagtcatattttgtatgccccaggtgagttgttctaacattttaaagtcaagggattgaagttcctggcagtaatttgatgttgctgataactcagggagttaaaaaaaaagcaaagcagagcatgatattggcataaagtgttatatttaaagatgttaattttggctctacttttaagtgtaagtgagaaaatccgatgtttgccagactgaggagggtgaaaccagtagggaaagaatcattgtactccagcttttaagaggatactttaaataacacagttaaaacttaaattgtaatttattacttgacaatatctttacatagtataaagcacttactcagttaaacatttgtcaaaaagggatcttatatttcattgggaggtagttttttatgaccttaaggatttttctttacttatacatgaatttatagtttcatatagcttgaaggaatgtttggatgtcatgagtcctctattttcagacctaatgcataatgtagctgctttgtacctggttagagcaatacaagcaagcacattttcctaaaagcagagatgtcatttgaaatttatatatcttatacatgtataatgtgttatccatctttgtattgaattataaaaccattcatgttagttgctacttcaagtgcatgagtgtacatgagtagagacttttccagcactataggatatacttggcatacagtttaaacatacagtttaaacaactttattcattgtgtggtgctcattatgtctctatctctgcttcattgacacttttattccaaagaacttcttctggttgctctaaactgatccttatgttacatctcactattctttataaagacaattttcttattttataatattgttgatccatgatactgggattataggttagttttaaaatctttcattgcctatttatagtaaactgataaggctggttgaatgaatttacacagttttctgtcttcatccatgagcagatgctttttctagggtcccatcttccccaaacaaaaaagaagtactttcttttttttttttttttttttttaagacagagtatcactctgttgcccaggccagggtgcagtggcatgattggctcgttacagcgtcagcctcctgggctcaagcaatcctgacacctcagccttccaggtagctaagactacaggcccacaccaccatgcttggctaatttttgtaatttttctagagacagggttttgccatgttacccaggctggtctcaaactcctgagttgaagcgatctgcccaccttggccacccaaagtgctgggattacaggcatgagccaccatgcctggctcttttcttaaaatacactcaaacatctagctataagactagaaggcttaaaaaaagatactttccctctcattgtgggagaatttggaaactacagccaggttcaaagaaaattaaaaacctttgatttttactatccataggactgtgttaaaatttaggtatatttctttttattcatttttctattcgtttgtataaagtgtgtgtgtgcgcgcatatatatatatatatatatatatttttttttttttaattgggatctaatatagtcagattttatccgtatttcctatagtaatgttattttcccatgctagtaaatgtagtttgacatgcccccctcatatttaaccattttcttattgtagcaagttttaggttacttataggctgtcttgtgtgtgtgtgtgtgtgtgtgtgtgtcattataaataattctatgacgaacattattatacataaattattttgtggaattcttacttcctctgtataaatatcctagaatgcaagttaatgcttccaaagtactttctagaaagttctttttattagaacaagtaattaaatggaagccatgactatctttgtagttgattcatatctttttttttttttttttgagacagactcctgctgtgtcacctaggctggaatgcagtggtgtgatctctgctcactgctacccccgcctcccaggttcaagcaattctcctgcctcagcctcctgagtagctgggattacaggcgcctgccaccacgctcggctaatttttgtatttttagtagagacagggtttcaccatgttggccaggatgatgtcaaactcctgacctcaggtgatccacctgacttgggctcccaaagtgctggtattataggcgtcagttactgcgcctggccaattcatattttatagcgtcaaatatttatttacatgtgtatacattagattatcagatttgtaagtttttttgtgagctttgttgagggttagatgaataattacattggattcttcagagttgaactcactaccttgattctaaggacgttatgagaacctgtgacaacagcaaaactttaattctcctaatctttagtacagtgtccaggaaaggagctattgtttttgcactttttcattcgttcattctttgagcaaagcaacataaaacattacctaagagaccaagattgtcaggtgattttagaatctgtaaatagaatagtaaaatctgagccaataaatttgtgttcttctttaagcctacctattataatgcccaaacttttacagggatctttttaaaaaataagaatgcctggaatgcatcaatatcatagttcattattatctaaatgggatatacagttatttgcacccattatatctcgattgttttataagtgaagattatataggtgggtccttctgatatgctacgagccagatactctgctgtgtgttgtgatacagaggaatatatacatgagttttattatctgccctaaggaatgctaaacaagtgaacttgtataattttgctgtaacatgggaacagaagtccactgtgaaagcatagagggtgacttttttttaatgagtaatacttcttcaatgtaatgtatttatcccctgatacagaaacatgttcactagaatttcagaaatttataattgatcattctatcaattataaattatattctattttaatataatgttagacttgcttttccttatgctattcctttttcttctattttctgacatttgcccccccaccacattttgttaaacttgtggacttggtttgcaactatcatataaattgaaaaacctctgtaatggaagggattagacattttagtaggtaaaaatataattcatttgttaagcaagttttgtcaaaaagtggtccttgtactttggtataaagtcaaaagcatagtaaatcatgtcaaaagaggtctgtatgaaaccatgtcaaaaaaggtctatagagttaatcacatgtgagggattaaagttaattaagagttaaagttagtataagtgaatcatgggcagcttggtttttgaagttcttaacagctgactgttcagagactacaaataaatggaaaaacagttgtgaagctagttcatagattaaaatgctcttttatgtaacctcagagcatgttaccttggactaatgagacatataatggcaaatatattgtaaagacattttttgtagcagtgttgccaaaattaacatataactagaatattcttattcttagtgtaactttgtatacactaagtttacacaaacttagtgtaagtttgtataaaacttaaggaatattaaggttttccagtggaaaataataaaattgtgtttaattattttttgaagacatattgctcatgtttttactaagtaataattctgtgcttagtcatttgataaatgatatgtaggcctatagaagaagaacttgacatgcctcttttcataagcagaggaaattacaggagcaaaagtagcattggaatttgtatgctcaaagaccaatgtggaaaccagcacattaaaggagaggcgtatgttagttaattctaaaaattaaggtctgacaaagcctggaaagctaggcagaggagtttgggctttgtgtggtaggtaacgggaagccataatgaagaagttacttcttagatcaaagtttatggtgtgtactctggagtacatgctaattagatcaaaatggtagattaagggacagattatatattaataggattttgaaacatgagggaaagttagaactgggaatgaaatgggaaattagggaatttaaccagttgacatgtttcaggttcttggcatgataagtttagttttttaaggatgtaattgtcatccactgtgctaagcactgaggaatcataaaaaggtacagtgtggagattaaggggctttcatcttgttgagaggtatagggagttaagacgaggaaacaggccaagcctggtggctcatgcctgtaattccaacaatttgggaggctgaagcaggaggatcccttgaggccaggagttcaagaccaacctgggtaatgtagtaagaccccatctctaccaaaaaatacagaaattagccaggcatggtggcacatacctgtagtcctaggtacctaagaggctgagatgggaggattgtgtgagcccaggagttgaagcctgcagtagatatgatcatgcctctgcactccagcctggtaacagagtgagaccctgtttctcttaaaaaaaaaaaaaaaaaagtccaggcacagtggcttacacctgtagtcccaacacttcgtgaagctgaggcaggaggatcacttgaacctaggagtttgagaccagccagcagccagggcaacatagtgagaccttatctctataaaaaatcaaaaagtaaggtgggaggaccacttgagctcagaaggtcaaggctgcaatgagctgtggttgctccactccactcccgtctgggtgacacagcaagaccttgccttaaaaaaaataaataaataaaaataaaattttttgaaaaagagaagaagacaaggaacaaatcaaagatttgcgccagaatttacaactgaaggttggaaggtagatttgataggtagaagagaagccaattatggaaggatgtgtgggagagggcaaagtaatactgtgtttggatcagtaggtatagacctattagatagatcttaataattgacaatataagtttatatatgcaaattagagttttatcctcacattctccagagtgctacagattacaaaagcatacattgaatctgtgacttgttttgtatatcgtttactttgcttttttttttttttttttttttttttttcttgagatcgagtcttgctctgtagcccaggatggagtgcagtggcgcaatctcagctcactgcaacctccacctcccgggttcaagcaattcttttgcctcagcctcccaagtagctgggattacaggcgcccgccgccacccccagctaatttttttgtatttttagtagagatagactttcaccaggctgatcttgaactcctgacctctggtgatctgcctgcatcagcctctcaaaatactgggattatgagcgtgagccaccacgcctggcctactttgtcttttttaatcacagaaaaatacatggcttatttcttttcataaattttttctagagcctagtgttatgtaaatttaagcatttacttcatgttcttttttgaaggattttcccatcacttcagtcacatataatactgggtttgggggaaatacatgtcatggaatagagattgtgatttgtttcttttaactagtcagacaaagaatattgatggtaaaactgttgttcttagattctgagttttgtgtataggttctcagattctaaaaagatgactgctttaactgtaaattcttaatattctctcattctggtatgacttataacttactattccaagccttcattttcatcatcttgacagctttcatgtcatctaggaatgacatttactatatgtactaattgtgtataatataaacaaaaataaccaagtatctctagtccttaactcaggcctccttttcttcccccttttctaaggaacgactaccaaaatcactacaatcccaatgacttccaagcccaacgtgattgttgtacaaaagactacaggaaaaggaacgaccattcaaggcctcccgggcaaaaatgttgtcacaacgttgctaaatgctggagtaagtgagagcttcaactgcagacttagcaattcacagaggatttaaagaccagctatataaatatttgcacaaggacttgagaagcccacaatagccagaatggcttggtttaccactgctgggatataacaactgttaaagcaccaccaactgatgccatttttcacagtaatttctaaagcatgttgcccatacttgctcatagctaggttgcttgtgaccatgatttagatgcttagctttgtccagatagagaattccattggcttaactgtagggggacttcagttggagcactgttttattcctgcttatggtcaatagatactgacttagtatttggcttagggtgggcaaagagaaatatgtgggattaagactaaattaattgatggggatttgttactttctttttttttttttttttttttcatttttacctctttgagctgttaaaaaataaaatcagactgggtgtggtggcacatgtctgtaatcccagctggttgggaggctgaggtgggagaatcgctttagcccaggagttcaagaccagccttggcaacaaagcaagacccccacctctaccaaaatttattttaaaacttaaccaggtgtagtagcatgcacctgtagtcccagttacttgggaggctaaggtgggaggatcacatgagcccgggagtttgaggctgctatgagccatgatcatgccactgcactccagactgggcaacagagtgagaccttgcctcaaacaaaaaataaataaataaataacagattcatttatagttctgaaggcagttggtaggagggttggagttagacaaaacagggctttgtttctccatattgtagttgtttgaccttgggtgacatactcaacctctctcattcttaatttcctcatgtgtacattgggattgatgatctttaccagtgaggttgtttagtaactggtagctattgtgaaagtgcttagaatagtgcctggcccataagaagtcctcaatcattgattttcttcttgttattcttggtacttacctgtttaggcttgttagtgtccctaccttgcctaacttcactagaacatggattgctatacttcacttaaatagatctcataaaagcttcattggtaggggtccagcattagattttttcaatgtgtgggaaaacagattgctcctagcctgaatttacatagtaagccaaaagtaaagccaggattagaattcagattttcagaaccctttgtaatatggtttgcaatttcaaagaacttgatatgtaagaggggatgctttgtattctaggccctgtggtcacaaagatccaagagtcatgtatgattcatagctgttagatatctctgataacaaccgtttgacacaggcagctctagtaaaacaagcaaatcaacgtataagaccgttttctgggctgggtgtggaggcttatgcctgtaatcccagcaatttgggaaggcaaggcaggtggatcacttgagcccaagagtttgagaccagcctgagcaacatggtgaaactccgtatctacaaaattacaaaaattagcgtgaaggtgtgcacctatagtcccagctacttgggaggctgaggtggaggatcacttgagcctgggaggcagaggttgcagtgagctgagatcttgccactgtactccagcctgggtgacagagcaagactctgccactgccacccccgccaaagaccacataggcacaatcacctctactcaccacttgctcacctatgcatgcccacaacacacatcagaagagcttttttgaaaaacaggctgctagttggttttgtttggcttgaatgggtcatacttggccagggtccattgagctatttaatagataggtgtggtcacttgcaaactagtggctcttggcaaatgaactagagctctttccagagatggtgctgggaagagtatgcatgtgttgaaataagtaataacaccattggcagatgcttcatgtttcccttaagtaattacagcagatagttaaaattgtgatttttgtaattatatttagctctgaattcacaatgattgctttttagccagctcacgtgggtgctttgtttttactggctgctaagtttagataggcacacgtttagatgatgctggctaaaaattaagaaaaactgatgaggtgaaaattctcaaatcttttcatttccatcttaagtttatggattttaattttaaaaattttaataatttagtaaagtcactgtatttgaacttaatttagttaagttcatgtaaaaagatgttgatttcatgagtgaccagaaaatggtacttaagaataaagtagatgaaagtatagaaaatgatgaaaagttaatggatataagctatctagttaatagactaaaaggatattagtaatatatgaatagtaaaacataggaagcactctgagttttcccttcctttttttctatatgtaaccttatatattattaacaatatataacattctttcctcatggcatatgttcatcaaatttttcctatatataaccttagaaagaatgttaatacctctgctgattttgcttgcccatactttttcatgtagacattctactatatatccttataatttcatatatgtagaacttaggggatgtattttatgtgtgtgcatttagctactggtatattgcacagtaattttctaattacacaaatacttatttcagataaattagaaaataaatatgtatgtgggggttaagacttataatcccaattcttagagacaagcattagcagtgtactataccttcttccagaattttctgactattataatatatgtattccattaatgggatagtgtaataagtatttttgcatgtggtaattttttaaaattcgctcatcagagaataattaattccttctttgggtagaaagttggtcagatgactttctatatcatttcaaccaagtctacgatttttgatttcctggaaacattatactttgttacataatctacagcccttttttcatcatcctggtaaaaccttactgatttttcagtgagaggactttatcatttatatgcatataaatctcttatataatcattgacttcaatttagggagaaaagactattcagacagtgccaacaggagcaaagccagctatccttactgctacaagacccatcaccaaaatgattgtaacgcagccaaaaggaataggttctacagttcaaccagcagctaaaatcatcccaacaaaaattgtttatgggcagcaagggaaaacgcaggtatgctataagatatgatgatttttcttggctcttaaatattttcaattcttataattcccgggtagaaatttgaaggaaaagatcagcaatctttaagaaatcagattgttaaaagttatgtttgaatgtgttaattattcaagtattgtcaaaacttcatttatcttttcagtactttcttaaagatacctaaatgtgtatgttgtgctatcagcaaagattatggggaaataattacctaggaatacaatttgctgaaggtgtattttgtgatttgaggggggtggttgagggaggatcatagtcattcagaatcactcaaagaaaaatatttactttttataagctaccatggccttcaaaagcattttatttacttataaaattagctttgcttgaacccttgaacaatagataagctagagttgtatttattttttaaccaatagaagataagggaacttttctgaaaatttgccttggaatttgaggctcaggatctaatcatatgttgctaggctactgtttattttgtaggtattttgcttttctgagaatatcgagggaagcactattagtttcggttgagaaatgccatcctagaatttttgtaagaggtattaatgtacctataaactactaatttacttttagaatctgttctctcagaattatagccaaatactttacgtatctaaaaaaaaaataagctttgtgacaagtccaaattgcctatggagtttaattgtaataatttcatttgcttcatctaaagtatgttttccttcttaactcttggaaatgggtaacttaacagagtctgagaaattttagaatcttatatgtggtagaaacaaaaataattatgagttaatagtttttattccatggacccaattgaaattaactcctagagttcagattttgaagtagaatggcccagtttgaaaattttctcccatttcacttgtttcactgtttgtttttaacttttgccaggagctgatccaacacatgttccatgttgcttctgatagttgtcaaatcaatattcatctggggtttcttcaaagatagggcccaagcaagttttactttttgcaggtgtgtcaattaggaatttgatttagtttctaatgaaaaaaaaaaagaaaagaaaaaaaacttgaagaacactcgctcaaacagattagggttttatttttattatattaataaaagttcagagggaggaagtcctggactgatactgcagcacaaaaattccactgggaatctagactccttgtgtctttttgttctgccatcctcagcttgtggatatcattttactatatagtctacagattataaaatgactcctgaagttgtaggcaaacaggcacaaaggttcttgtcagaatcatggctattgcactctggcatgtaccacttaaaacattgtatatggcttacactgtaatttgtttgtagattgaattaccctttgatgagcaatgctgtgcctaaaaagtataacgtacagaatagtttccataccaggaaaatattagtttatgacctagaagtttagcatttttaaatcgttttctaaaattttatctcagtatatttctgcttttctcctaggttcttattaaacccaaaccagtgacttttcaagcgacagttgttagtgaacaaacaagacagctagtaacagaaacattacagcaagcatccagggtagcagaggctggtaattcatctattcaggaaggaaaagaagaaccacagaattatacagatagtagttcctcttctacagagtcctcccagagttcccaaggtaagatctattttacttctgatttatataagtactactgacatagtgcccaaattctaaaatagaggttgcttctacacatttcacaacaaatttgtatgctctatcaattcttttccttttttttttttttttttattgtttgatgttaaatcggtgagctgaaattttatttttggtaaaggttaccattctttcctgcatggaatatgttcatcaaataattaactttagatgatgaatctgtcaggtaggtaatattaaactggatagagttatgattcccagatggtaattttcatattcttcctctctggtttgggtaagtaggagaaaacgtatgtaaagaagtgaatatatattttgaaatggttattgctataccctgagaaagaatcaaggtggtcagaggtagactgtaagtgggctgtaagtagggtgactatacattccaatttgcatgggacaagtcctagtttatgttgttctggcacaattattaaagtactccctttcactctgaaaagtatcccagataatcatatggttgtcctaattatatggaaggaacgatgaagctagattctacagcagaaaactctttgtcctcggtgctgtttgaattatgttactcttctacgaaacctcttgaaataaactcatgatcataaactttgagaccttctacaaatctagtactcatgtctctcagttatcttaactgcccttatccttgggtggtacatttatgtctgtgcttatgtgctctgatgcatctaagcaaagctgtttatcttcccttgttctttccacactctctccattccctctctctgccttcccattatcctctctggggtgctttcttagcaacttcacttttcttatacacagtctccatattgtgcaaacactagtattttaactctttggtggagtcttccttgattagtcttacatggttcacattgctgattagtccattaattcaatttgacaattatttattagtttatactacatactaagcattatgctagaccctacagaagagtacaatatagttcttgccctccaggagcataaaatctagatctagaataggggatttaaaaaatacacatgcaactctagtataagaattttattagtagcaaacaaaaaaaatgccaaagactgaaagttgacatgccagtgaggagaggataagaaagcattcaaaatattctttgaaaattcatcaattaaaaataaatgaaaatgttgatttttaacaaacataatatgtccctcattatagagagtgggtagtttccttcagcatattatcagtgatagtaatattttctgaatccgtttgctaagatggactttatcattctgtattgattatgagtcaattatctgctgattacacttggttgatgcttattctccaatcatttcttttggtctgcagtttcttgagcaatactggccttttttgcactcgagatatacaaaatatattttcaaagagggcagataaaatgtttagtatgagttggtgcaaaaaggggacatgaacagtagaagtctgtatatacataatcctaggttatcctttgaaattgttagtcctttcctaagagagctgtaaaccaattagtacttcccaaacatgccatttcattagttgaatctttagggttttttttttttttttttttggagatagagtttcactcttgttgcccagactagagtgcagtggcgtgatctcggctcactgcaacctccgtctcctgggttcaagcgattctcctgcctcagcctcccgagtagctggtattacaagcacgcaccaccatgcccagctgattttttgtatttttagtagcgacggggtttcatcatgttggccaggctggtcttgaactcctgacttcaagtaatccacccgcctcggcctcccaaagtgctgggattataggcgtgagccactgcgtccagctgaatcttcagtttttattctaagaatgggacataagtttgcatcttctgtttttattctattaggttggtgcaaaagcagttgccattacttttaatggcaaaactgcaattacttttgcaccaacctaatacatctttcattgtatattactttttaaaatattctataacagaaaatttcacaatttagaataggcatagttgactgtaaggcagatttttataatctgcccctccccttatcgccttgtatagctgtttactacattcttacaaagactaggtctgggaatatatatgctgtgatttaaagagaaagggattaagatgttggttggtctcaggtcatgctgattttcaaagtatatgagaatattcctacttattaagaatgtaagtactacatagtttatttttctgttacattgttgcttttgtagtttttagccacttttttctttttaaagtaaccttttgatataatttcaaaattacagaacagttgcaagaatagtaaaaagaactcctgtgtatactctttacctagattcactacttatttacattttgccctatttgctttgttgttgattctctgccccccttctgctgtgtgtgtgtatattcttaaaatttcttaaccatgtgagagtaagttgagctaacatgtttcttatatttacttacatttgtaggcctatatttcttaaggattcttctctttatgactaagatacagttatcaaagtcaagaaatttaatgttataataattatctaatttacaatccatattcaaatattgttaattagctaataatgttctttatggttttcacctgtcctcaataaaattcaggtcgacacattgcatttagctgcatttaactgttgtggttttttaattctctttaacctggaataggtcctcagcctttctttgtatttcatgactttgatatttgaagagtgtaggtcagttactttgtagaatattcttcagtttggttttgtctgatgtttcctcatgattagattcatcaggaattccacagataggatattatatcctcagttttatcaggagaaacatgatgtcagtttgtcccagcatagatgatgttaacattgatcacttggttaagatgatgtcttctagttttctccactatgaagttaacatgtttccctttcagattaattgtaatttgtaggaaggtacatgatataaatatcatgttcctcatcaaacacttatccagtagttttagcatccatagatgattttccgaagttcattattctttgcacatttaatagttggcattccactataaggaaaaatcaatcttttcttaacttcaggtcctttttctggtgacttctgctacacaagtcctggaataaggactacgtatgccaagagaatgccttgattccacttgtggtttctgaacttcacctactgtcctccacccccaaggaagagaaatttttatttctcaactgtctccatataggctagaatatcatcaccctattttgagactttccttgatcaccctgagaggattcattcttctatgttaggcttccaatattgctttgtacatcagctcttttaacactgacaattttattttgtatgttgtgtttgtttgtgtgttataattgttttcttttccactaggctactagcttctcaagcttaaagatcatattcatcttcatacatatctggcatttatccaaagagttcagttaggactgagaaggtactcagtaaaagtttcaccgaatgaacaaatagcagagcagcaaccataataactgtggcattgggttaagctgcagccttataaactcatttttgttgcctgagtccaaaatgttttttttttttttttctggagttccccctaaccttgtgagtgggccttttaagtagtaagtagtatacacctagatatggatagatagctaggtgaccaaacctaatggattaaggccatcctcgcctaggtcacttactaaagatcaggtcatatgtcatatcgttcctgtgcttttcttcctaaatgggctttttcccctttctcatttgggaatggggtagcctagaacgtatttgggaatgggttccagattttttttaaacacatattaaagattatttatattatgctttgtttccaaaaggttttaaggtggattaaaatataagattatattaagtgaagtggaagaaaacaaggagacaaacccaagggcagagatttataatggaataaggcatgagtcaaatacaaaaatgtatcttgtaaagacattgctttgagtaagtcataactcagtttctagaatgatttctttctgaagtttcatgatctcagtacatcaaggtgagggtggggaataaatccaggttgagcagaaacatacttattgcagaacttttcagagcaattatgtgctaatatgtatatgaaagattaagagtggaagatacaatataaaatgttccccaacttttttgaccatggaaccctttttttgcagaacatcttgaggaacaaatgttctctggaacattttgggccttgctgtctaggcaattaaatactgtgaagtccttgagctttatgacagtgcttcagagggaaggtatatattacatcgtaaaagggatatagatatcttaggtttagtttagaagcaatgatttagatgtgtaaggtgtttagaatcactttgtatgagcaatagttggtggagacaggatttatcatgaagaagagaagatgggggtgggttgggttggtggggacataggagcttttgtcagttatcttcaggactgtgatgtggattaaggaaaagaattggtctttgtggatacaggaacagacctagaagcgctaagtagaagtcacaagacctgtttctactcaatatgaaaaaactttctgattgttataactgtgcagaattgtaaggaaactgtcttagaaagtaggagtactttggtgctggagttctcagacccatgggaatattgtgaagattatagtataagattgatggcagcattaaacaaactttaagatcccttctaacggaaaagtcttaagattctatgaaagtatgatctaggccatttataatagagacataggagatattcttccatagagatgtctgagtctgcctttgagtatactgttaaagtgtatatctctagtatctaacgtgtagtaggtatccaacaaacacttgttcagtgcagaaagacatctgagggacaggctgccatctgcaagagatgcaggaagtctagatgaacgcacactgcataagcacatgttactggtgcaagctcctgatttcctagtcattgcgttccatgacttgatagacagtagcttcatttaggtctaagcataagccaaaagtaggagagagaatcatttaaagatgggttttcacataggttcacacactcatcttgtgtcacagggttgctacagtgatacttatgatggtcagctgctctttctgagtatagacagaaagagatgtagcaatctctctagtacctacgaggtgatgttgtttgggataatggtctttggtagatgctctcctatggaaatttgttttccctttttcctatctctttctaccttatctctataaacacaatccctgccttttgtggatattcagtgtgtcttgtagggttgggttgcaaagtcattctttgcctatatcattatgaaaatttcttaagtttgagagcttaagttatataaaaggaatggtttcataatataatcaattctcttaagtttaaattctacatatctacttaaaatgaataaaagctgctctgtgcttcacatggcatttggtattgcaggatagcatccagtcttctgtatttctggggaagtttaatggaaaattatatatcttcatgtggcatatattctacctggtgttttggggaggaaaatatagtttgttcatggtaattaaaaattctaggtctattgtatattgattttgtttttttcaggaaggctgttttgttggaagagttgttccccttgccccaacatttttcaacaactttgtggctttaaaaaatataaggttcatagagggttaaacgtttattatgtttattcttgttttgggggctacttgaattcttttcattcttctgtgatgctttcactgaccatcccaattcaaagcagcctcttactttctgtttgtcttgtttgccctaatcatttgatatttgccctaagctacaaagccatatatctttatttgatgtttcccccattataatctgaatatagaggaaggaatcatgcctttatgtcctccacaatttcctctatggtgtcttggacaaaggagtttaggaagtttgtaatagtctagtccaacttgcttattttataggtggaaaactaaaagaataacttgttgcttgatttgatgcacatttagtatttatatgtgtacctgtatagcatgaatataataagccttggattagggctgtaatttattttgaaactaacaaagggtcttagaattcagaacttccaagctacaatagcaacaataataacatttctattggccttcatagtttataaagctcatttccatgtatcatttcattgcatactcagaaattctatgaggaagagagataattttattcccattttagaggtagtgaaactaagacccaaagaatcaacttgctaataattgatgtagttggggctataatccaagactttgagctccagatgttacacttgtcctgttatatcatgctggttctagatcatctgtcttttcttgctggcagtgaacaggatttccttcagtaattcagccatccaataagtgttgacagaatgctcaggctgtaatacaacacatattttcaggtgcattggagaaaataagactcctacagcattttgttcttactatacacaaacatgcactcacctacacatatgcgtatctatttataatagcaattatcacattgagttgtgatttgtctttttacatgtccgtctccccagccagactatgtgcttcttgagcatcctctgattattctgtgagctcctttatatcttcaatgccatatctagattctggcacataagtgtccagtttgttgtgaaatcaatgaatgagtgaatgaataagtgaattcagaagtgaaagacattatgccttctaggggcttatagtcttcttggggagataaagcatgaagtttacaataaatagaaagataagcaaacagacaaaaaaattgtttgtttttttttttttaagagaaactttgtttatagggtttgtttttttttaactaatataaaacagattcccagcctgtagttcatgtaattgcttcccggcgtcaggattggtcagaacatgagattgcaatggagactagccctaccataatttatcaggatgtatccagtgaatcacaatcagctacttcaacaatcaaagctctgttagaactccaacagacaacaggtatgaattcacatgctcaattgaatgaagcatgttttctctagagacgggttgtgctaaaatactaccactgttattatttattattactattatttattattattattgctattatttgagcacatttcccccctctggacttgtctataatcattggtacagtctggtttacttgttagttcagtaagatgtgcacaggaatattgaagtacagatggactatctgtagaaaagagaaaaaaaattgacagctctgtcttgtctcttgcttaaaatggacagtcctattgttccttagcactagaaaggagtagttctatcacttctaagcacaaggctagatacagtacagttgccagttgcattgaagaatagcaggaggcagattgaagggccttgccatcctccttgatattggtggagcacaaaacacctttagtggcccttgctaacattctgatttgttttaattttatcttcagacttatttctttgaatagtataggttagccacttgagctgtcatgcaaagttgtcctcatataactagatcctataagtatttctaattactaaatatctttgataaactctagaacaaacctgtggaagttatactgacttttcctttataataggtcaaagattttcagagtatttaaatgaccttagcaattatgtcatccaaacctttcattttatggataagtaaactgagatctagagaggttatccagttgattagtggcagagtgagactcatcttttggttcctagttcaatgtcctctctacttgtagggtgacttttgtatttttgttgttgttgttgttttacttattttgtttaattgttttgatttttgtcaggttatgtactcagtgggtatgaacattcagtggacttagttactggttaccgtttattgtaacttccaccttgtttgatccaaagattactagcatttaatgtaagtctttggttaatccttctgtcggtgttatttttgaccttagggatttcttcggttctttgtcgttgacatgctgagccatttctcttaatgccttatagaggtggggactttgaacgcatagattttgtagaaaagttgataacaaggtagaaagtgaatctattaatggaaatcattcttgattccagactgttatatcagacatttttctagaaacaaagaagccatttttttctaacaatgaaaatttttattctttaaaagttgttgaagacattgtaacattcctttggagatatcttgaatttttaatagctcaaattaaactggtcactgtgttgtgctattctgggtagatgtgtcctagagcaaatcatgttatgtactgcttattcaccctttgtttttaggttgatgaactcaagaccacagggaataccttgaagaagggtataggaaataccttaaggagagtgtacaagataaaaattcagttgtttggcttagagataaaaaggagatgatttttgtgttattgtatgtaagtccttcttactaggctgctgagtatggttatgcaagttgtgcactaaacagccatacatagcaatctgcttttttcttttcaattcactgtctacttagtcactgccagtgtggcaccccagaggtctggttcattattcctgtggacaactctggttttggtacttgtttgtaataaaagttaacttttcccctgacttttttatgcagtaaaggaaaaattggaatctaaaccaagacaacccactattgacctgagtcaaatggcagtgcctattcagatgacccaggaaaagagacattctcctgagagtccatcaattgctgtggtagagtcagaactagtagctgaatacatcactactggtaggtgtcctcttaaaatgtagtattaaggtaggagaactaccttcctggatttcatgggatgattgtgtgggggagaatatattctttatatttttagctttttcctctttgttttcagagcaaattcacaccatccttgggatttaccctgtctttaatgactaggaaaaaaaataggatgttatgaagtttgtaggtaatataaaactacaagtcagccataaataacaactgtgaatatacagcaacagttgtagggagaggataaaatatcttttgtctaagaatgagttttgtttgttttttgtttgtttgtttgttttgagacagggtctcacgcccatcgctcaggctggagtgcagtggcgcgatcatgattcactgcagcctcaacttcctgggctcaggtgatcctcctgcctcagcctcctgagtagctgggactacaggtgtgtgccactatgcctggttaattttttgtatttttagtagagatgggatttcgccatgttgcccgggcttgtcttgaattcctgggctcaagagatccgtccaccttggcctcccaaagtgctggaattacaggcatgagccactgagcctggcctagaataagtatttttatgcatctagagtttttagttttgtgggaaggtgggtcaagggggaaagaagaaataaaatccggtccttttaatatttttcaaaaagtagaaaaccttagccagatgcagtggctcacgcctgtaatcccagcattttgggaggccgaggcgggcagattgcttgaggtcaggagtttgagaccagcctggccaacatagcgaaaccccatctttactaaaactacaaaaattagccaggtgtggtggcacttgcctgtagtcccagctactcgggaggctgagtcacgagaatcccttgaatccggaaggcagaggttgcagtgagctgagactatgccactgcactccagcctgggtgtcagagggagactctgtctcaaaataaaaacaaaaacaagccaaaaaacccttaaatccatttaaatacttacaagttctggtggaaagcagattagctatttgtttaaaatgtggtctggcagcaaaacactgagatttttagatggcatatatagagaaataaaacaagatagattgtttctctcctattctgattagatgacacctggaatactgctttctcttttgaacactttattactttgaaatttgaaatagttcagagagcagtaatgtgaataattaaagggtttaagagagatgacttatgaggcaatatgtagaggactcctttcttaagttttctttagcagtggttaaaggagaacataaacttacagatatttgaaggacataaataccaaaaagaaaaggaattctttggcatcattttaggagataatattattaagactaatgggttaaaattgccaaaggggaaaatccaggtaagatatggaaagccatctagaatctttctttagagatatttagcagaaagctaattcaagcagaggccagtattctggggaacataaataacctctgggggtagactagattcttgcatggtgaacagatgaaaagactatgatttcttcccttacttatcctttcagaacgcactgatgaggggacagaggttgcttttccccttctaggtaagtggtgtgcatccatttgtagtatcactgaaggtaaaagatgattgttttggggggaaccgcttaaatggatgcgctctactctcatctggtagaggaaaggtaagctccacttagtgaaaggaagagagatttttcttttgtagaatagtggaattctttctcagaaatgagcattttgacagtggaaaaaagagttctttaaaataataaaaatgactgctttatggtgtttatatggcccagttaaggtcacttcagctattttccaagggtttattctgtgaccttcctccacaatctccacccatgatatccacagccatattgagcattttctttgacttaaaagccagctgcttggcctgccctttgtatcattctgcagtgggtactagttctctctaattttcctgaactctggagaattaccgtgaagtaattatagttgaaggagaattatttttaaatagacttagttgatctttttaaaatccatttcacttcttaataaaaaaatgcttaatgtaataattatgaagattaatatgggtggtagaagtgttccatataatttgataatttcatctgaaatgtattttttattttcacatgtcattcatttctgatgctttcatttaaaaaatattaatttgcttaattttaatattattataatttgttttttctactcagtcatattgtaaattacttcagtcattgttgttttagtgtaaaccttgactatctttttttcgattatgttgagcacatatggaagattttattaactcacgtaatttaacatgtgcatacaaagcatactgtgaaatattgtaagatactacagaacatttataaaagaatactggtgatgctgcctataatctcaaatcacatgtagatatatgtatagcaacaatagaaacactgcatttgtgaatatagatagaatgtgtcataaaaaataaagcctatttatatttcactggatagttttaaagctagtccttataatacataaatggcatttttacattgatttccatagtgatcatcttactcttgaacaccccactatgacttttctaaacaggaagtcagtgctatttgaaattatagatcagggtatatgaacattagaatcatgggttattgagaaagtttcaataatcccaaaagccttagctaatttacagatatattgtatttttatctgtttctaattcaaagggttagtttcccagtaatcatatgcatttttaaagctctgtggactgtgtaaaaagttgaagttgaggccaagtgtggtggctcatgcctgtaatcccagcactttgggaggccgaggtgggtggatcacttgaggtcaggatttcaagaccagcttggccatcatggcaaaaccctgactctactaaaaaatgcaaaaattagcctggtgtggtggtgcacacatgtaatcccagctattcaggaggctgaggcatgagagtaacttgaacctgggagtcggaagttgcagtgaacagagattgtgccattgcactccagcctgggtaacagagcaagactgagtctccaaaataaataaacaaatgaataaaaagttgaagctggtaaaatttgatagattggttacttcatgggacctttgtagcaatagaataagaagcagggatgtttcctatactgcaatcttacccatttgtgccaggtgagctaaatttgagatgatagaacagatttttctattattttgttaactctttatatttgtttagtactttatagtttaaggacaatttttcagtctgttacttcatttggtcctcttctaggtagaaacagcaagcctttattatcccattaaaataaaatcaatcaaacaaaacaaaacctcttaagttttagaggctaatagaggatgagtgacctcttcaaattcacttggctgtttgatggtagaacaggacaggatccaagcgtgattcttgattcagtttattttctgcattatcacccagacctttagatttttaggaactgtaaggttgtgagacagaatcacttaatacaaaggagtgaatgctactaatgtttttattgcatgtcgaactgagaccaagagattaaagaatgtgtattgccttactttccttaaagatattattttgggattacagaaattgattactgctttgttaccttaatgggatgaaagtcattggagaaagtgagtacagctcatgggaggatgcaactttaaggggtttgttcctcctttgtgataagagttttcacagtgcttccgtatacatttctcatctcatccttataatagctctgttattcccattttgcagatgaggaaacagtctcagagaagataagagactttcttagagtcacacagctcatagatgggcagactgtggtcttctgcctcctagttcacaatactacactttctttctgtgatacaagctcacagacatttgtttaaaatgactactggttacagatgctgtggtgatttctggagaaatatcatcacctcctctattttcagtcagccatcgctcccagccccaacagccttcccagccccagcggaccctgctccagcatgtggctcagtcacagaccgcaacacagacttcggtggtggtgaagtccatcccagcatcttcccctggagcaatcacccacattatgcagcaggttgtatctcttctttttcttcctatcttctgcaactgcccatgcttgaaataagattcagtgtcatcttgtattttaagaggagaaataattggaacgtagagtgtttgtgtaattcttttctaagaaatgagtagaggaaatgaattaagagtcttaacaccagaaaataattctgaaacagtattcttaaatctgtgaactcttaccatttcaaaagggtgagaatgtctagatgaatctaatgacatcagaattggtcactgtttttgtgtattttactgtggaagaatgtatcattgaggtaaataagattttcaaatgaaataacatttggcttgtttagctgtttgctgctgggtttgtagtttgtttttcgttttttgtttttttttttttttgcttttataatgaatcctcatagtaacattatgactaaggaggaaaataaatatttgatttttttaactatacatggtcaattacagaggaagagatgcaacagaaagttgagaatataaatctaatgtaaaacaggacatctggtattaagggtaatggggaaaaggaaaaatatgttaataggttgattttgtgtcggatactgtgctttgagctttaagtaaattgtttgattcatactatgatcttgcaaggtgggtgtgttatccctcttttacaagtgaggaaacttttatgctcacttcagtaagaaagtaagaaacttgctccaggtggcagagccaggatttaaacccaaagtgaactgcctctgttaaatagttatatcatggatatcagattaaagcatgacttatcattagtagtcacataagtcaccatcactcacatgatgatgaatctaactgtaggcaaactactggaaagaaaggcaacggagaatgttgaattgaaagcctgtatgtgcaaagtcattatggtataggggagagtcacaattgaatctcaaaattttatagtttaggatttaagtgtagcatatgataaggcagtagggaggatggggatagggtggatcttgctgtgtcattgagggaagccaactggctggaggttttgttgggcggcaggtctcagcctggagtccggccctcagctggcagctcctgacattgacctttctccggacacctagaaaggtctgacaggctggccctaaccgtgtcactcaagatgatgcctcctcacaacacttatcactgacactgggcactttgcctttctactgacaggaatgctgttgtcccctcctcagtctccttccgtcctgggagccagggctctgggatctgagcaaaggggcgaggaatgctagtcgagaggtgcttcatgcagaccttggtgaagcctgaagaatgatcttcatccatgcagggggctctctgtggggactggtacaggcacaggtctcagacaatctccctgaccttccagatagcactggacctacacatagccatggtgggcttctctgaaccttggcttttctcgggacctcatggcttggttaccgcttttagagaggttaacatcatgaataggccagacggctgtttgctgagccagggagcctttctcttctttttccgtgtttggttgtgcttgcagggccatcttattcttctaatctgtaagttctggaccctctaagacttttcttatagtagtaagtagaccagttttcgaagcacttacgtctgagagttgaaattgcaagttgcagtagaaagctccttgaggtttcttggcctttctaggttcttctgaaaatttttgagtgaatctcgtaagtctttttcagttaagaggaaaatgtagcaatgtagatgtttttcttatttcattcttactttgtgccttttttacttaggcattaagcagtcacactgcttttaccaaacacagcgaggaacttggaactgaggagggcgaggttgaagagatggacactttagaccctcagacaggtctgttttaccgatctgccctgactcagtcacagtcagctaaacagcagaaacttagccagcccccgctggaacagactcagctgcaagtgaaaactctgcagtgcttccagactaaacagaagcagaccatccacctgcaggcagaccagctccagcacaaactcccgcaaatgccccagctttccatcaggcatcaaaaactcacccctctccagcaagaacaagcacagcccaagccagatgtacagcacacacagcatcccatggtggccaaagacaggcagcttcctaccttaatggcacagcccccgcaaactgtagtacaggtgcttgcagtgaaaaccacgcagcagctccctaaactgcagcaggctccgaaccaaccaaaaatctacgtgcaaccccaaaccccccagagccaaatgtcgctcccagcttcttcagagaaacagacggcaagccaggtaacggaatattgatagcatgcaaagttaaacttctctgttcacggaaaaaaaaatgagaacatcacgaccctatcatgatatcagtgctttctcctggcaagaggaaacccaaaagcctcattacgctggtattactttgccccatcagaaggttgacattagggaagaaatgcacgcattaatatgtaggaagaaaaaaaagcatagcactcaaaacttgatttttcaggcagtttttattgaaatcacttcagcattgaccaacagtgcatagaagcgatatccctaaattatttttattttttggtataaaatatttatttccatgcctataaactctgatttctgtggtaataatgctaagtaaactacagtcttttaaggaacttcattgaacatctttctttgtagtttatatcatagccatctagttaactttattttttagatttatcttctagattacagaggaattattggtggataattgaaagcaaaattatattagcaaaaccagtggctctggagtgatgtatatgtatgtatatattataaatacatatatataggatatgtttgtatacatgtattatgaagcaaaagattggaaaaaatcttctttttattttaaaaagcagaagattatatgaaataatttgagccaggttgaaggtgtactgtttagggctgtaaaccccaaaggaaaactaggctgctgagactacttttttctttattgctataaaccttggctggctgaacaaaggttctttcaacccctcctctttctctaggttttgtaaaagtaaccagatccttcctatccagccctctttttaaaacagcaagcttcaaaactgtcttcctagtatagcgcacgaatgtttcttttgccatattgtctggggtgtttgattagattttctcaaagagatgtagctataacacacacaaccccaatttattttcaggtggagcagccaattataacccaaggatcctctgttacaaagataacttttgaggggcgccagcctcccacagttacaaagataactggtggcagttctgtgcctaagctgacatcaccagttacaagcatatctcccattcaggcctctgagaagacagcagtgtctgacattttgaaaatgtctttgatggaagctcagattgatacaaatgtagaacatatgatagtggatcccccaaagaaggctcttgccactagcatgctcactggtgaagcaggatcattaccctccacccacatggtggtggcagggatggcgaattccactccccagcaacagaaatgtagagagtcctgttcgagtccatccactgttggctcttccctaacgacaaggaaaattgatccaccagcagtgcctgcgacaggccagttcatgcgtattcagaatgtaggccaaaagaaagctgaagagagtccagcagaaattatcatccaggtaagaattggaaggaaaatgagaaatcttgtgcatcttgggggttgtgggtttgtttgatatgtttttgacttgtcacaggaagaatcaagccaagacagcaggaagacatagatattatctttgagatggtgtttgacaaatttggtttaacacctattacaaaaatacaaatttatttattttctggaagaggatcagaaaattgatggacattgtcacccagcacactgtaaaggcaataaagagcccatgtgtcagtttgattttgtaagatacaagctatacttgccaatgtgttcactcattaagtcaacccagaagataggaagtttctgggttcaaattttgtactcctcaatttttgctcaaaaaattctggaatgtaactggattgcacttctatttcaagttaatttgggggacccttttcttggaaaaacagttcttgttcttgatccaaatttatgactcaggacaatcaaacctcaactgcaatgtctggagagacatgttctaaggtgatattttaaaataatgtttatatttaatttgggactaaccatgaactttactgtttaattcaatcattgttattaaaaaatcttgtttggtttctgtcatgccttggtaagtacaggctaattaacacaatagaattattcattgataatagatggtacctcacattcccttgattctaaaaatcatctcttgtcatgcataataggtcaagactaaagaattactgagtccaggctaccccttagaagttgtattttatctccctctctccttgcaaggtatcaggttgttttcttgacatttgtcattctttgctaaacagatatatagcttggaaggtatcagaatagcacattttagttaattgagaatttggatttattgaaatgtgagtagactaggatttaccatcaattcattatggtaaactttctctttgccatgatcccaaactatgggagaatgcaaattgacaatgttaaaccaattaaggtagaattaaatatagaggaagtgcttaaaggcaagtagaaatggccattgaattattaaaataatttgtttccctttgtaaaaacaaatgtaaatgaagtaaatatttcctgacaaaaggatttgtgatttttttgtattttcccctgaagaggtaaggtgtggtggaaaaggaatggttttctggctttgccattcattgtatgattttgggcaaggctacttaacgtcattttgccttggatttctcatcagtaaaatgggaatcagtaatgcctactttacaggattgatacaaggattacacaaaatcaagcacctagcacagtacgtggctcatagttgttgtctaacagatggtaattattactgtttttaccaaaattatcatgcctactgggggcttagattcctatactcactaaattaaaaatcattttgaacagcttatttgggaattatttttctgcactttataaacaggagtgaaaatgtaatttgcttcatgtatcaaggatgatagttaatggataggttctttacagaattcgcagccagcttttagcatgtcccatgtgctaggtgtgctatgtcagaggtaaggacagcagagtgattaacaaccaaacttttggagtcagagatccctagatgtgatttctacctgtatccactatgtaacagcactgtgggtttgggcaactaaactaacctatatatctctttttctttacctatgaagtggaagcattaacatctacttcagagggttgttttgaggattaagtgagaaaatgtatataaagcacctagtcaagtgtctgtgtagagcaatgctcaataaagatagctcctattattatactcatcattaatatattgttagagcattttcaggtcttattagttatgtttagctttgatctgaagtattgatttgctgagtctgtaaagtgctttgattctagaagaatgctctataaaaattcaacatgtttgatattaaatgctttgaatgaaaagcattgctctttgtggacagtctgtattttattcattggttgattcgttcattcattcatttattccacatgtatgtttaactactgtgttccaggcacagtgctaagtgctgagaatagggaagtaaacaagatgtatcttctattataaaagagtctatatatgtggaattcatagacttttagaactgcaacgatcttcacagtgtatcctccaactatcttattttacacaagattaatgtggggctcaaagaagtagagtgacttactcagaggcccacagcaagccagagacaaagctgaactaaaatccaggcctcttgaccttgtctaatagtcttacacaattatcaggtatgtggaaaaaagaagcagaaacaaacaaacagaacttcgtgactccagaaccaatgcgtaggcatcttgcattattttcttgacagtgtaatttatattttccccagtaaagggttattttggtcaggcatatttgcaaagtgctgatattcaactttgctctggggtttttaatgttaaaaatgtgtatttattcatcaagtgtttattgagcctcttgctgtgttccaggccttgttcaaagctctgggcatctagcaatgagtaagatagtcaagatctgtgctctgtccacgttctcttggagcttacattttaagagtaagaaacaatttaacagatgataaatgcaatgaacaaaaatgtaacagaatgtaatagagatgggggtgggatgaacccactacttttgggttggtggtcatggaaggaaagcttttccaagcatttgaaccaagttgcagatgacaggacagagccaaccatgccatgatttggaggaagaatattccaggaagagaggaaggactagtacaaaagcactaatgtacaagtgagtttggcatgaggctggtagccatggtagggtgtttggttgtatagtgagtacaataggaaacaatgttggggttttaaacaagagtatgacatgaactgataaacctttttaaaggatgtctaataaagaggaaaaagaatctgacaaggcagtgtacctatgatatttacttacacagaggtctacagcaagtgttcttctactggtactcgtcttgcagataataaagggcaaaattaggctacatttacatttacatttgcttaataataaatgaaagctttattcaaagttcttctcttgaattaggcaatagatttgagcctcctttgttagaagaggcaccataaaggagtggaaagattgctttcagttgtacaagatttggatttgaatcttggcattaaccctgaccaactgtgtgactttggttaagtcatctaccctctcagtttcctcatttgtaaatgggaataataattttcttatagtgttgtcacagggatttagcagaatatgatgggatttagtagaatgtgatgtgtgaaagcaccttgcacagtgcctggcatgtagtagttgtccagttgtccaaaaaatgtcagttttcttttttttttttttcttgatattgttggggaagttattctgctaccttttcttaccataaagattctcctgtgtcttctcttccaggctattcctcagtatgctattccttgtcactccagctccaatgtggtggtggagcccagtgggcttcttgagctaaacaacttcactagtcaacagctggatgatgaggagacagcaatggagcaggacatagacagtagcacggaggatggaactgaacccagcccttctcagagctctgctgaacggtcctagtgtttggacacaatagtgcactttaaaacctgcttggttaccaagtgtccagggaaacccttgtattttgatgactaaaaagagcactttgcccgtacttaggctgtggaccctaaaacagcagtgtttcaacaagatgttgctgcaggagcagctttttaaaacaagataaaactcacaggggaatgtacttttttaaaaaaaaatgaaaaagaaaaaaaaaagctgcacatttacagtgacttaagacctggtcttctttctctgttggatcatggccggtgaaacagttttgtcttgcagtggaaagagacttcctgtgaatgtttctcaactggtttctgctgagcaaaataccatctaaaaggagaatgtgaatagttgtattttgaaatgatgtgtcaggaaaagttttttaaaaacttgtatgtttttgcaaatccctggaagtgttgaattggttaaaattttacattttctcagttcataattagtttataaacacctagaataatactggcattaaagaatccttgttggatggtagaaatcagatccctaaccagtgggaggtactttttgggtggcttgtgcattcttatcagttgtgtgctaatttattgtattgttcctttgtgctctaagcagcacacttgccttctatttatttaagtgtaaacatttcaaagcaggccgtactccttctgacaaatttcttgtaaaccaggattgcctacgctttccactgtcgtcgtctccccactttccctcttcctttaagaaaacttactaaaaaatgtttcattgcgaagcagaggaaaagaaacgttttcagacctaaaggaaatgtttggtcatgttaagaaaacaaattattcattcatatgatgctttcttaacgttgaaattgcacattcacattggactgagactttgaagataacttttacatacttttgtttaagcccctttgaaatgtataaaaagttcatttacagttctaaatgtaatgtttttaagccttctatctttttaggacacagtttgtttaagcaatatgttttggtcttgtgatcactgtctgtcacaagtagagtgaaaggggtaagggggtgggagggtaagagttttgacaagttgtggcaaaggaaactatacttttcatttttaaaaatgtaaatagaaaagtttttaacggttttatatagatttcactataaataagcattttaagactgacaaatgttgaactgtacatacatttatcagcataactgcccagtttttttggtgctgaagtactgtaagtagaattcatcaacggtctcctaatttttgcatctacatctggggggaaaaagctgtgatactatagttaataaattcccactagagtgacactgaagatttaaacacaagcattcataagatgcgctgatctctggtggttgtcactagttcttctaggtgataatgatttacccatagatggagctgttggatattattttattgtacaaattcatgtttaaaaaactttgtgactgtttctagttaagtaattttttaacctttcttgggtcatagacttctttggtaaactatgaactctcaccaaaaagatacacatgcaacatgttaaatacatgttagactttgcatacaattttaggggctcatgggcctctaagcctatccatgtattccaggttaagccctctgttatgatcaatccattacttacagattaagtttttataaaataaagtatcttttaaatattcatggatcaagtaacaagagcaaacttgaataaagttatgttctacatattttggcagcatagcatacctgtgtcccttgagaatttagccttcatatgtttctgcaattggaatggcaaataaaagtgctatcatctacatttttttaaagaattacaaatattaagaaattatcaagtgaaatttaaaatttttcttttaaaggtgttaattccaaatagagcatgcattcatttatttattcaacaaatattaattgagcatcttctgtatgacaagtagtattctgtgcactggggataccatagtgaacaaacaggaaatcctatccttatgaagtttataaacagggcttcctgctcatgaaatggatacaaggaatgaagacaggagaaaataagaacaatacttaggtttttttataaagtggatagatgatgatgccatatatggattttcagacatccctttactgaaagtcttagcattatatctattagtattccacatttaagtacataatttaaaagtaatttaaagtcatctctttgaaggatattaacaaattacaatgcaaatgctacagaatttttagaatcctaacaactattaggcagtgataagaaaaatccatttggcttaaagtaaactttaataagtgcctagtattgcagatgcagtttatggtgaacttagaggattaaaaaccaaagggggcttcattgagatattcacatgccataaactctcccatttaaagtataccgtttaatggttttagtatatccacagagttgggcaagccattaccacaatcaatttgagaacattttcattaatcacaaaagaaatcctgaaatgaaaccaccaccaccatcgctccagccctgggtggccactcctctactttctgcctcttatggatgtgccataagaaatgtggacatttcatataaatgagattatataatatgtggtcttttgtgacttctttcacttagcgtattttcaaggttcatccgtgttgtagaatgtgtcagtactacatttctttttatggccattccattgtgtgaaatatatcacattttgtttacccgtttatcagctgatggatatttgcattgtttacacttttgggctattatgaatgatgctgctatgaacaatttgtgtacaagttttacgtattttcagttcttatgggtatatacctaggagtgaaattgctgggtcatacagtgactgtttaaccttctgagcaagtgccagactcttttccacagggactgcatatcagcagtctataggagtttcagtttctccacatccttgccaacacttgctgctgtttgtcttttttattctagtcatcctcatgtatgaattgtaaagtgctaccccattgtggttctaatttccattcctctgatggctaatgatgagcatcttttcatgtgcatattggccattcatgtatctttagagaaatacctcttcagcttccttgcccattttccaattattttctttttctctcattttaaattgagaatttttgaagtataggaaatactactaatcttaagagaaaagtaatgtttatcacccttaaaatcctaggttaggttctagttctgcttctctaatgtaacaaattgcttagcagtattaaaacagtatagcttcataattgaaaacttgcttttaattacatttctttttgaggttctcacagtagcctgctaaggtaggagacttagtacaaaggaaatagtagtcaggcggtctggatttgacccttagactcttctgtgtattgatcatgtgaattttagcaagtcacatttcctctccgagtcagtttctccataataaaagtgagtatttctaaccccatgggactattatgaagacaagatgaaacagtacacgtaaaaatgccagtgagagtcgggtgctcagtattttttgagtccagtaattacaccactcctactttataaatagaaaactgagggttcaaagaagttaaatgatgtactaaaactcagattaaatgctaatgacatcatgctgagccatgaattactaccttctctagaaggaagtgtttttgttaccaaacaggactggcccttggaaggatggaggaactcggtgttgggctattaacatgtcttctaatcagccttgggtgcctttacacagaggtgctcgattcaggctttttttttttttttagtttaattatgtgtcataaatcccatataagaggaagtggagtgaaaaaaaagcactgtataagcaagacctttcccagaaaggatattgaaaacaaagtctgcggcctctgcttgcaggttcgtaagctttaagtaagcaagacttgatgacctatatattgaaaaagaagaaacacaggatcagatttgtaattgtgaaaagtcttgctctgccttcttccctcttccatgctcacacatacacactataactgaaaacatatacttgctttttttttttttttaaaccagacaagccctgtgagcttggaccagctctaaaaggcataaaacagcagaggacagaatgaaatagtactactttatctgattacttaaaactgatagataagcaatctcttctctccaagtggttctgtctggtgtcctgacttttctttctctgtcttgcaacaggtagttaatgggctctttctgtgtgcagacattgaggatacagttgtcagctaggtgggaaaagcctctattgtcatggaacatccagcctagtgaaggagacatgttaatgaagaattaaaactagatggattaagtgttaagagatgtgatggagaaatgcatagtgtcatgatagcatataaatggggaggttgggggagtttccctcaggaaggaatgctggagctgtgatcagaaggaaccagaggaattaggatataactaggcaaagaggagggagataagctgtgacgagataggacagcaggtgcagaagccctgtagtgcgagaggcatggtgggagggaaacttcgagtaggccgctgtggctgcagcatgagcagcaagggcagcatggtgagagcagacggtgataaactatatgaatcttgcagttgtgttaaaggtgtgtttgtctttatgaacaatgggaagtcatcaagaagtttaagtcacgagctggcaaaatgaattaatacacttacaaaatatttggagtcttgcttgattagaacagaaaaatatatttgacatttcttttttgataacaatgttatctccttatgtccttttctcaaacatcttcaatggttccctaatacaatggtatgaatctagcatttaaggctcttaaagcatcattttctagattcatattcccattttactaccctgacctactgcctacctcccccaccacatacacactatgctctgcatttgaaagtctcacccatttgtcaaagtccagcttgaattccacctccttcatttagactgcccagatctcttcaatgagaactcaacccaccccactgctgagttcctctagcatttggggagaaacacatgcttacttagcacttaccattggttacctgctatgaattatttgcagtgcataatgatcctcttttggtgtaagaattcacactttattttttgaagtcatcaagttccttgtgtgatacctgatgggaattccaagagtccaccatcactcagtgggtgggtttctttgtagtcccacacaatgtgcctctcagagagtccttgagatgcattattttagggagtcgttctaaaaaagtttttttcatcctaaaatcatagacactgagctttcttagttctttttctcttatgctgttgaattaaatctcaggcttaatgtttaagttagaaaagggtttagtgaaatcataaataatcttgataagattcactctctcactcaacccaatactgttcctatttggtccacaggatcaaccgctattttcttgcatggtggtattcaccagggtttgtactcaacccacatcccttctcactaagcacagtcttcctgggactttcatctgtgctatagattcaacttccacctaggtatggattaattaagtcattgaatatttattgagtgcatgtgtctcaggcagtgttctagccactagggatatagcagtgaacaaaatactaaaaaagtacctgccctatgtagcttacattctaaacaggtgataagtataagttaaaaatgcatagtatcttagcgataataaaacaagtagggaagaagaacatgaaattccaagatgcatgtgaaaatttagataggttagacagggaaggccttactgaaaaggcaacaacaacaacaaaaaaatggaattgagagagctagccgggctgatgtctgtggaaagtgtttcaggtgacagaataagtgcaaaggccccaagaaatgtgcctcgcgtgttcaaagacggaagaatgagacaggattagagtgaatggggaggaagggagtagtagaacagaaggtgaaaacgaagcatttctagttttctgagagtcatcataaaagggtgctgaattttgtcaaatgctttttttttttgcgtcagttgaaactgtggatttttttctttgttttatttttatttgtttatttatttgagacagagtctcgcactgttacccaggctggagtgcagtggcgcgatcttagctcattgcaacctctgcctcccgggtttaagtgattctcctgcctcagtctcccaagtagctgagattagaggcgcccactaccacacctggctaatttttttgtatttttggtagagatggggtttcactatgttggccaggctggtctcaaactcttgacctcatgattcggccgccttggcctcccaaagtgctgggattacaggcatgagccaccgcgcctggacccttttctgtttttattaatgtcttttgtgggcagcatattggatcatggttttttaatccattctgccatctcttgttttggattggaggctttaatcaatttacatttaatatactattgataaagaaagacttctacaatttgatagttgattttcatatgtcttttaccttttaaaatcctccatttcattcattgctgtcttttgtgttgatatttaaaattaatctatttttatttctttaaaaaatttttctcctaatctctgtgttggtcaattttgtgtttttttttttttttttttgtaatgaaatgttttgattctattctcatttcttttgtggctattttaaagatatttagtattttctttgtggttaccatgggggttatattgaacatcataaatttatagcaaactagttgaattgaaaccaacttaacgtcaatagcatacaaaaaattctgctccagtgtatctttgtcccccttttatgttgtcacgaattatatctttatgcatatgtaaccaataacatagatttataatttttttattcattcatcttttaaatcatgtaaataattgtcttttaactctcctctaggtttttctgggcttttagttggtttagttggttgattatttggtcggaggctgtagtagtccatttgtctagtggctttttctatttattttttcatagattgtattccttttcatgtgtggtcactggtcactgaagttgctcttccttagcttgtgtctaactagggttttgacagatttctttgagtgacaggacctaaacaaacaaaaacacttctctcagtctttgcaggttgcttctgttctctggctctccttcaacacttacgcagacttccactgaacctacggaccaacctgaagtgaaagtttgaggtctttgacaaagctttctaaattcctccatatacaagagtgctttggagtcctttaatttcccaaagaaacactctccttggctttttcttctaggctttcagcagtctattatatgttgcagccaaaatgtaatcttttgcttcaggcatctgcaggttttttttgtttttgtttttgtttttgtttgtcagccttataatgtttatagagtactgtctgctacttttctggcctgggtacattctgccttaagcaaagcagactgtcttgcatcagtcctttgaatagccctgagacagattagagcagacctacacaataatttgagaatgatgtctcctctgccccttctagaaagagggaccaggatccacgatagaacgtgggctgacgtctttaagactgctgccaagccgggaccagggcaaggagtagtaatgccacacagcttgcctgtatcatatttttttattgtggtaaaatatacataataaagtttaccattttagttattttcattaataagtgtacagttcagtgacatgaagcgcattcatgttgtggtgcaaccatcaccagtgtccatctccagaactttttaatcaacccagacaaacttctttaaacaataactcctcattcctgcctgccccagtccctggtaatcaccctgcagtcaggagttgccctcttcttgattcagtgttcagttgttgctgtaaacctttgactgttttctggagttctgacaaagttggttctgacagtttctgcttgttttttggtatttctgtgaagctgcctaccctgccattttgctgacgttactattaatgccaaggtttttgttctgaacaccttggaagaagagaatggctattaactgagatgagaaagactgggaagatctaatttggagagtagaatatcaagggctcagttttggatatattaaattcaagatgccactagatatcaaggagagaagtcaagtagacagaaaagaaaagaggtctcaggactgagccttggggtggtaaggacctgggggtcaggaagatgaggcagaaccagaaaagaccgagcagaagtagccagaggatgggaggtaaagttggagattgtggtgtctcagaaataggtaaagacagtgtttttgctgctaagtcaagtaacatgaggactcatggaatttgccatgtggaagtcattggcaatcttgggaaaagcagttttggtggagttggaggagaatgggaggagagaattggagaccaagagtacaaataatttcatgagtcactgtaaagaggagcagagaaatggggcagttgctggaaagggaagtgggatcaagaattgtttgtttaatgtaagaaattgggattcctgatgggattgatccaatggagaggagaaagtttgtgatgcaggagaggagagaattgctgttgcactgtccttgaataatgggaggggacagaatctagtagaggtgctgggttcatctgttagaagaggaagaagcaggtaggtaggtaaatgcatttgcttcaattttatgatggctctcaaatacacatctgcaattgctctcttctttgagccaaaacttacttccttgggacatccctgactgaatttttctaaaagtacgtcagcctcaagttgtcccaaacaaagatcaacccctttcctttcaacttactctctctgcttgttactccctatccttggcagcccattcatgctgagaagaggaagggtcagttttttcagtaaggtggaagcatcaagaaaaaggcaattccagagctgaggctggaagatgggtaatttatcatgtggagaaaggtggggaagaatgagacaggcaaagcatcaatggtggggagggacactgagcttgggttgggaggtgactgggggcggtgagctcagagcagtcatctagaggctgttacactcccagatgccaacaaagcattgtcaggggttgtggagtttcccataggttgttatgtaatccaaaaggctacttgtcttgaatttttcttccatagcattagattgttgttctgccagaagaaccctgcaagctgcttccacctccgggccttgtgccggctcttccctcgtcatgcagtgcacttccctctcacccatcatctccgtggtcacctcttgggacacttccccagagtctttctcccttagcctcctcatctgtctctcatttatggcttttctcatttgttatcccaatttttgctctgtgagggttttcctctgagggttgaattaatctcatgtccttagaacaggccctggcatggaaaaggcatcaataagtttgttgattgactatatagaaaaaaaacccaaaccatcttggtcttaggtctctgcccacaggtgcacaaatgcttactaacaagcaaagcccagaaataacctcctttcaggctgtttttagatgaggatgttattgttgtgagacgcgtgtgtgtcatccattctggactcaggagacagtgcccatctctgctgtcatttgttctgtcacttcaaagtgcaggaaaaccatgggtggtgattttagaatcttattcagaaccctcagggaatgagtcattgtgcactgacgacttttccggattgctgccgttcaaataaatcaagcaacaggacattattgttgttgttattgttgttaattttaactatttttgatggtaaatttcagaaatgtattatcatactttcctcagtatgattctaccatctcgtttcttcagaatcattatgatgagcatagttataataatttttcagctcagcaatgagaatacagagctttgctggcctctccctggagcagatccggaccacagccctaactgtacggtggagggagctgagctgcccccagaaatcagaggggtaagtcagggaaagaggcaggcccagaccccaagcacagggccagtgagtcccaggcttcaagtgcaccagagtcccctagggatcttgttaaaatacaggttccgatccagtagactcagattcctctgtgggctgggatcggagttctgcatttttaacaagaacctgggcaatgctggtgcgaccagaccacagaccaccctttccatatcaaatctttctgtatcaagttgacctcccagaggttttcttgtgatcttgagtggattttactgggaagcttatctttctctggggcttcttacatgtaccaggtggtctctggtgataataattcctctaaagtttataaaatggtcacctatttctcttcattctcacaataatcctaggaggtaagttagcacccttttaccgactgggacaccaattcctgacatcacagggttcccaggaggtggaggcagagctcatggctctgtgtctagtgcgcttctcatccctttctgctgtctccccttatatctgtgctctgtgccgtatacagccttgtggactctcaaggccgtgggagtgctgtggggaaaataattgtgtgtgtgcacacatgtgcgtgcctgtgttaacaggaaaggctgattagcaacagctgtagcacgtgaggcccatgtagtctcacttgggacaccctggcagagaccaacgtttcctctctgctccatctccctgtacccatgaagccctggcatcatattgtatgggtgaaatattgtgtcacaagcagcagcggtccctgcagcacgtgctgagatgctgtagctgccccaccttcaccccttctcatttgggggcaggctggctggacttgatctgccagcatctgcttctctgcctgatgcctttctctgaccactggggctactttgccctgtacaaggcgctgaagtgctgggaaattaatgcccctcagtcaaccaagggctaatggaagctgatgtaaaataatcgagctctcctaatttaggataactccgtggcattttcccccacattaagcctcagttactcaccgtggtgacatgcttgataatgtctcacttccccactcccataatagtagttcctgggatcccttcctaaaggaatgacttgcactcaactccttgtctcagggtctgctggaggaggccaaattaaggcacttctcccaaccactctttctactaagttacatctgaacccatatacctgactttcctctcatcacagtggagaagtattccagttcctggtgaattcagaccctccatgaggggcctagatcgcatccttacagccctctcaagatttccctcttgatattatttcccttctctgtggcatcatctttccttctccctctcgcttccctcttgtctcacttttctcctcctcctccgtctccctctcttctagaatacaccaacctagaaacaggcttcaagatgacccctcaggccatagtcttctgtttctgggcaatatggagcaatagtgactggatttttctcatgtgcctgaaacagccataacaataacaacaccaccaccactatatgacactgtggttttcaagacactgggcctcaagcaacagcagccagaagatgggaaagaagcagggtgaagaagtctatgattgccctagcacaagagggcatcatagggaagagcgtagggaagagaacccaagtagagcctgctgggctctctgaattgagaaaactggactaagagtccagagagaccaaggtagttagaatgtccagggcaaagtagtaaaggagagaacttcacagagaactcctgagatttgcagtgatccatgcatgcttgtgaagaaatatacaaggctaagggaagcaccaccggaactagaggaaatcatagctagtgctcacacagggccagaatagtgcctcttccgaccagtcagtctggaaaacctcatgcttcacaagacattgagtacgtactctgaagggttttgcctcagtagtggggaatagtaagccctagactaactgctgctctagtccttcctaacaaatcttaaaagaaatacca

SEQ ID NO: 1954 - DNA, 4837 bp, Homo sapiens
agaggcaccgcaaacaaacccaattcctggtgtcccctagtcttggcggaggagccttttagatgagccccgaaaggccgggcagggaggacaagctctttggggctaccaaacagaagcagcaatgcctgttgtgtggccaacccttctggatctcagcagggatgaatgcaaaagaattcttcgaaaattggaattggaggcatatgctggagttatcagtgcacttcgggcacagggggatctcaccaaggaaaagaaagatcttcttggagaactatcaaaagttcttagcatctcaacagaacgccaccgtgctgaagttcggagagcagtaaacgatgaacggttaacaacaattgcacataaaatgaatttatccttatatttgggtgaaagaccaagttacagtatgtctggacctaatagctcttcagaatggtccattgaaggtcgtcgattggtaccactgatgccccggctcgttccccaaaccgcctttactgtaacagctaatgctgttgctaatgcagctatccagcataatgcatctcttccagtgcctgcagaaacaggaagcaaggaagtagtggtttgctattcctacacaagtaccacgtcaaccccaacctctacccctgttccaagtggcagcatagcaacggttaagtctccaagacctgccagtcctgcctccaatgtagttgtcttgccaagtggaagtactgtttatgtcaaaagtgtaagctgttcagatgaagatgaaaaacccagaaaacgaaggcgaacaaactcttccagctcctctcctgttgttctaaaggaagttccaaaggccgttgttccagtctcaaagacgatcactgtgcctgtgagtggtagtcccaagatgagcaacatcatgcagagcattgccaactccttaccaccccacatgtctcctgtaaaaataaccttcactaaaccatcaacacagacaacaaacacaacaacacagaaggttattatagtcaccacatcaccaagctcaaccttcgtgcccaacattctctccaaatcccataactatgcagcagtcactaagcttgtaccaacgtcagtcattgcttctacaacccagaagccaccagttgttataactgcttcacagtcctctctggtcagtaatagcagcagtggcagcagcagttctacaccatcacctattcctaatacagttgcagtaacagctgtggtgtcctctacaccatctgtggtcatgtcaacagtagcacaaggtgtatctacatcagcaatcaaaatggcatcaaccagacttccttcccccaaaagcttagtgagtgccccaactcagattcttgcacagttccctaaacaacatcaacagtctcctaagcagcagttatatcaagtgcaacagcagacacagcaacaagtggcccagccttctccagtatctcatcagcaacagcctcagcagtctcctttgccacctggtattaaacctaccatccaaatcaaacaggagtcaggtgttaaaatcatcacacaacaggttcaaccaagtaaaatcttacccaaaccagtgacagcaactctacccaccagtagcaattcccctattatggtggttagcagtaatggtgcaattatgacaactaaactggtaaccactcctactggcacacaagcaacctatacccggccaacagtgagcccatccattggtcggatggctgcaacccctggagctgcaacctatgtgaaaactacgagtggtagcatcattacagtagtacccaaatcattagctaccttggggggcaagataattagcagtaatatagtttctggaacgactaccaaaatcactacaatcccaatgacttccaagcccaacgtgattgttgtacaaaagactacaggaaaaggaacgaccattcaaggcctcccgggcaaaaatgttgtcacaacgttgctaaatgctggaacttcaatttagggagaaaagactattcagacagtgccaacaggagcaaagccagctatccttactgctacaagacccatcaccaaaatgattgtaacgcagccaaaaggaataggttctacagttcaaccagcagctaaaatcatcccaacaaaaattgtttatgggcagcaagggaaaacgcaggttcttattaaacccaaaccagtgacttttcaagcgacagttgttagtgaacaaacaagacagctagtaacagaaacattacagcaagcatccagggtagcagaggctggtaattcatctattcaggaaggaaaagaagaaccacagaattatacagatagtagttcctcttctacagagtcctcccagagttcccaagattcccagcctgtagttcatgtaattgcttcccggcgtcaggattggtcagaacatgagattgcaatggagactagccctaccataatttatcaggatgtatccagtgaatcacaatcagctacttcaacaatcaaagctctgttagaactccaacagacaacagtaaaggaaaaattggaatctaaaccaagacaacccactattgacctgagtcaaatggcagtgcctattcagatgacccaggaaaagagacattctcctgagagtccatcaattgctgtggtagagtcagaactagtagctgaatacatcactactgtcagccatcgctcccagccccaacagccttcccagccccagcggaccctgctccagcatgtggctcagtcacagaccgcaacacagacttcggtggtggtgaagtccatcccagcatcttcccctggagcaatcacccacattatgcagcaggcattaagcagtcacactgcttttaccaaacacagcgaggaacttggaactgaggagggcgaggttgaagagatggacactttagaccctcagacaggtctgttttaccgatctgccctgactcagtcacagtcagctaaacagcagaaacttagccagcccccgctggaacagactcagctgcaagtgaaaactctgcagtgcttccagactaaacagaagcagaccatccacctgcaggcagaccagctccagcacaaactcccgcaaatgccccagctttccatcaggcatcaaaaactcacccctctccagcaagaacaagcacagcccaagccagatgtacagcacacacagcatcccatggtggccaaagacaggcagcttcctaccttaatggcacagcccccgcaaactgtagtacaggtgcttgcagtgaaaaccacgcagcagctccctaaactgcagcaggctccgaaccaaccaaaaatctacgtgcaaccccaaaccccccagagccaaatgtcgctcccagcttcttcagagaaacagacggcaagccaggtggagcagccaattataacccaaggatcctctgttacaaagataacttttgaggggcgccagcctcccacagttacaaagataactggtggcagttctgtgcctaagctgacatcaccagttacaagcatatctcccattcaggcctctgagaagacagcagtgtctgacattttgaaaatgtctttgatggaagctcagattgatacaaatgtagaacatatgatagtggatcccccaaagaaggctcttgccactagcatgctcactggtgaagcaggatcattaccctccacccacatggtggtggcagggatggcgaattccactccccagcaacagaaatgtagagagtcctgttcgagtccatccactgttggctcttccctaacgacaaggaaaattgatccaccagcagtgcctgcgacaggccagttcatgcgtattcagaatgtaggccaaaagaaagctgaagagagtccagcagaaattatcatccaggctattcctcagtatgctattccttgtcactccagctccaatgtggtggtggagcccagtgggcttcttgagctaaacaacttcactagtcaacagctggatgatgaggagacagcaatggagcaggacatagacagtagcacggaggatggaactgaacccagcccttctcagagctctgctgaacggtcctagtgtttggacacaatagtgcactttaaaacctgcttggttaccaagtgtccagggaaacccttgtattttgatgactaaaaagagcactttgcccgtacttaggctgtggaccctaaaacagcagtgtttcaacaagatgttgctgcaggagcagctttttaaaacaagataaaactcacaggggaatgtacttttttaaaaaaaaatgaaaaagaaaaaaaaaagctgcacatttacagtgacttaagacctggtcttctttctctgttggatcatggccggtgaaacagttttgtcttgcagtggaaagagacttcctgtgaatgtttctcaactggtttctgctgagcaaaataccatctaaaaggagaatgtgaatagttgtattttgaaatgatgtgtcaggaaaagttttttaaaaacttgtatgtttttgcaaatccctggaagtgttgaattggttaaaattttacattttctcagttcataattagtttataaacacctagaataatactggcattaaagaatccttgttggatggtagaaatcagatccctaaccagtgggaggtactttttgggtggcttgtgcattcttatcagttgtgtgctaatttattgtattgttcctttgtgctctaagcagcacacttgccttctatttatttaagtgtaaacatttcaaagcaggccgtactccttctgacaaatttcttgtaaaccagga

SEQ ID NO: 1955 - protein, 672 aa, Homo sapiens
MIVTQPKGIGSTVQPAAKIIPTKIVYGQQGKTQVLIKPKPVTFQATVVSEQTRQLVTETLQQASRVAEAGNSSIQEGKEEPQNYTDSSSSSTESSQSSQDSQPVVHVIASRRQDWSEHEIAMSPTIIYQDVSSESQSATSTIKALLELQQTTVKEKLESKPRQPTIDLSQMAVPIQMTQEKRHSPESPSIAVVESELVAEYITTVSHRSQPQQPSQPQRTLLQHVAQSQTATQTSVVVKSIPASSPGAITHIMQQALSSHTAFTKHSEELGTEEGEVEEMDTLDPQTGLFYRSALTQSQSAKQQKLSQPPLEQTQLQVKTLQCFQTKQKQTIHLQADQLQHKLPQMPQLSIRHQKLTPLQQEQAQPKPDVQHTQHPMVAKDRQLPTLMAQPPQTVVQVLAVKTTQQLPKLQQAPNQPKIYVQPQTPQSQMSLPASSEKQTASQVEQPIITQGSSVTKITFEGRQPPTVTKITGGSSVPKLTSPVTSISPIQASEKTAVSDILKMSLMEAQIDTNVEHMIVDPPKKATSMLTGEAGSLPSTHMVVAGMANSTPQQQKCRESCSSPSTVGSSLTTRKIDPPAVPATGQFMRIQNVGQKKAEESPAEIIIQAIPQYAIPCHSSSNVVVEPSGLLELNNFTSQQLDDEETAMEQDIDSSTEDGTEPSPSQSSAERS

SEQ ID NO: 1956 - DNA, 4822 bp, Homo sapiens
agaggcaccgcaaacaaacccaattcctggtgtcccctagtcttggcggaggagccttttagatgagccccgaaaggccgggcagggaggacaagctctttggggctaccaaacagaagcagcaatgcctgttgtgtggccaacccttctggatctcagcagggatgaatgcaaaagaattcttcgaaaattggaattggaggcatatgctggagttatcagtgcacttcgggcacagggggatctcaccaaggaaaagaaagatcttcttggagaactatcaaaagttcttagcatctcaacagaacgccaccgtgctgaagttcggagagcagtaaacgatgaacggttaacaacaattgcacataatatgtctggacctaatagctcttcagaatggtccattgaaggtcgtcgattggtaccactgatgccccggctcgttccccaaaccgcctttactgtaacagctaatgctgttgctaatgcagctatccagcataatgcatctcttccagtgcctgcagaaacaggaagcaaggaagtggtttgctattcctacacaagtaccacgtcaaccccaacctctacccctgttccaagtggcagcatagcaacggttaagtctccaagacctgccagtcctgcctccaatgtagttgtcttgccaagtggaagtactgtttatgtcaaaagtgtaagctgttcagatgaagatgaaaaacccagaaaacgaaggcgaacaaactcttccagctcctctcctgttgttctaaaggaagttccaaaggccgttgttccagtctcaaagacgatcactgtgcctgtgagtggtagtcccaagatgagcaacatcatgcagagcattgccaactccttaccaccccacatgtctcctgtaaaaataaccttcactaaaccatcaacacagacaacaaacacaacaacacagaaggttattatagtcaccacatcaccaagctcaaccttcgtgcccaacattctctccaaatcccataactatgcagcagtcactaagcttgtaccaacgtcagtcattgcttctacaacccagaagccaccagttgttataactgcttcacagtcctctctggtcagtaatagcagcagtggcagcagcagttctacaccatcacctattcctaatacagttgcagtaacagctgtggtgtcctctacaccatctgtggtcatgtcaacagtagcacaaggtgtatctacatcagcaatcaaaatggcatcaaccagacttccttcccccaaaagcttagtgagtgccccaactcagattcttgcacagttccctaaacaacatcaacagtctcctaagcagcagttatatcaagtgcaacagcagacacagcaacaagtggcccagccttctccagtatctcatcagcaacagcctcagcagtctcctttgccacctggtattaaacctaccatccaaatcaaacaggagtcaggtgttaaaatcatcacacaacaggttcaaccaagtaaaatcttacccaaaccagtgacagcaactctacccaccagtagcaattcccctattatggtggttagcagtaatggtgcaattatgacaactaaactggtaaccactcctactggcacacaagcaacctatacccggccaacagtgagcccatccattggtcggatggctgcaacccctggagctgcaacctatgtgaaaactacgagtggtagcatcattacagtagtacccaaatcattagctaccttggggggcaagataattagcagtaatatagtttctggaacgactaccaaaatcactacaatcccaatgacttccaagcccaacgtgattgttgtacaaaagactacaggaaaaggaacgaccattcaaggcctcccgggcaaaaatgttgtcacaacgttgctaaatgctggaggagaaaagactattcagacagtgccaacaggagcaaagccagctatccttactgctacaagacccatcaccaaaatgattgtaacgcagccaaaaggaataggttctacagttcaaccagcagctaaaatcatcccaacaaaaattgtttatgggcagcaagggaaaacgcaggttcttattaaacccaaaccagtgacttttcaagcgacagttgttagtgaacaaacaagacagctagtaacagaaacattacagcaagcatccagggtagcagaggctggtaattcatctattcaggaaggaaaagaagaaccacagaattatacagatagtagttcctcttctacagagtcctcccagagttcccaagattcccagcctgtagttcatgtaattgcttcccggcgtcaggattggtcagaacatgagattgcaatggagactagccctaccataatttatcaggatgtatccagtgaatcacaatcagctacttcaacaatcaaagctctgttagaactccaacagacaacagtaaaggaaaaattggaatctaaaccaagacaacccactattgacctgagtcaaatggcagtgcctattcagatgacccaggaaaagagacattctcctgagagtccatcaattgctgtggtagagtcagaactagtagctgaatacatcactactgaacgcactgatgaggggacagaggttgcttttccccttctagtcagccatcgctcccagccccaacagccttcccagccccagcggaccctgctccagcatgtggctcagtcacagaccgcaacacagacttcggtggtggtgaagtccatcccagcatcttcccctggagcaatcacccacattatgcagcaggcattaagcagtcacactgcttttaccaaacacagcgaggaacttggaactgaggagggcgaggttgaagagatggacactttagaccctcagacaggtctgttttaccgatctgccctgactcagtcacagtcagctaaacagcagaaacttagccagcccccgctggaacagactcagctgcaagtgaaaactctgcagtgcttccagactaaacagaagcagaccatccacctgcaggcagaccagctccagcacaaactcccgcaaatgccccagctttccatcaggcatcaaaaactcacccctctccagcaagaacaagcacagcccaagccagatgtacagcacacacagcatcccatggtggccaaagacaggcagcttcctaccttaatggcacagcccccgcaaactgtagtacaggtgcttgcagtgaaaaccacgcagcagctccctaaactgcagcaggctccgaaccaaccaaaaatctacgtgcaaccccaaaccccccagagccaaatgtcgctcccagcttcttcagagaaacagacggcaagccaggtggagcagccaattataacccaaggatcctctgttacaaagataacttttgaggggcgccagcctcccacagttacaaagataactggtggcagttctgtgcctaagctgacatcaccagttacaagcatatctcccattcaggcctctgagaagacagcagtgtctgacattttgaaaatgtctttgatggaagctcagattgatacaaatgtagaacatatgatagtggatcccccaaagaaggctcttgccactagcatgctcactggtgaagcaggatcattaccctccacccacatggtggtggcagggatggcgaattccactccccagcaacagaaatgtagagagtcctgttcgagtccatccactgttggctcttccctaacgacaaggaaaattgatccaccagcagtgcctgcgacaggccagttcatgcgtattcagaatgtaggccaaaagaaagctgaagagagtccagcagaaattatcatccaggctattcctcagtatgctattccttgtcactccagctccaatgtggtggtggagcccagtgggcttcttgagctaaacaacttcactagtcaacagctggatgatgaggagacagcaatggagcaggacatagacagtagcacggaggatggaactgaacccagcccttctcagagctctgctgaacggtcctagtgtttggacacaatagtgcactttaaaacctgcttggttaccaagtgtccagggaaacccttgtattttgatgactaaaaagagcactttgcccgtacttaggctgtggaccctaaaacagcagtgtttcaacaagatgttgctgcaggagcagctttttaaaacaagataaaactcacaggggaatgtacttttttaaaaaaaaatgaaaaagaaaaaaaaaagctgcacatttacagtgacttaagacctggtcttctttctctgttggatcatggccggtgaaacagttttgtcttgcagtggaaagagacttcctgtgaatgtttctcaactggtttctgctgagcaaaataccatctaaaaggagaatgtgaatagttgtattttgaaatgatgtgtcaggaaaagttttttaaaaacttgtatgtttttgcaaatccctggaagtgttgaattggttaaaattttacattttctcagttcataattagtttataaacacctagaataatactggcattaaagaatccttgttggatggtagaaatcagatccctaaccagtgggaggtactttttgggtggcttgtgcattcttatcagttgtgtgctaatttattgtattgttcctttgtgctctaagcagcacacttgccttctatttatttaagtgtaaacatttcaaagcaggccgtactccttctgacaaatttcttgtaaaccagga

SEQ ID NO: 1957 - protein, 1308 aa, Homo sapiens
MPVVWPTLLDLSRDECKRILRKLELEAYAGVISALRAQGDLTKEKKDLLGELSKVLSISTERHRAEVRRAVNDERLTTIAHNMSGPNSSSEWSIEGRRLVPLMPRLVPQTAFTVTANAVANAAIQHNASLPVPAETGSKEVVCYTSTTSTPTSTPVPSGSIATVKSPRPDNVVVLPSGSTVYVKSVSCSDEDEKPRKRRRTNSSSSSPVVLKEVPKAVVPVSKTITVPVSGSPKMSNIMQSIANSLPPHMSPVKITFTKPSTQTTNTTTQKVIIVTTSPSSTFVPNILSKSHNYAAVTKLVPTSVIASTTQKPPVVITASQSSLVSNSSSGSSSSTPSPIPNTVAVTAVVSSTPSVVMSTVAQGVSTSAIKMASTRLPSPKSLVSAPTQILAQFPKQHQQSPKQQLYQVQQQTQQQVAQPSPVSHQQQPQQSPLPPGIKPTIQIKQESGVKIITQQVQPSKILPKPVTATLPTSSNSPIMVVSSNGAIMTTKLVTTPTGTQATYWTVSPSIGRMAATPGAATYVKTTSGSIITVVPKSLATLGGKIISSNIVSGTTTKITTIPMTSKPNVIVVQKTTGKGTTIQGLPGKNVVTTLLNAGGEKTIQTVPTGAKPAILTAWITKMIVTQPKGIGSTVQPAAKIIPTKIVYGQQGKTQVLIKPKPVTFQATVVSEQTRQLVTETLQQASRVAEAGNSSIQEGKEEPQNYTDSSSSSTESSQSSQDSQPVVHVIASRRQDWSEHEIAMSPTIIYQDVSSESQSATSTIKALLELQQTTVKEKLESKPRQPTIDLSQMAVPIQMTQEKRHSPESPSIAVVESELVAEYITTERTDEGTEVAFPLLVSHRSQPQQPSQPQRTLLQHVAQSQTATQTSVVVKSIPASSPGAITHIMQQALSSHTAFTKHSEELGTEEGEVEEMDTLDPQTGLFYRSALTQSQSAKQQKLSQPPLEQTQLQVKTLQCFQTKQKQTIHLQADQLQHKLPQMPQLSIRHQKLTPLQQEQAQPKPDVQHTQHPMVAKDRQLPTLMAQPPQTVVQVLAVKTTQQLPKLQQAPNQPKIYVQPQTPQSQMSLPASSEKQTASQVEQPIITQGSSVTKITFEGRQPPTVTKITGGSSVPKLTSPVTSISPIQASEKTAVSDILKMSLMEAQIDTNVEHMIVDPPKKATSMLTGEAGSLPSTHMVVAGMANSTPQQQKCRESCSSPSTVGSSLTTRKIDPPAVPATGQFMRIQNVGQKKAEESPAEIIIQAIPQYAIPCHSSSNVVVEPSGLLELNNFTSQQLDDEETAMEQDIDSSTEDGTEPSPSQSSAERS

SEQ ID NO: 1958 - DNA, 6763 bp, Homo sapiens
agaggcaccgcaaacaaacccaattcctggtgtcccctagtcttggcggaggagccttttagatgagccccgaaaggccgggcagggaggacaagctctttggggctaccaaacagaagcagcaatgcctgttgtgtggccaacccttctggatctcagcagggatgaatgcaaaagaattcttcgaaaattggaattggaggcatatgctggagttatcagtgcacttcgggcacagggggatctcaccaaggaaaagaaagatcttcttggagaactatcaaaagttcttagcatctcaacagaacgccaccgtgctgaagttcggagagcagtaaacgatgaacggttaacaacaattgcacataatatgtctggacctaatagctcttcagaatggtccattgaaggtcgtcgattggtaccactgatgccccggctcgttccccaaaccgcctttactgtaacagctaatgctgttgctaatgcagctatccagcataatgcatctcttccagtgcctgcagaaacaggaagcaaggaagtggtttgctattcctacacaagtaccacgtcaaccccaacctctacccctgttccaagtggcagcatagcaacggttaagtctccaagacctgccagtcctgcctccaatgtagttgtcttgccaagtggaagtactgtttatgtcaaaagtgtaagctgttcagatgaagatgaaaaacccagaaaacgaaggcgaacaaactcttccagctcctctcctgttgttctaaaggaagttccaaaggccgttgttccagtctcaaagacgatcactgtgcctgtgagtggtagtcccaagatgagcaacatcatgcagagcattgccaactccttaccaccccacatgtctcctgtaaaaataaccttcactaaaccatcaacacagacaacaaacacaacaacacagaaggttattatagtcaccacatcaccaagctcaaccttcgtgcccaacattctctccaaatcccataactatgcagcagtcactaagcttgtaccaacgtcagtcattgcttctacaacccagaagccaccagttgttataactgcttcacagtcctctctggtcagtaatagcagcagtggcagcagcagttctacaccatcacctattcctaatacagttgcagtaacagctgtggtgtcctctacaccatctgtggtcatgtcaacagtagcacaaggtgtatctacatcagcaatcaaaatggcatcaaccagacttccttcccccaaaagcttagtgagtgccccaactcagattcttgcacagttccctaaacaacatcaacagtctcctaagcagcagttatatcaagtgcaacagcagacacagcaacaagtggcccagccttctccagtatctcatcagcaacagcctcagcagtctcctttgccacctggtattaaacctaccatccaaatcaaacaggagtcaggtgttaaaatcatcacacaacaggttcaaccaagtaaaatcttacccaaaccagtgacagcaactctacccaccagtagcaattcccctattatggtggttagcagtaatggtgcaattatgacaactaaactggtaaccactcctactggcacacaagcaacctatacccggccaacagtgagcccatccattggtcggatggctgcaacccctggagctgcaacctatgtgaaaactacgagtggtagcatcattacagtagtacccaaatcattagctaccttggggggcaagataattagcagtaatatagtttctggaacgactaccaaaatcactacaatcccaatgacttccaagcccaacgtgattgttgtacaaaagactacaggaaaaggaacgaccattcaaggcctcccgggcaaaaatgttgtcacaacgttgctaaatgctggaggagaaaagactattcagacagtgccaacaggagcaaagccagctatccttactgctacaagacccatcaccaaaatgattgtaacgcagccaaaaggaataggttctacagttcaaccagcagctaaaatcatcccaacaaaaattgtttatgggcagcaagggaaaacgcaggttcttattaaacccaaaccagtgacttttcaagcgacagttgttagtgaacaaacaagacagctagtaacagaaacattacagcaagcatccagggtagcagaggctggtaattcatctattcaggaaggaaaagaagaaccacagaattatacagatagtagttcctcttctacagagtcctcccagagttcccaagattcccagcctgtagttcatgtaattgcttcccggcgtcaggattggtcagaacatgagattgcaatggagactagccctaccataatttatcaggatgtatccagtgaatcacaatcagctacttcaacaatcaaagctctgttagaactccaacagacaacagtaaaggaaaaattggaatctaaaccaagacaacccactattgacctgagtcaaatggcagtgcctattcagatgacccaggaaaagagacattctcctgagagtccatcaattgctgtggtagagtcagaactagtagctgaatacatcactactgtcagccatcgctcccagccccaacagccttcccagccccagcggaccctgctccagcatgtggctcagtcacagaccgcaacacagacttcggtggtggtgaagtccatcccagcatcttcccctggagcaatcacccacattatgcagcaggcattaagcagtcacactgcttttaccaaacacagcgaggaacttggaactgaggagggcgaggttgaagagatggacactttagaccctcagacaggtctgttttaccgatctgccctgactcagtcacagtcagctaaacagcagaaacttagccagcccccgctggaacagactcagctgcaagtgaaaactctgcagtgcttccagactaaacagaagcagaccatccacctgcaggcagaccagctccagcacaaactcccgcaaatgccccagctttccatcaggcatcaaaaactcacccctctccagcaagaacaagcacagcccaagccagatgtacagcacacacagcatcccatggtggccaaagacaggcagcttcctaccttaatggcacagcccccgcaaactgtagtacaggtgcttgcagtgaaaaccacgcagcagctccctaaactgcagcaggctccgaaccaaccaaaaatctacgtgcaaccccaaaccccccagagccaaatgtcgctcccagcttcttcagagaaacagacggcaagccagataacttttgaggggcgccagcctcccacagttacaaagataactggtggcagttctgtgcctaagctgacatcaccagttacaagcatatctcccattcaggcctctgagaagacagcagtgtctgacattttgaaaatgtctttgatggaagctcagattgatacaaatgtagaacatatgatagtggatcccccaaagaaggctcttgccactagcatgctcactggtgaagcaggatcattaccctccacccacatggtggtggcagggatggcgaattccactccccagcaacagaaatgtagagagtcctgttcgagtccatccactgttggctcttccctaacgacaaggaaaattgatccaccagcagtgcctgcgacaggccagttcatgcgtattcagaatgtaggccaaaagaaagctgaagagagtccagcagaaattatcatccaggctattcctcagtatgctattccttgtcactccagctccaatgtggtggtggagcccagtgggcttcttgagctaaacaacttcactagtcaacagctggatgatgaggagacagcaatggagcaggacatagacagtagcacggaggatggaactgaacccagcccttctcagagctctgctgaacggtcctagtgtttggacacaatagtgcactttaaaacctgcttggttaccaagtgtccagggaaacccttgtattttgatgactaaaaagagcactttgcccgtacttaggctgtggaccctaaaacagcagtgtttcaacaagatgttgctgcaggagcagctttttaaaacaagataaaactcacaggggaatgtacttttttaaaaaaaaatgaaaaagaaaaaaaaaagctgcacatttacagtgacttaagacctggtcttctttctctgttggatcatggccggtgaaacagttttgtcttgcagtggaaagagacttcctgtgaatgtttctcaactggtttctgctgagcaaaataccatctaaaaggagaatgtgaatagttgtattttgaaatgatgtgtcaggaaaagttttttaaaaacttgtatgtttttgcaaatccctggaagtgttgaattggttaaaattttacattttctcagttcataattagtttataaacacctagaataatactggcattaaagaatccttgttggatggtagaaatcagatccctaaccagtgggaggtactttttgggtggcttgtgcattcttatcagttgtgtgctaatttattgtattgttcctttgtgctctaagcagcacacttgccttctatttatttaagtgtaaacatttcaaagcaggccgtactccttctgacaaatttcttgtaaaccaggattgcctacgctttccactgtcgtcgtctccccactttccctcttcctttaagaaaacttactaaaaaatgtttcattgcgaagcagaggaaaagaaacgttttcagacctaaaggaaatgtttggtcatgttaagaaaacaaattattcattcatatgatgctttcttaacgttgaaattgcacattcacattggactgagactttgaagataacttttacatacttttgtttaagcccctttgaaatgtataaaaagttcatttacagttctaaatgtaatgtttttaagccttctatctttttaggacacagtttgtttaagcaatatgttttggtcttgtgatcactgtctgtcacaagtagagtgaaaggggtaagggggtgggagggtaagagttttgacaagttgtggcaaaggaaactatacttttcatttttaaaaatgtaaatagaaaagtttttaacggttttatatagatttcactataaataagcattttaagactgacaaatgttgaactgtacatacatttatcagcataactgcccagtttttttggtgctgaagtactgtaagtagaattcatcaacggtctcctaatttttgcatctacatctggggggaaaaagctgtgatactatagttaataaattcccactagagtgacactgaagatttaaacacaagcattcataagatgcgctgatctctggtggttgtcactagttcttctaggtgataatgatttacccatagatggagctgttggatattattttattgtacaaattcatgtttaaaaaactttgtgactgtttctagttaagtaattttttaacctttcttgggtcatagacttctttggtaaactatgaactctcaccaaaaagatacacatgcaacatgttaaatacatgttagactttgcatacaattttaggggctcatgggcctctaagcctatccatgtattccaggttaagccctctgttatgatcaatccattacttacagattaagtttttataaaataaagtatcttttaaatattcatggatcaagtaacaagagcaaacttgaataaagttatgttctacatattttggcagcatagcatacctgtgtcccttgagaatttagccttcatatgtttctgcaattggaatggcaaataaaagtgctatcatctacatttttttaaagaattacaaatattaagaaattatcaagtgaaatttaaaatttttcttttaaaggtgttaattccaaatagagcatgcattcatttatttattcaacaaatattaattgagcatcttctgtatgacaagtagtattctgtgcactggggataccatagtgaacaaacaggaaatcctatccttatgaagtttataaacagggcttcctgctcatgaaatggatacaaggaatgaagacaggagaaaataagaacaatacttaggtttttttataaagtggatagatgatgatgccatatatggattttcagacatccctttactgaaagtcttagcattatatctattagtattccacatttaagtacataatttaaaagtaatttaaagtcatctctttgaaggatattaacaaattacaatgcaaatgctacagaatttttagaatcctaacaactattaggcagtgataagaaaaatccatttggcttaaagtaaactttaataagtgcctagtattgcagatgcagtttatggtgaacttagaggattaaaaaccaaagggggcttcattgagatattcacatgccataaactctcccatttaaagtataccgtttaatggttttagtatatccacagagttgggcaagccattaccacaatcaatttgagaacattttcattaatcacaaaagaaatcctgaaatgaaaccaccaccaccatcgctccagccctgggtggccactcctctactttctgcctcttatggatgtgccataagaaatgtggacatttcatataaatgagattatataa

SEQ ID NO: 1959 - protein, 1280 aa, Homo sapiens
MPVVWPTLLDLSRDECKRILRKLELEAYAGVISALRAQGDLTKEKKDLLGELSKVLSISTERHRAEVRRAVNDERLTTIAHNMSGPNSSSEWSIEGRRLVPLMPRLVPQTAFTVTANAVANAAIQHNASLPVPAETGSKEVVCYTSTTSTPTSTPVPSGSIATVKSPRPDNVVVLPSGSTVYVKSVSCSDEDEKPRKRRRTNSSSSSPVVLKEVPKAVVPVSKTITVPVSGSPKMSNIMQSIANSLPPHMSPVKITFTKPSTQTTNTTTQKVIIVTTSPSSTFVPNILSKSHNYAAVTKLVPTSVIASTTQKPPVVITASQSSLVSNSSSGSSSSTPSPIPNTVAVTAVVSSTPSVVMSTVAQGVSTSAIKMASTRLPSPKSLVSAPTQILAQFPKQHQQSPKQQLYQVQQQTQQQVAQPSPVSHQQQPQQSPLPPGIKPTIQIKQESGVKIITQQVQPSKILPKPVTATLPTSSNSPIMVVSSNGAIMTTKLVTTPTGTQATYWTVSPSIGRMAATPGAATYVKTTSGSIITVVPKSLATLGGKIISSNIVSGTTTKITTIPMTSKPNVIVVQKTTGKGTTIQGLPGKNVVTTLLNAGGEKTIQTVPTGAKPAILTAWITKMIVTQPKGIGSTVQPAAKIIPTKIVYGQQGKTQVLIKPKPVTFQATVVSEQTRQLVTETLQQASRVAEAGNSSIQEGKEEPQNYTDSSSSSTESSQSSQDSQPVVHVIASRRQDWSEHEIAMSPTIIYQDVSSESQSATSTIKALLELQQTTVKEKLESKPRQPTIDLSQMAVPIQMTQEKRHSPESPSIAVVESELVAEYITTVSHRSQPQQPSQPQRTLLQHVAQSQTATQTSVVVKSIPASSPGAITHIMQQALSSHTAFTKHSEELGTEEGEVEEMDTLDPQTGLFYRSALTQSQSAKQQKLSQPPLEQTQLQVKTLQCFQTKQKQTIHLQADQLQHKLPQMPQLSIRHQKLTPLQQEQAQPKPDVQHTQHPMVAKDRQLPTLMAQPPQTVVQVLAVKTTQQLPKLQQAPNQPKIYVQPQTPQSQMSLPASSEKQTASQITFEGRQPPTVTKITGGSSVPKLTSPVTSISPIQASEKTAVSDILKMSLMEAQIDTNVEHMIVDPPKKATSMLTGEAGSLPSTHMVVAGMANSTPQQQKCRESCSSPSTVGSSLTTRKIDPPAVPATGQFMRIQNVGQKKAEESPAEIIIQAIPQYAIPCHSSSNVVVEPSGLLELNNFTSQQLDDEETAMEQDIDSSTEDGTEPSPSQSSAERS

SEQ ID NO: 1960 - DNA, 4737 bp, Homo sapiens
ggaggacaagctctttggggctaccaaacagaagcagcaatgcctgttgtgtggccaacccttctggatctcagcagggatgaatgcaaaagaattcttcgaaaattggaattggaggcatatgctggagttatcagtgcacttcgggcacagggggatctcaccaaggaaaagaaagatcttcttggagaactatcaaaagttcttagcatctcaacagaacgccaccgtgctgaagttcggagagcagtaaacgatgaacggttaacaacaattgcacataatatgtctggacctaatagctcttcagaatggtccattgaaggtcgtcgattggtaccactgatgccccggctcgttccccaaaccgcctttactgtaacagctaatgctgttgctaatgcagctatccagcataatgcatctcttccagtgcctgcagaaacaggaagcaaggaagtggtttgctattcctacacaagtaccacgtcaaccccaacctctacccctgttccaagtggcagcatagcaacggttaagtctccaagacctgccagtcctgcctccaatgtagttgtcttgccaagtggaagtactgtttatgtcaaaagtgtaagctgttcagatgaagatgaaaaacccagaaaacgaaggcgaacaaactcttccagctcctctcctgttgttctaaaggaagttccaaaggccgttgttccagtctcaaagacgatcactgtgcctgtgagtggtagtcccaagatgagcaacatcatgcagagcattgccaactccttaccaccccacatgtctcctgtaaaaataaccttcactaaaccatcaacacagacaacaaacacaacaacacagaaggttattatagtcaccacatcaccaagctcaaccttcgtgcccaacattctctccaaatcccataactatgcagcagtcactaagcttgtaccaacgtcagtcattgcttctacaacccagaagccaccagttgttataactgcttcacagtcctctctggtcagtaatagcagcagtggcagcagcagttctacaccatcacctattcctaatacagttgcagtaacagctgtggtgtcctctacaccatctgtggtcatgtcaacagtagcacaaggtgtatctacatcagcaatcaaaatggcatcaaccagacttccttcccccaaaagcttagtgagtgccccaactcagattcttgcacagttccctaaacaacatcaacagtctcctaagcagcagttatatcaagtgcaacagcagacacagcaacaagtggcccagccttctccagtatctcatcagcaacagcctcagcagtctcctttgccacctggtattaaacctaccatccaaatcaaacaggagtcaggtgttaaaatcatcacacaacaggttcaaccaagtaaaatcttacccaaaccagtgacagcaactctacccaccagtagcaattcccctattatggtggttagcagtaatggtgcaattatgacaactaaactggtaaccactcctactggcacacaagcaacctatacccggccaacagtgagcccatccattggtcggatggctgcaacccctggagctgcaacctatgtgaaaactacgagtggtagcatcattacagtagtacccaaatcattagctaccttggggggcaagataattagcagtaatatagtttctggaacgactaccaaaatcactacaatcccaatgacttccaagcccaacgtgattgttgtacaaaagactacaggaaaaggaacgaccattcaaggcctcccgggcaaaaatgttgtcacaacgttgctaaatgctggaggagaaaagactattcagacagtgccaacaggagcaaagccagctatccttactgctacaagacccatcaccaaaatgattgtaacgcagccaaaaggaataggttctacagttcaaccagcagctaaaatcatcccaacaaaaattgtttatgggcagcaagggaaaacgcaggttcttattaaacccaaaccagtgacttttcaagcgacagttgttagtgaacaaacaagacagctagtaacagaaacattacagcaagcatccagggtagcagaggctggtaattcatctattcaggaaggaaaagaagaaccacagaattatacagatagtagttcctcttctacagagtcctcccagagttcccaagattcccagcctgtagttcatgtaattgcttcccggcgtcaggattggtcagaacatgagattgcaatggagactagccctaccataatttatcaggatgtatccagtgaatcacaatcagctacttcaacaatcaaagctctgttagaactccaacagacaacagtaaaggaaaaattggaatctaaaccaagacaacccactattgacctgagtcaaatggcagtgcctattcagatgacccaggaaaagagacattctcctgagagtccatcaattgctgtggtagagtcagaactagtagctgaatacatcactactgaacgcactgatgaggggacagaggttgcttttccccttctagtcagccatcgctcccagccccaacagccttcccagccccagcggaccctgctccagcatgtggctcagtcacagaccgcaacacagacttcggtggtggtgaagtccatcccagcatcttcccctggagcaatcacccacattatgcagcaggcattaagcagtcacactgcttttaccaaacacagcgaggaacttggaactgaggagggcgaggttgaagagatggacactttagaccctcagacaggtctgttttaccgatctgccctgactcagtcacagtcagctaaacagcagaaacttagccagcccccgctggaacagactcagctgcaagtgaaaactctgcagtgcttccagactaaacagaagcagaccatccacctgcaggcagaccagctccagcacaaactcccgcaaatgccccagctttccatcaggcatcaaaaactcacccctctccagcaagaacaagcacagcccaagccagatgtacagcacacacagcatcccatggtggccaaagacaggcagcttcctaccttaatggcacagcccccgcaaactgtagtacaggtgcttgcagtgaaaaccacgcagcagctccctaaactgcagcaggctccgaaccaaccaaaaatctacgtgcaaccccaaaccccccagagccaaatgtcgctcccagcttcttcagagaaacagacggcaagccaggtggagcagccaattataacccaaggatcctctgttacaaagataacttttgaggggcgccagcctcccacagttacaaagataactggtggcagttctgtgcctaagctgacatcaccagttacaagcatatctcccattcaggcctctgagaagacagcagtgtctgacattttgaaaatgtctttgatggaagctcagattgatacaaatgtagaacatatgatagtggatcccccaaagaaggctcttgccactagcatgctcactggtgaagcaggatcattaccctccacccacatggtggtggcagggatggcgaattccactccccagcaacagaaatgtagagagtcctgttcgagtccatccactgttggctcttccctaacgacaaggaaaattgatccaccagcagtgcctgcgacaggccagttcatgcgtattcagaatgtaggccaaaagaaagctgaagagagtccagcagaaattatcatccaggctattcctcagtatgctattccttgtcactccagctccaatgtggtggtggagcccagtgggcttcttgagctaaacaacttcactagtcaacagctggatgatgaggagacagcaatggagcaggacatagacagtagcacggaggatggaactgaacccagcccttctcagagctctgctgaacggtcctagtgtttggacacaatagtgcactttaaaacctgcttggttaccaagtgtccagggaaacccttgtattttgatgactaaaaagagcactttgcccgtacttaggctgtggaccctaaaacagcagtgtttcaacaagatgttgctgcaggagcagctttttaaaacaagataaaactcacaggggaatgtacttttttaaaaaaaaatgaaaaagaaaaaaaaaagctgcacatttacagtgacttaagacctggtcttctttctctgttggatcatggccggtgaaacagttttgtcttgcagtggaaagagacttcctgtgaatgtttctcaactggtttctgctgagcaaaataccatctaaaaggagaatgtgaatagttgtattttgaaatgatgtgtcaggaaaagttttttaaaaacttgtatgtttttgcaaatccctggaagtgttgaattggttaaaattttacattttctcagttcataattagtttataaacacctagaataatactggcattaaagaatccttgttggatggtagaaatcagatccctaaccagtgggaggtactttttgggtggcttgtgcattcttatcagttgtgtgctaatttattgtattgttcctttgtgctctaagcagcacacttgccttctatttatttaagtgtaaacatttcaaagcaggccgtactccttctgacaaatttcttgtaaaccagga

SEQ ID NO: 1961 - protein, 1308 aa, Homo sapiens; identical to SEQ ID NO: 1957

SEQ ID NO: 1962 - DNA, 3997 bp, Homo sapiens
agaggcaccgcaaacaaacccaattcctggtgtcccctagtcttggcggaggagccttttagatgagccccgaaaggccgggcagggaggacaagctctttggggctaccaaacagaagcagcaatgcctgttgtgtggccaacccttctggatctcagcagggatgaatgcaaaagaattcttcgaaaattggaattggaggcatatgctggagttatcagtgcacttcgggcacagggggatctcaccaaggaaaagaaagatcttcttggagaactatcaaaagttcttagcatctcaacagaacgccaccgtgctgaagttcggagagcagtaaacgatgaacggttaacaacaattgcacataatatgtctggacctaatagctcttcagaatggtccattgaaggtcgtcgattggtaccactgatgccccggctcgttccccaaaccgcctttactgtaacagctaatgctgttgctaatgcagctatccagcataatgcatctcttccagtgcctgcagaaacaggaagcaaggaagtggtttgctattcctacacaagtaccacgtcaaccccaacctctacccctgttccaagtggcagcatagcaacggttaagtctccaagacctgccagtcctgcctccaatgtagttgtcttgccaagtggaagtactgtttatgtcaaaagtgtaagctgttcagatgaagatgaaaaacccagaaaacgaaggcgaacaaactcttccagctcctctcctgttgttctaaaggaagttccaaaggccgttgttccagtctcaaagacgatcactgtgcctgtgagtggtagtcccaagatgagcaacatcatgcagagcattgccaactccttaccaccccacatgtctcctgtaaaaataaccttcactaaaccatcaacacagacaacaaacacaacaacacagaaggttattatagtcaccacatcaccaagctcaaccttcgtgcccaacattctctccaaatcccataactatgcagcagtcactaagcttgtaccaacgtcagtcattgcttctacaacccagaagccaccagttgttataactgcttcacagtcctctctggtcagtaatagcagcagtggcagcagcagttctacaccatcacctattcctaatacagttgcagtaacagctgtggtgtcctctacaccatctgtggtcatgtcaacagtagcacaaggtgtatctacatcagcaatcaaaatggcatcaaccagacttccttcccccaaaagcttagtgagtgccccaactcagattcttgcacagttccctaaacaacatcaacagtctcctaagcagcagttatatcaagtgcaacagcagacacagcaacaagtggcccagccttctccagtatctcatcagcaacagcctcagcagtctcctttgccacctggtattaaacctaccatccaaatcaaacaggagtcaggtgttaaaatcatcacacaacaggttcaaccaagtaaaatcttacccaaaccagtgacagcaactctacccaccagtagcaattcccctattatggtggttagcagtaatggtgcaattatgacaactaaactggtaaccactcctactggcacacaagcaacctatacccggccaacagtgagcccatccattggtcggatggctgcaacccctggagctgcaacctatgtgaaaactacgagtggtagcatcattacagtagtacccaaatcattagctaccttggggggcaagataattagcagtaatatagtttctggaacgactaccaaaatcactacaatcccaatgacttccaagcccaacgtgattgttgtacaaaagactacaggaaaaggaacgaccattcaaggcctcccgggcaaaaatgttgtcacaacgttgctaaatgctggaggagaaaagactattcagacagtgccaacaggagcaaagccagctatccttactgctacaagacccatcaccaaaatgattgtaacgcagccaaaaggaataggttctacagttcaaccagcagctaaaatcatcccaacaaaaattgtttatgggcagcaagggaaaacgcaggttcttattaaacccaaaccagtgacttttcaagcgacagttgttagtgaacaaacaagacagctagtaacagaaacattacagcaagcatccagggtagcagaggctggtaattcatctattcaggaaggaaaagaagaaccacagaattatacagatagtagttcctcttctacagagtcctcccagagttcccaagattcccagcctgtagttcatgtaattgcttcccggcgtcaggattggtcagaacatgagattgcaatggagactagccctaccataatttatcaggatgtatccagtgaatcacaatcagctacttcaacaatcaaagctctgttagaactccaacagacaacagtaaaggaaaaattggaatctaaaccaagacaacccactattgacctgagtcaaatggcagtgcctattcagatgacccaggaaaagagacattctcctgagagtccatcaattgctgtggtagagtcagaactagtagctgaatacatcactactgtcagccatcgctcccagccccaacagccttcccagccccagcggaccctgctccagcatgtggctcagtcacagaccgcaacacagacttcggtggtggtgaagtccatcccagcatcttcccctggagcaatcacccacattatgcagcaggcattaagcagtcacactgcttttaccaaacacagcgaggaacttggaactgaggagggcgaggttgaagagatggacactttagaccctcagacaggtctgttttaccgatctgccctgactcagtcacagtcagctaaacagcagaaacttagccagcccccgctggaacagactcagctgcaagtgaaaactctgcagtgcttccagactaaacagaagcagaccatccacctgcaggcagaccagctccagcacaaactcccgcaaatgccccagctttccatcaggcatcaaaaactcacccctctccagcaagaacaagcacagcccaagccagatgtacagcacacacagcatcccatggtggccaaagacaggcagcttcctaccttaatggcacagcccccgcaaactgtagtacaggtgcttgcagtgaaaaccacgcagcagctccctaaactgcagcaggctccgaaccaaccaaaaatctacgtgcaaccccaaaccccccagagccaaatgtcgctcccagcttcttcagagaaacagacggcaagccaggtggagcagccaattataacccaaggatcctctgttacaaagataacttttgaggggcgccagcctcccacagttacaaagataactggtggcagttctgtgcctaagctgacatcaccagttacaagcatatctcccattcaggcctctgagaagacagcagtgtctgacattttgaaaatgtctttgatggaagctcagattgatacaaatgtagaacatatgatagtggatcccccaaagaaggctcttgccactagcatgctcactggtgaagcaggatcattaccctccacccacatggtggtggcagggatggcgaattccactccccagcaacagaaatgtagagagtcctgttcgagtccatccactgttggctcttccctaacgacaaggaaaattgatccaccagcagtgcctgcgacaggccagttcatgcgtattcagaatgtaggccaaaagaaagctgaagagagtccagcagaaattatcatccaggtcaagactaaagaattactgagtccaggctaccccttagaagttgtattttatctccctctctccttgcaaggctattcctcagtatgctattccttgtcactccagctccaatgtggtggtggagcccagtgggcttct

SEQ ID NO: 1963 - protein, 1275 aa, Homo sapiens
MPVVWPTLLDLSRDECKRILRKLELEAYAGVISALRAQGDLTKEKKDLLGELSKVLSISTERHRAEVRRAVNDERLTTIAHNMSGPNSSSEWSIEGRRLVPLMPRLVPQTAFTVTANAVANAAIQHNASLPVPAETGSKEVVCYTSTTSTPTSTPVPSGSIATVKSPRPDNVVVLPSGSTVYVKSVSCSDEDEKPRKRRRTNSSSSSPVVLKEVPKAVVPVSKTITVPVSGSPKMSNIMQSIANSLPPHMSPVKITFTKPSTQTTNTTTQKVIIVTTSPSSTFVPNILSKSHNYAAVTKLVPTSVIASTTQKPPVVITASQSSLVSNSSSGSSSSTPSPIPNTVAVTAVVSSTPSVVMSTVAQGVSTSAIKMASTRLPSPKSLVSAPTQILAQFPKQHQQSPKQQLYQVQQQTQQQVAQPSPVSHQQQPQQSPLPPGIKPTIQIKQESGVKIITQQVQPSKILPKPVTATLPTSSNSPIMVVSSNGAIMTTKLVTTPTGTQATYWTVSPSIGRMAATPGAATYVKTTSGSIITVVPKSLATLGGKIISSNIVSGTTTKITTIPMTSKPNVIVVQKTTGKGTTIQGLPGKNVVTTLLNAGGEKTIQTVPTGAKPAILTAWITKMIVTQPKGIGSTVQPAAKIIPTKIVYGQQGKTQVLIKPKPVTFQATVVSEQTRQLVTETLQQASRVAEAGNSSIQEGKEEPQNYTDSSSSSTESSQSSQDSQPVVHVIASRRQDWSEHEIAMSPTIIYQDVSSESQSATSTIKALLELQQTTVKEKLESKPRQPTIDLSQMAVPIQMTQEKRHSPESPSIAVVESELVAEYITTVSHRSQPQQPSQPQRTLLQHVAQSQTATQTSVVVKSIPASSPGAITHIMQQALSSHTAFTKHSEELGTEEGEVEEMDTLDPQTGLFYRSALTQSQSAKQQKLSQPPLEQTQLQVKTLQCFQTKQKQTIHLQADQLQHKLPQMPQLSIRHQKLTPLQQEQAQPKPDVQHTQHPMVAKDRQLPTLMAQPPQTVVQVLAVKTTQQLPKLQQAPNQPKIYVQPQTPQSQMSLPASSEKQTASQVEQPIITQGSSVTKITFEGRQPPTVTKITGGSSVPKLTSPVTSISPIQASEKTAVSDILKMSLMEAQIDTNVEHMIVDPPKKATSMLTGEAGSLPSTHMVVAGMANSTPQQQKCRESCSSPSTVGSSLTTRKIDPPAVPATGQFMRIQNVGQKKAEESPAEIIIQVKTKELLSPGYPLEVVFYLPLSLQGYSSVCLSLQLQCGGGAQWAS

SEQ ID NO: 1964 - DNA, 4825 bp, Homo sapiens
agaggcaccgcaaacaaacccaattcctggtgtcccctagtcttggcggaggagccttttagatgagccccgaaaggccgggcagggaggacaagctctttggggctaccaaacagaagcagcaatgcctgttgtgtggccaacccttctggatctcagcagggatgaatgcaaaagaattcttcgaaaattggaattggaggcatatgctggagttatcagtgcacttcgggcacagggggatctcaccaaggaaaagaaagatcttcttggagaactatcaaaagttcttagcatctcaacagaacgccaccgtgctgaagttcggagagcagtaaacgatgaacggttaacaacaattgcacataatatgtctggacctaatagctcttcagaatggtccattgaaggtcgtcgattggtaccactgatgccccggctcgttccccaaaccgcctttactgtaacagctaatgctgttgctaatgcagctatccagcataatgcatctcttccagtgcctgcagaaacaggaagcaaggaagtagtggtttgctattcctacacaagtaccacgtcaaccccaacctctacccctgttccaagtggcagcatagcaacggttaagtctccaagacctgccagtcctgcctccaatgtagttgtcttgccaagtggaagtactgtttatgtcaaaagtgtaagctgttcagatgaagatgaaaaacccagaaaacgaaggcgaacaaactcttccagctcctctcctgttgttctaaaggaagttccaaaggccgttgttccagtctcaaagacgatcactgtgcctgtgagtggtagtcccaagatgagcaacatcatgcagagcattgccaactccttaccaccccacatgtctcctgtaaaaataaccttcactaaaccatcaacacagacaacaaacacaacaacacagaaggttattatagtcaccacatcaccaagctcaaccttcgtgcccaacattctctccaaatcccataactatgcagcagtcactaagcttgtaccaacgtcagtcattgcttctacaacccagaagccaccagttgttataactgcttcacagtcctctctggtcagtaatagcagcagtggcagcagcagttctacaccatcacctattcctaatacagttgcagtaacagctgtggtgtcctctacaccatctgtggtcatgtcaacagtagcacaaggtgtatctacatcagcaatcaaaatggcatcaaccagacttccttcccccaaaagcttagtgagtgccccaactcagattcttgcacagttccctaaacaacatcaacagtctcctaagcagcagttatatcaagtgcaacagcagacacagcaacaagtggcccagccttctccagtatctcatcagcaacagcctcagcagtctcctttgccacctggtattaaacctaccatccaaatcaaacaggagtcaggtgttaaaatcatcacacaacaggttcaaccaagtaaaatcttacccaaaccagtgacagcaactctacccaccagtagcaattcccctattatggtggttagcagtaatggtgcaattatgacaactaaactggtaaccactcctactggcacacaagcaacctatacccggccaacagtgagcccatccattggtcggatggctgcaacccctggagctgcaacctatgtgaaaactacgagtggtagcatcattacagtagtacccaaatcattagctaccttggggggcaagataattagcagtaatatagtttctggaacgactaccaaaatcactacaatcccaatgacttccaagcccaacgtgattgttgtacaaaagactacaggaaaaggaacgaccattcaaggcctcccgggcaaaaatgttgtcacaacgttgctaaatgctggaggagaaaagactattcagacagtgccaacaggagcaaagccagctatccttactgctacaagacccatcaccaaaatgattgtaacgcagccaaaaggaataggttctacagttcaaccagcagctaaaatcatcccaacaaaaattgtttatgggcagcaagggaaaacgcaggttcttattaaacccaaaccagtgacttttcaagcgacagttgttagtgaacaaacaagacagctagtaacagaaacattacagcaagcatccagggtagcagaggctggtaattcatctattcaggaaggaaaagaagaaccacagaattatacagatagtagttcctcttctacagagtcctcccagagttcccaagattcccagcctgtagttcatgtaattgcttcccggcgtcaggattggtcagaacatgagattgcaatggagactagccctaccataatttatcaggatgtatccagtgaatcacaatcagctacttcaacaatcaaagctctgttagaactccaacagacaacagtaaaggaaaaattggaatctaaaccaagacaacccactattgacctgagtcaaatggcagtgcctattcagatgacccaggaaaagagacattctcctgagagtccatcaattgctgtggtagagtcagaactagtagctgaatacatcactactgaacgcactgatgaggggacagaggttgcttttccccttctagtcagccatcgctcccagccccaacagccttcccagccccagcggaccctgctccagcatgtggctcagtcacagaccgcaacacagacttcggtggtggtgaagtccatcccagcatcttcccctggagcaatcacccacattatgcagcaggcattaagcagtcacactgcttttaccaaacacagcgaggaacttggaactgaggagggcgaggttgaagagatggacactttagaccctcagacaggtctgttttaccgatctgccctgactcagtcacagtcagctaaacagcagaaacttagccagcccccgctggaacagactcagctgcaagtgaaaactctgcagtgcttccagactaaacagaagcagaccatccacctgcaggcagaccagctccagcacaaactcccgcaaatgccccagctttccatcaggcatcaaaaactcacccctctccagcaagaacaagcacagcccaagccagatgtacagcacacacagcatcccatggtggccaaagacaggcagcttcctaccttaatggcacagcccccgcaaactgtagtacaggtgcttgcagtgaaaaccacgcagcagctccctaaactgcagcaggctccgaaccaaccaaaaatctacgtgcaaccccaaaccccccagagccaaatgtcgctcccagcttcttcagagaaacagacggcaagccaggtggagcagccaattataacccaaggatcctctgttacaaagataacttttgaggggcgccagcctcccacagttacaaagataactggtggcagttctgtgcctaagctgacatcaccagttacaagcatatctcccattcaggcctctgagaagacagcagtgtctgacattttgaaaatgtctttgatggaagctcagattgatacaaatgtagaacatatgatagtggatcccccaaagaaggctcttgccactagcatgctcactggtgaagcaggatcattaccctccacccacatggtggtggcagggatggcgaattccactccccagcaacagaaatgtagagagtcctgttcgagtccatccactgttggctcttccctaacgacaaggaaaattgatccaccagcagtgcctgcgacaggccagttcatgcgtattcagaatgtaggccaaaagaaagctgaagagagtccagcagaaattatcatccaggctattcctcagtatgctattccttgtcactccagctccaatgtggtggtggagcccagtgggcttcttgagctaaacaacttcactagtcaacagctggatgatgaggagacagcaatggagcaggacatagacagtagcacggaggatggaactgaacccagcccttctcagagctctgctgaacggtcctagtgtttggacacaatagtgcactttaaaacctgcttggttaccaagtgtccagggaaacccttgtattttgatgactaaaaagagcactttgcccgtacttaggctgtggaccctaaaacagcagtgtttcaacaagatgttgctgcaggagcagctttttaaaacaagataaaactcacaggggaatgtacttttttaaaaaaaaatgaaaaagaaaaaaaaaagctgcacatttacagtgacttaagacctggtcttctttctctgttggatcatggccggtgaaacagttttgtcttgcagtggaaagagacttcctgtgaatgtttctcaactggtttctgctgagcaaaataccatctaaaaggagaatgtgaatagttgtattttgaaatgatgtgtcaggaaaagttttttaaaaacttgtatgtttttgcaaatccctggaagtgttgaattggttaaaattttacattttctcagttcataattagtttataaacacctagaataatactggcattaaagaatccttgttggatggtagaaatcagatccctaaccagtgggaggtactttttgggtggcttgtgcattcttatcagttgtgtgctaatttattgtattgttcctttgtgctctaagcagcacacttgccttctatttatttaagtgtaaacatttcaaagcaggccgtactccttctgacaaatttcttgtaaaccagga

SEQ ID NO: 1965 - protein, 1309 aa, Homo sapiens
MPVVWPTLLDLSRDECKRILRKLELEAYAGVISALRAQGDLTKEKKDLLGELSKVLSISTERHRAEVRRAVNDERLTTIAHNMSGPNSSSEWSIEGRRLVPLMPRLVPQTAFTVTANAVANAAIQHNASLPVPAETGSKEVVVCYTSTTSTPTSTPVPSGSIATVKSPRPDNVVVLPSGSTVYVKSVSCSDEDEKPRKRRRTNSSSSSPVVLKEVPKAVVPVSKTITVPVSGSPKMSNIMQSIANSLPPHMSPVKITFTKPSTQTTNTTTQKVIIVTTSPSSTFVPNILSKSHNYAAVTKLVPTSVIASTTQKPPVVITASQSSLVSNSSSGSSSSTPSPIPNTVAVTAVVSSTPSVVMSTVAQGVSTSAIKMASTRLPSPKSLVSAPTQILAQFPKQHQQSPKQQLYQVQQQTQQQVAQPSPVSHQQQPQQSPLPPGIKPTIQIKQESGVKIITQQVQPSKILPKPVTATLPTSSNSPIMVVSSNGAIMTTKLVTTPTGTQATYWTVSPSIGRMAATPGAATYVKTTSGSIITVVPKSLATLGGKIISSNIVSGTTTKITTIPMTSKPNVIVVQKTTGKGTTIQGLPGKNVVTTLLNAGGEKTIQTVPTGAKPAILTAWITKMIVTQPKGIGSTVQPAAKIIPTKIVYGQQGKTQVLIKPKPVTFQATVVSEQTRQLVTETLQQASRVAEAGNSSIQEGKEEPQNYTDSSSSSTESSQSSQDSQPVVHVIASRRQDWSEHEIAMSPTIIYQDVSSESQSATSTIKALLELQQTTVKEKLESKPRQPTIDLSQMAVPIQMTQEKRHSPESPSIAVVESELVAEYITTERTDEGTEVAFPLLVSHRSQPQQPSQPQRTLLQHVAQSQTATQTSVVVKSIPASSPGAITHIMQQALSSHTAFTKHSEELGTEEGEVEEMDTLDPQTGLFYRSALTQSQSAKQQKLSQPPLEQTQLQVKTLQCFQTKQKQTIHLQADQLQHKLPQMPQLSIRHQKLTPLQQEQAQPKPDVQHTQHPMVAKDRQLPTLMAQPPQTVVQVLAVKTTQQLPKLQQAPNQPKIYVQPQTPQSQMSLPASSEKQTASQVEQPIITQGSSVTKITFEGRQPPTVTKITGGSSVPKLTSPVTSISPIQASEKTAVSDILKMSLMEAQIDTNVEHMIVDPPKKATSMLTGEAGSLPSTHMVVAGMANSTPQQQKCRESCSSPSTVGSSLTTRKIDPPAVPATGQFMRIQNVGQKKAEESPAEIIIQAIPQYAIPCHSSSNVVVEPSGLLELNNFTSQQLDDEETAMEQDIDSSTEDGTEPSPSQSSAERS

SEQ ID NO: 1966 - DNA, 276045 bp, Mus musculus
  misc_feature (1)...(276045): n = A, C, G or T/U
gactgtcatgcgtgtgtcatggcagacgccgtcagcaccagcctgtaagtgtctcagcctctgcacctgtaaaatgcacagacctcgttttaggaacaacgagaactaagaatgttcaccccagggcttagcctagaggccctatccagaaaacggttgctgtgattttaaattaactttgtcatcgaagcacagcaagagttacaggcagccaatgtaccaaaaaatgaaaagaaatccaatatattaaatagaatatgaaatgtaggatttgtaacacaaagttagactgctttagaagttgagctcacagcctggtggtggtggcagcggcagcgactgctacggtggtggcagcacacagttttaattccagcacttaggaggcaggggcaggcatatctctgagtcccagccagcctggtctacagagtgagttccaggatggccagggccacacagagaaaccatgtctcaaaaaaaccaaaccaaaccaaaccaaatcaaaccaaaccaaaccaaaccctgaagttgagcttagtaccacagcctgacctttctaacctcacgagctgttgctaggacacaaaactgcttatcaccattgtctgccacacaccatacaagttaatagtcgtaaaagctaagtctttttttttctatcattacttttgttgttgttgtttgagacagggtttctctgtgtagccctggttgtcctggaactcactctgtagaccaggttggcctcgaactcagagaaccacctgcctctgcttcccaagtgctgggattaaaggcctgcgccaccactgcctggcaaaatctaagtcttgctagacatggcagtctttgcattaattccagcactgggcagtgtgagcaaggggatcaagagttcagggtcaccctctatctactacacatggctgacagagaaatccctttctcccagctgcgaaactcccttgctatgttaagttgatcaacattaaatcttactgagccaaatacgatgaaaaggataaagcctgctttcattttgttcttggaagttataagatgagcaggagatttttaaagagggaatctcacaaggaagctgcaaatacaaaggagtgagcgaggcgggtacgggcgctcgctctgcaacctaagcagatcgcgatctaggggctgggggcatagctcacactgagggttcacctctcctgcctagcgtcctggctttagtcttgtctcccccattgcagaaacggaaaagtgtaggcataataaagccaggaagactggggaattcacatagaaccatcactaccatccagtcctcaggcctgactcaaatgtcatctgtttgtattttgagacttaggtctctatagctctggctgtcttggaactcaccaggtagacaagtctggcctggaactcacaggagtctgggattaaaggtgtgtaccaccagggctagcatcctttttcttaatgtttgttacagcaaatggatcaggttcaaggcgacgagttacttaattcttccttttcccaacacagttgctctattttttttttttnnnnnnnnnnnnnnnnnnnncccttcggttcagtagctaaggattccagtgcatacctccaggcctggctgcacctcctctggcttggattttgcccccttgctctaggcagtcagctacctgacacctttcttacccactctggttccagcctgtgtgccagggtcaccccccccccccccatgagcaaaccctccttatcatccctggttctgcctctctcctctgggcccttctctcactgatgctgtattgttcatgggttcgaccttgggctcctgtcttgggtcaggtttttttttttttttttagaagaagaaaaaggggaagagctgcctagggagttttgcctttggtatttttgttgctggtgggagtgaggttcttactgtctgctgaaattcaaagttctaaataatatattcttttttataaagattctaaaaataatttttttatttttagctattttcttttaatgttttgcctgtgtgtatctctgtgtgagggtgttggttcacctggaactggagtaacacagctgtgagctggcatgtgggttctgaaaattgaacccaggtcctccggaagagcagccagtgctcttaacctctgagccatctctcctgcccgagttttgattgtatgtgtacgagtgttttgcctgcatgtatgtaagtgtgtactgtgcacatgcctggtgcctgtggaggtcagaagaggttgcaagggcttctcgaactggaattacagatggtaggaagctgtcatgtggagggtctgaatcaaacctaggtccccccagaagggcagccagtgctcctcattgtgggcccatctctccagctcctgagcttggatcggtatgaccaagtctcactctgtccctcatgctggtatggaactcactctggacacctaaccgacctcaagttcttgtctcctggctgtttttgcagtggacaattgtcagtaactccagtcccaggggatctgatgccctcttctagcctctataggcaccaggcatgaacatagtttacatacatacatacatgcaggaaaacatatattaaattatttaatttaaaaaatgcaggtctagactgatcttggactttagacctctaggttagtcttctaatcactatgttatatatccaggcttttcctacagccaagatagtgttctcccccacatacaaacactgcacctctactccccccccacccttttttgagatagtctagttttgaattgattccacctgcctctctaccttgcacgtgccaggaatacagacctgcaccaccatgctatctcagcatgtcagaaattataattgtatatctgtgaatgcacactcgtgtgtgtgtgtgtgtgtgtgtgtgtgtgtttgtgtgtgggcatgcgcatgcctggaggatcaggaacaggctctctcctaccatctgggctaaggggatagagctcaggtggttgggcttgctggcagtgacctttaccactgagccatctcactgatgctcagagtaacatgtccaagacatcaatcagatcacgccactcccttatttaaacccttcaaccattgtctgcttcaaagatatgccaaccagtggtatggtggcctgcaacactcagaggactgcccctgacagatctctagcttcatcccctgcagtcgagtggccaggtcatggggtctgcagtgctaagatggagtggcctctgcctcatgaaactacatataggagcactgtaaactagagcgccacaagtccagtttcactttgagttttgacatgcttgttctttaagaactgaccctccttctcccgcttctcctcagcatggtgctccccacccattgcacctggccgtcgtctccttagttctgtggttcgtgccacatctccaagctgctgctcctgttcctttggccgatacccctccccttgctctcaccaacctctgcacagctgacccctctgtgcccttctggcctccccatgaaagcccattcctagggtctgtcccctctggacacctcttgctggatctgagctggggttctccatgccttacagtgtagtatttgttgtttctctggcttgccgcatgtccccaagctcctgtgcacacatcagcgcatttatagtcaggactgtgaaactatagggattggagcaagcacaagactctgcctgtgtggcagacaaaactttctgtgtgaccttggcaagttcgcttcctctctgtggatctggagaaactccatttggagagacgtggagtggaggtgttttagcttggctctggaattcccagagtcccatgtgttgagggctgctcctcagggcgtgggggaggaggttaggaggtagggcctagtgagggaagttagggcactgggggatggaaccttgagacacatttaggaaccacgatctttctcatttccctttcttaagtgtcttggcggtcatgaagggaacgagcttcctctgtcacacacacacctgccttgatgcactgcagctgccacgggcccaaataacagggctgaaagctggggcagaacaacctctttctggtattaaattgattgtcctcaggtatttggacacaatgatgagctaacatgtgtggtccttgtatgactctcccaacattcaagcatctatccatgctcagtgactttatcctgccatgtactcagtaatgcttgtgaagcccccccccccccccacagggtctggatgctagggattcagataaagagatatcaaaaacagaggtttggggctggagagatggctcagtggttaagagcactgactgctcttccagaggtcctgagttcaaatcccagcaaccatatggtggctcacaatcatctgtaatgagatctgatgccctcttctagtatgtctgaagacaactatagtgtacttgtatataataaataaatacatcttaaaaacaaacaaacaaacaaaccagaggtttacacagagtgtataactgaacacatggatatactgatgaagacatgtgagaaagccatgagggagcccagaggaggtagccatcagctcggatccaatcgggaacggaattggaagggaaaagaggagacgtgctatgcaggggcctgcccctcaggcaggcttggtttgtataggctccttgggaatctgccttctggtttcacaattctgactcggtcttgtgcaaacctctggcctgtgtcaccctgcacccccccccccccccactgctgctccagggctatctagccatcatcctgaaagtgacttcctgtctcccgcaaataaatgttcttgagccagttggtcaggttcctctcactggccctgtcatcttcctctggcctcctcgcctgacgctctctttgcagcctttgcttcagccaaaccatgctgctgccggggtgtgctctgtctgcctgggacactctgtctgttccctccttcctggacaacaccctgttgtttggatcgtcccttcatgggctctcattgtacttcacatgtcctctcagtcactgcagtcagcactaatgagtgagcagtcatctcccgccaagggtgctcttgacagcattttgctaagtgcgggtgtctcaggccggacacttgctgaaggtctagtgggtgacaggttgaacaagtgaagtgatggaggaggctctgctgagaagaagggatacatttaattcaactaagtttggtttgagtgacaatggcctccataggttcacacatttcaatcccgggtccccagcaggtgggactgtaagggaagggatagaagtctggccttggtggaggaggtgtgtcacagggggcgggctcagaggttttaagagatttgtagcatttgcactgtttctctctctgcctgtggttgtaaatggagatgtgagtgcccagctgtgcctcggctttaaaacttttcaagctctgatctttcctctagcctctgaagagccactcacgaaaagccactcacgctggtggggggtgggggggaggagagagctagagtttctgcctggccttcaaccttccagccctcgactgtgtgctgtacctggccactttgtcatctgtactctctacacttacatcagcagttctcaactgtgggtcgtgacccctgttggggggttgaatgacccattcacagaggtcacatgttagatatcctgaaaaccagatatttgcattaagattcataatagaagcaaaattacagttatgagatagcaatgacaatgattttgtgataggggggtgggtggggggcggaatcaccaccacatggggaactgtgttaaagggtctaagcatttggaaggctgagagccactgacttaaatacatacacttttctctgggaaatacacacagggctgaataaacatggtaactctaagcaatttaaagtgtttttttatgtatttttttattttgaaactgccacattacagaccaagttccaagaaatatttggctgcattagaataaaatagcatatatgaaaatagtcctaggatgtgtttcttgagcacttgctgtttccgacacccggcgcactatagttgctatgcattctcttgaatactttgcaagcagcagcttgagtttcccctagtgcttgagtcgtgtgagctgaaatgtctgagttggctcctgaatttgaagtatgcatttctggtatcctgcaggcagccctcgaggagctgagccccagggagggcgcgtgggaagaacagcttctgctcacatgcgctattggttctttagtacccttgtttcaatgtccccaccactgtgacttgtgtgtgtatgagtgcttgcctttgggtctccctcagcaccagcgcgagtactcactcagcgctagtactgagggatcaggctggaaacttgattttggagttgctcaggaaagggctgacttcctggcacctagcagaggagctctctgggcgactgttgactgaataaagtaaaaggctagatggcagaagtgacgacccaaggaagatgaaaagatcctgtgttctctctctaggtccatttttctttcttacatctgtatgtatgtatgtatgtatgtatgtatgtatatgtatgtttatgtgtaggggctcctccatgctacaggtgtatacctgcaagtcaagggacaacttatgaaagtaagttctctttctctctttctctctctctctctctctctctctctctccctctccctctctctctctctctcattccttccctctctctctctctctccctccctccctctctctctctctgccttaggggttccagggatagaactcagcccctcaggcttggcggcaagcacctttaccctcagaggcatctcactggcccatagtttcatttcccttgcgttgtaggccaaaatgatggcctggatattcaaataatttgaacctgtgattataaccatatttggaaaaaaggggtatttacatagatatttttttcttctcctctcccctcccttttccttcattctctcttttgtttttttgagatagggtcttatattgtagcccgtgctgacctggaactcactgtgtagtccattacattcatgacaactgtctgcatgttgctatgacaggcataagctaccctgcctggctctgtagatgtcacttaacaaaggatcccaagatgaagtatgaacggggcgtctaaaaccaatatcaaatgtccccggaggagaaagaagacacaggaagagggagaatgtcaagaggagtcaaagactgcaattatgcagccaaggatctgagagataccagaggctggaagaacaaggagggctgacaccctgaactgtgggagaatacatttctgctgttttcagctaccaagtctgtggtaatttgatagggcagccttggcaaacaagcacagtttagagacagaaatgttttctgtgaaattccactggatcttggcattgtatggcttgaactaggcatgatttggaatttcccaactgctcacttctcaacagatacctgacactgaggctccagccatgaggaactgctctgtgtttcaaaataagagactgtgacgtcaaagcaattcattcctaaggtcagatgcaactcatttcccctgaaagttaatatgcttaccatttattttaagatgggggcagggctatgggtatagctcggtaaagtgcattctgtccaactacccggatctgaataacagccccagtatcctgatgagaaagctgggcatggcagtgcagacctctaaccccagagctagggaggcagaggcaggaggatccatagggctcactggccagccatcctgctctactttgtaaattccaggctaacaagggacctccatctttaaacaaaacaaaacaaaacaaaaaacaacaacaaaaaaaaaccccaagatggacggttcctgaggaacgatacttgaggctgacttctgatctctgcacacacacacatacctgcatgcatacctgtgtacacaaatgtgtccacacacacaaacatgtgcacatactttgtttgtttgtttgttgagacagggtttctctttgtaatcctggctgtcctggaattcactctgcagaccagtctggcgttgaacacagagatctacctgcctctgcctccaagtgctgggattaaaggcatgtgccatcatgcccagatacacataattcttaaatagtgctagggattgaacccaaggccttgtgaatattcggcatctactcaaccattgagctatatatacatcttcccactcagtaaaagattttaaatccatctattatatgttggagtcttcatgggcacagatactggcccacctaccacccccctcagtgacaccagtactattcagcgcatggacagacagtggggagctgacctgctcagtgacaaagctagaaggtggcagtcagaatcccaaactgcctgcttcctgttgtgtctgcctctctgaacactgtgttctttcagctataacagtccaggtggtggagaaattcacactctatggggacgggggaatcaatattctgcaaaatgactcagtgctacttatagaagcaatggctgtagctgctattatggtcaaagaagtcttcagggaagggagggcatttgagctgtaccttcatattcatttctctattatctgcaagcaatgcggatccagggacgaatcagacaaggtcttttggttgaggaattcacatatgagtgtttgaattcggggaggctgtgtgtgttaaatgactattaaaagacaaagtggaggctgctgtggtggcacactcctgtagtcccagcacctggggagctgaggtagattgagctacatggtgagtggcaggtcagccaaatctcgcccctccccccgccccgcccccgcgcaaagcaagtaaacaaacaaagacaacacaatagaataagcaggtctgtggtaaaggcaagtttcctaattcggagtttcagagaagtcttttggaaggactcctgccccagctgaaatacgatggctaagcaagcgttagtcacaagcagtaaaggctttctaggcagagcataagcatcccaccagcagaggtgagacagtctcttggctggctggcacactttgtggctaagcttactagttatagaagctagaaggggcgtggacttgcaggtctgagtggatcactgaagagctggtggactgcccgatggatctttggtctcagtgatcgcggctcggtggcggctccccctctcagtcataaagcgtggcttttttttttttttttgtacgtggatgagaacacttcgggaagtcagaccatccatccatcccgactcagctggtgccaagcgggtccccgccctccactggaggctctgttaccatagcaactaggttagggcggaagtggcttagaggactgactctcactaatcaggtgactctccagacttctgcacgtgacacgacatcccaggcgcgcgctctacctaatcaagaagccgtccctgtttcactgacaactgacagcgctctagagcaatagcccacgaggcttccctaggagaccacacccctcaatagggaaagggccaattaggctgaggcaaagagaagttacgccccaggtttagcccgggtttgacagacgcaattgaggccatcctagagtccctccgcccctagccattgcggccgacgacggacgggcccactggccaatagcacgtcccttggccgccaccgggtcccgccctctcagaaacggaaccaatgagcacgccagctctgggccgggtggaggggttgcactgcggtaatatggctcttccttagccagcggcggtggccagcgcgggtgcagagctgctggggctctcggtgcccggtttctaggctgtaggggctctgcgaatcacagctcgggaggcagcggccgatgcgggaggactgcccacctggccgctcggcggctcaggggtccagatgagctcctgnnnnnnnnnnnnnnnnnnnngcccggtgcccctgccacccccgggcccgtccgccgcgctgacgtccggtgcccccgcgcgggccctgcatgtggagctgccgtctcagcaggtgagccggccgcgagccggggggcggagaaggttggcggggctcgcagggctgaggagggctgacaggaggaggagccccctccccggccgttcccgcgctcagacccccgcatccctccaagaaggcgccggggagccctgccccgctggccgccgccgcgctttccctttcgctccccgatcgaggagtcggttttctgcacttattcttagcgtttcgggtgcttccttccgctcctcctgaggaaggtatttgggacgttggggtttcctttccaatctcagatcctcatggcacactccactccctcgggtgagtgtctggaaggaggatttgaagtaaatattcatagcttgtatctcacgtgtgtgtgtgtgtgtgtgtgtgtgtgtgtgtgtgtaataaggacaagagaacactgactttgggaatctgacaaaattcttggcaacacccgcctatcagtacatcttccactggcctccctcagtccctcggggagactctgcaggaaccttagcattgaagaggacctggagaaactgtcagtcatggagaggttaccgagctgggtctgtgcaaagtgagcattgaatcgtcacaactccatgagatagctggttttattgtcccggtttctcagttctaggaacaagcttgctcactgcctctctgttagtgtttctggtggggatggatttccaaatacagagtctgactccagcttgtgctcagcagcaatagtttgctttagacttgagagcagctgctccaccacggtccacaggacgagctccctcagaccctttctgtaactttccatccttgcaagagacaggaaggagccacacaggagcgcagaggctatgggagagagggccaggcatagagtgcatcggaatgtaaaggaaagagcgatgttgcaccccacccccccaacccggtgccggatgaggtgccggatgagtagggaagcaacgttaactgcagaagcaaggctctgtagtaggagagaatttagcaaatcagaaggcatgtgcccaggttttgtagtgccattggagagggagtttggagaatattaggagttggaaaggaatgaggcttgtattgcgtttccaggtcgtgggagaggatgagagggtggctgggagagtagtctgtggattgggcattaatgtgaatttttgcctgtgtgggaggtggagtgtgagggcctgctgggagaagcaatagtgagcactgttaggagccgcctggagaaattgggcatctagatgggcatagtttagggaagctgtgagagcatggcgggttggagaagagaacaaggcatgttttcctgactagagcctgttctagcaataacggttcaaaactagaagaactaatccaagccaactgccggttcaacacagttcaactccatttgttagtgttggtcgagtttctagattggcatatagtgtcctaagtgtcagctgggtgctgcgtgaggatttggcatgccacttaaagttttttctgggcgtgtcgtccttggactgtgaggcagcctatgtaaaaacacattccttctgtggttgatattaattctgctttctagaccaaatgcacaagtttggggaaacaaatatttttaaaataggcgttttgttgattaacgtattaacttactctataatacaagttccaatagtattggcctccttctaccttatctgcttctggaaaagatttgggtttgcccaagaaagcccacaaaattatgtataaggtgtatggtttgtctttttaaaatttaatttattattattattattattattattatttaatcagggtctcattataaggcccttgggtatcttggaactcactatatagactaggctggccttgaactcataaacgcttgcctatgcctcctaagcttctgggagttgtggttgggactactggcatgtgcctctggtttgccttattttaatttatgtacctaatccggaacctttttttttttccgtggttgatgaatagctatggtctacccactcctccaggttggtctctaactcaaagaggtctgcttgcctctgctggtagaattaaaggtgtgtaccactacacatagtgcatacacattttgttattttaatgtgcatttctttaactgatgtatatatatatccccactaccggagataggatttctctgtgtagtcttggctatcctggaactcactctgtataccaagctggtctcaaactcacagagatccccctgcctctgcttctcaagtgttgtaattaaaggtgtgcatcatcactacctggctaatattttaaaagctccatttattgcctattggacagcatatcaagcacatggtctcagttttcctgcccagccttatgaattttaatatcattgcatatgtttaattgcttctttaacttcttctgtgaagtgatttttgtgtttttagaattcacttttctaattgttgtgctcgatttttatagtcttgaagaatcttttttttattgtctttttttgttatttgtatttgagagaagtaggttggaagcaatagccgttgttattattattattatctttatctttgtgtgtatgtgctcccgtttctgtgtgtttagggagcagaacactaggaggtcacaggacggcctcaggtgttggcttccaccttgtttgagaaggcgaatgttgttttctctgtggcatatgccaagcttgctggcctgtaagcttcaaggagtctcctgtctccatttctatagtagtttctggattacaggcacatgggttatctagcctggctttatgtgacttctagggatttgaactcaagtcttctcaacattcagggcaatgctagcccactgagccatctctcctggtccctaccgccgccgccgctgccaccaccaccaccaccatcaatgtaatcatgggattgaacccaggactttgcataagctagggaagtcctctgttttcttttactgagttattgcttcaacctgttacctttttttttttttgacagggcctcattacataaccctgattggcctttaacccacagaggccttacctgtttctgtttggtgctgggattaaagttgtgcactacacacccaacccttttctcaggttttgtttgtttgtttgttttgttttgttatttatttatttattttttccagagacagggtttctctatatagtcctggctgtcctggaactcactttgtagaccaggctggcctcgaactcagaaatctgcctgcctctgcctcccaagtgctgggatcaaaggcgtgcgccaccatgtctggctattttgtttgtttggagacaaggagtcattaaattgctcaggctggccttgagcttgatctgtagcccagtcaggccttgaattaaaaaaatatatatatactatcgatttatttattttattttatacttatgagtattttgcctgaatgtatagacatgcatcagatgtgtgtctggtgtttgcaaagtacagaagagggtgtcagatgccctggaactggagttacagtgggttgtgagctgccacgcaggtgccaagaattgaacctgggtcttctgtaagaacagtaagtgctcttaacctctgagctgtccatccagccttccatcttaatttttttttttttcaagtgtggagctcagtgccatcaagaacatcttggaaatgcttgacactttatcatcagccttgaagacccggcacacataataaacagctcccctttcttcccctccccccagcccgctcggcaaagctccctgtactttctgcttctgtcggtttgacctcctgggctcttcaggcctggggattcttaccctgtttgtgcttttatgcctgcgtgatttccctcagcatagtgatttcagggtcgtcatcattgttgtcgctgtcgtggtgggagttcctgtcagagcccctcctgtgcagattacccactgtgtgcagagtcccgagtttgaaatgctcatctatctagttaaagactcttgctttttcatcccttattttctgtgcataaatcccaggtggcatttagttggcccgcctcctttgacaatttcttacactttctttctttctttgatcctcttggttgttttgagtactgttttgtatgacgttttgtgtgatgttttgtgtgacttttgtgtgatgatcctgtcctggcaatagcatggattgtttttcatggttatgctggagttgtgggcttttaagagcaagactcaagagtgaagtgccatttttatcatagcagatgtatatatacactgttacactacttgtctccatggatttgaactttggtcctcaccagctgaggtgttaacctccttgccccacttcccccaacattgcacttctaataccaagtgtgggaatttccccagaaccatgtagtcctccaccgggtaccagttgcatggcccataattaaacttgagactagctacttagagttagtatctagtccacaggttaaaggcctagccccgcccccttgccattctgatgccaatctcaaacctgggctttccagaacttctggccaattggctgtaaatgcagggtatttccaatcctctaggttttgatcatctgctagagtggctcacaaggccaggaaaacctttcagtttattgatttattgtaaaggagatggggagcagccagacagaagagactggttaggagacagggtggatggaagcttccgtgtcctcaggctgtctgccctcagttcctgagatcgttgtgtagacatcatcagtggtttgttcagtcatcagcgtgactctcgaggggagtggggctgatagtccagccatgcaggactagacaaactagaaagtgctcccaggaaatgatttgggtcaggaaccatggtcaaacgcctaaaccggaaaagatttccctttgcgctccttgttggggaaattagaaggtaaaatgctgtgccagggactgaagaccaagatgagcgtttcttacacatcaccataggtagtgagcaggcggggctcaccagggcaccctgctggaaacctgcttgtgccaccccactcctctccacttcgctccttgggaccttctgtctctctctgtgaaggccacacttaaggagtgggtatttttgcttcccttgcccttgaggacagatatctacataaattatttgcagtgcttcagtggacattcctatccttttacagatgaggaacctagtgtctcgctaacttctcaaaagtcacaggaagtatccacctagggactgttgtttcttggcccccaatttcccatttactgtagccacccactccaacagnnnnnnnnnnnnnnnnnnnngtttgttcagtcatcagcgtgactctcgaggggagtggggctgatagtccagccatgcaggagctgccatgcaggactagacaaactagaaagtgctcccaagaaatgatttgggtcaggaaccatggtcaaacgcctaaaccggaaaagaagatttccctttgcgctccttgttggggaaattagaaggtaaaatgctgtgccagggactgaagaccaagatgagcatttcttacacatcacccataggtagtgagcaggctgggctcaccacagcatcaccacaggtagtgagcaagtggtgctcaccacaggcatccccacacagcaggcggggctcaccagggcaccctgctggaaacctgcttgtgccaccccactcctctccactgcactccttgggaccttctgtctctctctgtgaaggccacacttaaggagtggggatttttgcttccttgcccttgaggacagatatctacataaattatttgcagtgcttcagtggacattcctatccttttacagatgaggaacctagtgtctcactaacttctcaaaagtcacaggaagcatccacctagggactgttgttcttggcccccaattcccatttactgtagccacccactccaacagcatctgcccctagcaacgtgttgcttatgaagtggtaactcagtatttagtcacttatgtgacttcctttaaataatttactagcttacagagaggtgattggatagtgtcttacttagatacttaggtatctgtgaacagataccgtgaccaatgcaagtcttacaaaggtcaacatttaattggggctggcttacaggttcagaggttcagtccattatcatcaaggccagagcatggcagcatccaagcaggcatggtataggaggagttgagagttctacatcttcatctgaaggctgctagcagaacactcacttccaggcagcaagaatgagggtctttttttgtttgtttggttttgggttttttgagacagggtttctctgagtagccctgggctgtcctggaactcactctgtagaccaggctggccttgaactcagaaattcatctgcctctgctttccaagtgcctggggatcaaggggcatgtgctaccacccgcctgnnnnnnnnnnnnnnnnnnnncaattcccatttactgtagccacccactccaacagcatctgcccctagcaacctgttgctcacgaagtggtaactcagtatttagtcacttatgtgacttccttcaaataatttactagcttacagagaggtgattggatagtgtcttacttagatacttaggtatctgtgaacagataccgtgaccaatgcaagtcttacaaaggtcaacatttaattggggctggcttacaggttcagaggttcagtccattatcatcaaggccagagcatggcagcatccaagcaggcatggtataggaggagttgagagttctacatcttcatctgaaggctgctagcagaacactcacttccaggcagcaagaatgagggtctttttttgtttgtttgttttggttttttgagacagggtttctctgagtagccctggctgtcctggaactcactctgtagaccaggctggccttgaactcagaaattcatctgcctctgctttccaagtgctgggatcaagggcatgtgctaccacccgcctggcataggatgagggtcttaaagcccacacccacagtgacacacctactccagcaagaccacaccccttaataatgccactccctggcccaagtatatacaaaccatcacagataggattgagacactaaaaagatgaccgacgcagatagaatgcttaatgtggttgccagtggggtgttctttccccattacatgcttgtgattatcatacacttttttttttttttttttttgagacagcttctcactataaagtctaggttggccttaaactcagagatccacctgcctctcaaattctggggttagaggtatgcaccactatgtctggctacatatgcttgcttcttaaagccaacttaatgtttcttcttcttttttagtatgttgtgttggtaatgccagggcaggcacaaaggacagccgaatcgaattgggaacagatgtcttggtcagcacagtgctctgccctgtaccattattccatccattaatatgtatcaaacctctttgactcaaaggaaagagatgcactccatagttgtgtatctgtaaaataaaggcaccggaacttctgagcaggactggctcttgtagcaaaaccatgaggaagcgttggaagcttcctgtcggcatcctaaagtcattactgtacacgccaaaatgccatcaggaactcaagtgctttctgtgttgtaatttctttgttcttcctgtgaaaatgtttagctttgctttaaaaggaaaagctatgctcttattttgtgtttacttaaagatttcttcacaggatcacagttcttagttctggggtagaaaatccagaagtgaaactgactggaaatagggcagaattgaaagttgggtctgctgtgtggggctgaccaaattgacctcccaccgtgtgcggatgtgtagttttacttttacttaactttcttacggcagctccaggagtcctagagctcactgtgtagactaggctggccttgaacgcttagagaccaagtgctgagattaaaggcgttcaccacccagcacagtgggccacagatgtatatttttaatttttaataaactatgcagttctacctgcaagccaagacatacttctgctatggcaaacaagaaatcatggtcatttttagtgtactgggatatgatgaggaggatataatatactctccgattataaaattgggagtttagtttagaaaaattaaagacaaatctgttttaaaaatctggttgaaatatttgcatttgtatactttaggtttaatggcattagaactttcttatgtgggagagctatttatttttatttatttattttatttctttaaaaaattagatttatcttcttagttatttgtttatgtatatgagtactctatttgcatgtatgcctgcatgactgaagagggcatcagatctcattacgtatggttgtgagccaccatgcagttgctgggaattgaactcaggacctctggaagagcagtcagtgctcttaaccgctgagccatctctccagcccctaattttatttttatgtgtgggtgttttgtgtgcatgtatggctatgcaccacatgcatgcattgccctagaggctggaagataatgggtcccttggaaccagagtcacgtacggttgttaccatgtggtgctgggaatccaacctgggcttcctgcatgagcaagtgctcatcagtactgtaccctctctccagtccccccactcacccttctagtttgaagttgatatcgttgtccatcttactttaaggtggaaattcaagttttggaatagtgggactttacagacataaaaattaaaaaatgtgatgttctcagaggcaaaactatttgccagcccatgaatgtgctccagagacctcagggactttaacagagctctagggagtgcctgcctctccagcaccgggccttcccagctggtctgagcgagcgagtgcacagagagcctggttctataactcctctctgggctttgacatggtgccccccagcttggtttgactttaggctggaacaaaagtggagctgtggcattgttttaaacttcccctcaagggcagggctggacgctcactccgctcctgtcccagggctgctcttcctgttctggttctggtgctttatcaagcctgtccagttttgaatattttgaatattcctaggaacatcgaattctctacctccttaagtttcggaaagagccaacatctggtgactgtggtttttctccacgccagcagtttgattctgtgtaatatttagcactgattgctgtagacgttagttgtaatgttattaggcattttataaaactgaaagctaagcaagtgggtttgttgaggctaagataagtaaccctgaagttgagcattagaaccctgcactcagtggtccatggaaataggtagcatttcttcgtgttatggtggttagaatatcctaagaggtgtggccagaccttttaaaataacaagatatatcaggaagctgacactagtgtctgcctttggtttcagtccttaagttcttaagtaaggaaaaaagggaacaaataacagaaattgggaattgggcttcaggtttgttttcctatgaaaaacttggtgatctttaccacgactgtagtttgaactcttaagtaactccgttgtttatattagccaattctgtgtgctgagtgggaaagccatccgggtggccatttctccagtagatacttgtgaagtgccttttgactgtgtgagcactggacccgaccaggaatgtctgcattctgccagccagactgtgtctttgagaggatatggagtattttcttcttcaattccaaacattctttgtaagagagctaatctaggaaaccgttaaaaagtcttcaaaatgaaaatagttttatttagacttagaaggaatatttaaaatgtccctttcgaaaagaggaaagtccttgggaatattgttactacttaaatgttaacttcctggcccatgaggagcctgcccagctttgattcatgggtgtagttacagaaccacactcgttacttgtgtgttgtacacatagggaggtactttgggcttttttttttttttttttccatgaagtgactaaacagagtttattctatgtggaagattttcaggatggataggaaaataaagagcccgctgcctctctactctgttatctctgccaaaaaaacatcagttacttattaggtttgtagaattgcagagtttgttttctttttaaaaatattttaaattacataattattgatttatttctgtacctatttggtggcagtagaaccacttttgtgagtcacttctcttcggccatgtaggccctggagtggcctcgggttgtcagcctttgtggaaacaaccatcttgtccttctttttccccctcttttgctcttttttttgtttgttttgtttttttgttttttgtggcaaagtttctctgtgccctggaactcttgctgtagctcaggctggcttcgaactctgaaagatctgcctgcctctgcctcctgagcactggattaaagaggtctgtaccaccacccaggctcttggtttgtttagtttttaaataggatctcagcccatgctggtctggaattcgccatgtagtttagcgtggcctcaaattcctatcagccctcatgtgtcagtcaccttcatgcaggggtaacgggcctttgccatccttcccaggtgttactgctcgactggttataagactgagatctggctgaggggtttttacccctctgtcctactgacccattctctcacagttgatggtttgcctggctccttggttcagttctgcagctgtttacctggagttagtcttagatcttggaagttgaaggttgatccttataaaacttttgcttcagactgctgttgcaactcttaggctacctatacttcagatgtgagcagggagctcccatgcccctcgcccacagttcagttatttgcagcaatagctcctggaaatcagcaaaccagcttacttacagcacacagcactagaagtcccatggtaaggtgtggggaagggtctgggcttgtgtaacctgctgggtatcccaccctctctgtggccccattatgctcagctcacgatgtcctgcgtctgttgctcaggattcacagtaattctgttaactcaggcaggcttgagtaaacagtcctctctgcctcctccagcctccagtcctcctccagcctccagtcctcctccccattcaggtaggaagctcctgctctctaatcatgccttgtccgtttgtgcagaagctctctgcggcttatattccaatttagttagttgattgtgtgccctttgccgctcactttccgtggctcacattccaatttagctagctgaccacatgtccttttcagaacatctctggtattagctttctgttacaatgaagaaagaagaaaagaagaatcaattatgaaaagggtgggcttttggaaatttggagttaggaggcttcaatccatgacctcattgcttgcccttatggtgaaacagcctggactctgtgagcacagcagctcaaagctgtccctcctgactggggaaccccaacatccctttaagggtgcatgccctaaagactccgctaaatctgagctcctgaagtttgtcacacttcccagtggtgctatcccagggaccaagccattaacacacaggcctttgggaatgttctagacctggtctctggttcccttcagttcaggatccagctgccatccaggtttagtcaatttataaacaaagaacacaggctttgccttttaaaagtgtcaaggctagggatggtgtggctcagtggtaaatcccttacctagcttgcatgaagccagtgggttcagttccagcagagagagagagagggagagagagagggagagagagagagagagaagaggaaggaggaatagaagaagagagagagagagagagagagagagagagagagagagaaggaaggaggaagagagggagagagagaccaaacaacccaaaacccctcctgttgctgggcatggtggtgcacacttatgatcccagttcttggaactttttgagttccttttgcagtaatggtattcagaggtgttgctagcaaatcacaagtagttaggagataataaaatgatctggtttattacgatatggtatgcaaggagaagatttgtgattgctggaggtttggggccctgtgcttgtttatgaagcttagaatgagcggaacaagaggacctcgctacgtaaaggagcatgggttaaatttctaagaaaggatgcagccggagtaaggagaagtcaaagttctgccttagaaataccaagttctggcttacggtagtctctgcctgggatcagcatgtccatgctaaatgcatctcagtgcctcgaatcttcctaaggagttgtctagagcttgatagtaggacctgaactttagttttcagaatcggaagttgataacacaggcggaaccgtgtatgcctgccatgctcggaagacagtggatggacactgctggctgttgtaactgggtagaatacatgagacccaaaaggccaagaggcctcacaggttttgaagccgggtgtctcaggggcaagcttggtgcacccatctgggagatcaggcccagtttcacttttgcttcttactaacagtgtgaagtgagtactccctgctttgattcgggctttctcattaaaaaataagtctggatgctgtagatctctgcttccatcgaaaacatgcatttgaagtacccggtgacaaagaataagggatctacttgagtaggtcattgctgtgctaggacctagggtctgcatgaggaacacattcgctggtggtgcagggtcccctggcttagatgactttcagaggcctctctggtctgcagttctggaattctagtcattgactgttttgggtctgaggtctgttttccttctcttttctcatcaatatgaagatagctgagttctagcctgtctctttccttcagtcagccatgtacttcccttgacagccccgcccctaacagccccgcccccatctgtctatcagcttattttcataaagttcctcactgtttctgcagggccttcacacccattgctttattctccaacaagccacataggtgcacggatggacatgtctacactctgcaggaagggacacagccagtggttgctcactagcgtgtatagagcatccctcaagttcagggttactgtaacctgagctttcactgtgttgcacttctacagggaatggctgttacatatgtctccatttaaagatttattgcaagggggctggagagagatggcttttgggaccttgaaaagcagcttgttttctgggtgagctagggttaaaccccggagacccagcagataactctgcaaggtatggaaggaagtttgtcatgctcccagacaccaggctcctgacatgagggcccagctccttaattctgtggccattagtcaggcagggcaccgccccaagctcctggtattctgtctggactccacgcccacagttacctagcaacagccaggtaggcctggcccactatgaaaggggctgctggccccctcctccctctcttactcctgtttccctcttgcttctctcttgccctcttgttccccctctctctgcattcccttcctccctgcattcccttcccccctctctccacgtggccatggccggcctcttctctactttctcagcctctactaccctcttagctcccctttcagccatgacaataaacacctttaaaccatggactgcctcttcttattggacggcacatctaatatccttgtgctctcagacttgtttcccattaagccaagcaaactaaggactctcctctgtgggaaccagctggagcgctctcctgcccttttccctctggccagggctagtgcccgccctcaggcacccactctgttctcagctcttccaaggcattcagcggcacctgtggtgcccaagagtgagaacctgccgtccctggtctctgtgtaggctggggaccccagagccagctcttgcggtgtctgtggtaccctagaatccaagccgaactccagcagttcagcggggaactctgactatgcttcccaactcctggagcggggtcctgcagcttcccgaagccagcctggcagcctggggtgcttgcagtcagacttcctgtgtccaatcccgcctccatgagtggccctgtggtggaacagccgccggacaccattctaacccacaatggctcagcagttaagagcactggctgctcttctggaggatgtgggttcaattcccagtcctccagggcagctcacaactgttaactctaagatctgacaaccctcacacagacacacatgcaggcaaaacatcaatgcatgtaaaataacaataaataatttaacaaagagatttattgccctcttcacttttctttccccacaagacaaggtttctctgtttagcctggcttccctggaactcttatctgtatactagtctggcttagaactcacagagagccacttgccttagcctcgccagtgctgggatcaaaggtgggcgccactaccgatggactttttgtctttttttttaatgtaaatttattttttatttaaaagtagggaatatattcctatgctttctcatgtaaaatgtgtataagattttgtgtaatgcgtaaagatatcgtgtgcagtccccacccccccctcctggggcaagtatttatacttaaacctctccagccatcacagcattgcattcttttctctctgtgaagtgcaaatgacaacacaggcaccatacaaactattgaagactagtagtttcttgacttgtttcatcgacactacattatttattcttcatggctgtgcagtatttttcactataggatccataacttaaccaccggtgtgtatatttaaagttcgttgcagtttttctctgataggagccatactttactctgcgtcagttagcttcacgttactgtaacatacttaagataatcagctttgaaagaggagcgaaatattccgagagcttagtgtgtggtcaggtggcttttggtccatggtaatgctgcagatcatggcagggagcacttcctgtagggaagagccgcacacctggagactcagaagaggaaggggaggccctggagggggggtgtcccgctgccttttaaaagcatcactctggggaacaaatctgtagaccttgaaggggcatctgaggcaagaggatcaagagcttgagcctgggctgtagagtgaattcaaagccagtgtaagatgttatctgcttcaaccactgctaaagaagaaacaaaatccatgtctcatattgcatatctgcaagtatatttttagcacggacggagaagtggaattgtgtgttgaaggatgtgtgcgtttgttgtctggatgttgccaggttgctgaacacgtagacttttgccagttgcactgctgttggccgaatgcctgctttgcgggtgctttgcctccgagtgatgttagcccctctgactttcgccagctctactgaagcctcagtgcagttattttgtgcatgagattctttccacatttaaataccctgtatttcctctatgagctatgtattcacattctttcccacttactggaattttcttgggaatttctaggaatacctctgtgttagtgaagttgcttttgttgtgttaattaaaatactttcttcaggcttttttttcctttgacttcacactggccagttcatcacatactgtagccttttggttttgttttttnnnnnnnnnnnnnnnnnnnnctgcaccttcattagattctttccttgtttccctcccatacccatttcttgaggaatcaatcattttagaatagatattgtttagatctggaaatcccctatctcccccttctcctttcccccctgagggcctataaaaactgggaactctttcccccccaggtcgactcctctacccctgcgtgggatatgagttgtccccagagctctggctttccccaaataaagcctcatgtggtttgcaacaagctcggtctgtcgtgagttcttgggtgtccgctattgtcctgaggcctgagcgaggggctcctctcggagtctttcacttcaacctccttaagtgttgggatgatagatgtgagctatcatgttctgttgtcatgtataattttaaacgttaaatttttttttccttttttaaacttcttaaaatttatttacttgttagtgtgtgtgtatgtaaggagaaaaccaacactccaaagtggtttactaactgccactgtggcattttcacatctgtatgcgcgcacgtaaacacaaacacacagccacacaccctcacactcacctgtgataaatgcctgacctcagaagctttctttagttacagaaggagattctgtgacccctttcttctacccttgactctaaaggcacaccacgtggctgaagctgccaaagcaaagcaaagcaaagcaaagcaacgtagagtgtattgatttctgcagtcaataatagcacatataatagcacataaaaacttataaatttttatgagtattttatgtgtatgagtgttctttgcttgcatgcatgtatgagtaccacatgtatgcctgcctggtggatcccctggaactggagttgtaaactatcatcctggtgctgggaaccaaacccaggtcctccccgagaacaacaaatgcttttaactgctaagccatctcttcagcccctgagaaattctgtttttattttgtttttttgagatggagtcttgctgtgtagccctggctggtctggaactcacagatcagcctgcctctgtatttcaagcactgggattgaaggtggataccaccatgcttgctttaccctcatcagaagttcttattcctatctaactaggggtgcattttaatacttccataaagtatgtgtgccaccactgcctggcatgaatgtatctttggctgtcctggaactctttctgtagactcaatcacacagagattcacctacctctgcctcttcagtgctgagtttaaaggtgtgcactaccacgcctggctaattctggctagttttttgtcaacatgacacaaactagagtcatctgggaagaggaaactttagctgggagaataccttcatcagattagtccgtaggcaactcttgattaataactgttgtgggagggcccaccttattgtcttagttagaccatggcaactcttacagaggaaaacatttaatttgggctggcttacagttcaaaggtttagtccattatcaccatactggcagacatggtgctggagaagaagctgagcattctacatccaggtctaaaggcagcaggaagggggagtgacactgggcctggcttgagcatctgagactccaaaaccttgccctcagtgacacacttcctccgcaaggccacaccccctaatagtgccactccctatgagcctgtgggggagggcattttcaatcagactaccacatttattatggatggtgctgtagtacaaaaatatttaatacaatcctggcgtagagtttcttcctaccttagacctcttatgttcccggatgaaagacacacacagccttatatttgtaaatatgccttaggcagcacagtagctgggcagctgcctaccctccatgctgttagggtccactttcctactgataagtcccagttacttctgactggttactatgttccctctggggtgctcttaactcatgccagccctcatggtcacgtgtatatggttcagccatcccactgcagttccctcctctctcctgcacacacttcctcttccaagagagacatctccttcctccttcctcgtagtggtctcaagcctgggaaacttaaaccccgcccatgtctcttctccccagctatttatcagtcagaattaactaggggcagggtccctcagtgtcttacaccctctagtctttggggcaaacggtgggggacaggatccaaattagcaatatattacagtagcattaggccaacccactacttggtgccccctctaggaaagtggtcctgggttggttggagatatacactcacgcacacacacacacgcacacacacacacacacacacacacacacacacacacaagctaagcaagccacgggagcaagctagcaggcggtgttctttcatgctctctacttgagtggctgccttcaggttcttgctttagttctgctatggcttactgcagcgatgggctgggatggaagtgtaagttcccaagttgcttttggttgtggtgtttatccctgcaacagagagcaagtgcaggacagaatgctatgtgtgtgggtgtgagtgcacgcgaacggctactctatcgatctaatactttatcgatctaatactttacggactagttctcatttctctagaaattgtctttaattccattttcttttctttctttctttctttctttctttttttaataattttctttattctcaaacacataattgaatttgtcaccctgttaaagtctttagactcttaagtagactgatcctttcagtccttatcagtagtattttagattttttttgttatggaaattttcatgtaatctatctatctgtctgtctgtctgtatttaaataaagttgttacagctgtgtgccatcatgcctgcctgcttaggctggtctccctccctcctctccaagtgttctgagagaggtccttgctgtcctggaacttgctctgttgcttatgcttcctccagcttggtcctcctcctcaccagggttgggtctctggggttataagtgtgagaggccacaccagggttcacctttctagtccttagtaggattacagtctgaaatgagggagctccctgctttgttccccacggtgcctaagcacagtgtgtgcaggaagtatctatcggtgagagggaagaactgagctagagaagctgggagagaggtgacctgttcctcagagcaaggcggagggcagggaaaagggcaggtttgagccaagattgaaggtgaacagggtagaggtaagaaagcaaagaaatgccagctggtcagaggtctgctttgtcgctgcagtagagaagcccggtgcataatttagtagtactcagtaaatgacttcattaaagatattcttgggctgatttggagttggagagcagagttgatattccaggttccaggtgggaagccgtataaattgtgccagagaaagctccgaggtatgaacaagaactgtgaagtgtccatgggagtgagtgttggtcggttaagtctgtaacattgactctgggcaccattgcttagggccgggggcccaagcctagtttctttttttctttttttcttttttttcccgaaacagggtttctctgtgtagtcctggctgtcctggaactcactctgtagaccaggcaggcctcgaactcagaaatcccttgcttctgcctctcaagtgctgggattaaaggcgtgcaccaccaccaagtaacatgaatctgaatttacctgaaagaacctgcatcttagccccttacctgccagtgagcatggtcctagccagagaataaatgcctgatctctaaaggaatgaatggagggggccagagtggggacacagaccgcaggcaaccaggaccagttcctattcagatgctctgaaacatatcaccacatctgcaccacatctgcagccgccacaccaacagcagcaggtttctctaataaccagtaagctaagaatagcatttaatctgttaaagggtcataagcaaattaggaaaaaaagatgcagagggactggaaagcttatcaatatttactacccctaatctctgttatttagggagtataattagatttctttctaagaatagttaacattttctcccttggattttcatacccatacttagtgacctttttaaaatgatgttttccgttgtgtgagtgtattaccatttaagagtgtttacgaagcttttgcttttttttttttttaagatttattttatttatatgagcacactgtagctgtctttagacacatcagaagagggccttggatctcattacagatggatgtgagccaccatgtggttgctgggaattgaactcaggacctttggaagagcagtcagtgcccttaactgctgagccatctctccagccccccaccctttttttttttttaaaagatttattttatagtttttgcttttttaacagtactggaacatctcagtaattgctaagttgtccttgctccaggtgagcagtcatattttctccaattctggtttccttacttgtgtcagagaccaaaatagcttgtttaatcagttagagctctttagttacccatatctgtgtagtaagaagaacaacaaaaattccagtggcttaaaacattgattttgctcctaaatctgcactttgacccaggctttgtggaaacaacttgggtccactggttgtcacttttagaggctcagcggtggcggggctggctgccatctgagatcagctctgaggaacccagggtgggccctccatgcagctgcttgtcctctgtgctatatgataatgggactcccaaaaagagtatccaaaaggatggggaagctatagtgtatctgtttatgattttgagccattataatcgcttagaattttgtgggctgtagtgacagacctgctacatgtgacagagctgggaacataagccacactttttcattgtgtggcggtgtcacactgtactcaagagagcatggccacaggatgcacctgtgaaccacattcggaaatctgctgcatagtgcagtgttgggttttattctttctcctcctcctcctcctccccctctttctcctcctcttcctcttcctcccctcctccccctcttcttcctccttctcctccctgcctcctcccctcctcctcctcttttttctcctcctccttgtgtgtttccaaacaaggtttctctgtgcagttttggctgtcctggaactcactctgtagcccaggctagctttgaattcagagatcctcttgcctctgcctcctgagtgctaagatttttatgtctttgatgatggtcatgattgtgcattcttttcatgggttcactgagggtttatttcttttccctgtggtttgccttttcatagccttcccctccccctttttcactgccctcctccttttcattaggctttgcattagtgactgttgagtatattgttgatctgtaatggtttttgtaaattaaacaacttgaactcaaagtttgctttgaaaatacatcactgtcgacttgaggattgtgttagagtttttgttgtgataaaacatctggctgggcattctaattttccttctgtctgtccttccatctccttcttttggtaggggttcatggagcctatgctggtctcaaactcctgattgtctccaattaccaagtgctaggattacagacacgtgcctctgtaaggcaggcgtgtgtggcagcagcagtgcgtggtggcagtggtgtgtggcagaagctgttcatctcatgacagacaggaagctgagagagatagaactgagatagggacgagacacccctaaggatgtgacccagtgaccttcttccaggctttaccttctaaagatcccagaatcacttagaatatgactgggaaccaagccttaagtacctctttgggggcacttcatatccaaattatagtgggtgtcatcaaagttgtgtgtggggtggctttgttggatgatggagatttgtgagcacatcaggttgttgatgagcctgagcccgagagcttcgtaagcatacggagcctttccatacttgaggactagggaggcagagtaggcaatggccttttcccagggaaccatatctgtacacagggagaaagcctgggtgccatgcacatggacagaagatgtaggcccctgttggctgtcggcctgcgtagctgaacgtgggaactccctgtggtcagctggaagggagggcaggaagggtattcaacaaggagcccaaggtgcgtattagaaatgattttattattgtgtgtgtgtgtgtgtgtgtgtgtgtgtgtgtgtgtgtgtgtgtgtgagatctgtgtgtgtgtgtgtgtgtgagatctgtgtgtgtgtgtgtgagatctgtgtgtgtgtgtgtgtgtgagatctgtgtgtgtgtgtgtgtgtgtgagatctgtgtgtgtgtgtgtgagatctgtgtgtgtgtccaggccagaggacagctttgtggagctgtttctctcctccctcccttcgtgtgcctggggactgaacttaggctgtcaggcttgttcatcagtcacgttatgcactgagccatcttactgacctctgctgtctccagtgacttggctttgaggggtggacacgatatgcttggagttcggcactgacattctctgttctcttgagaaactgtcctgagatgtaaccctgactggcctagaacttgatagcagaccagactggccttggacatgtggtgatcctgtctgactcttgtctcctaagtgctagggttgtaggtatttgccaccatgcctggctctgccactgttgtctgctctgatatgatggggctagctcttcagcttatcttctgtgtttttgttgaagctcttctttggagcttttgtgttcccagggaggtgactccacataactcaagtatcctggttagtgaagctgaaggaagtgagccttgattagcagatagaggctggctggaataaatgagttactacttctatctatctatctatctatctatctatctatctatctatctatctatcttttttgtctatggcctcttatagttgtacaaatgatctggtatctaggctgaaccagcaacagagcatacatttatcataactatctgaagcctttcgggtgaggggaatcaactttctatttcgtttatgtcctggggctatgaacactcttttacaggtgtttttcacttacataatttttgtgcttttcaaaaatatttcagggtctgagaagatggactagttggttgccacatgagcatgagtttgggttcccagcagccgtgcaaagagctaggtgtggtggcgtgtcctcgtgagagtgtgcttcaatagtctaatctctgggaggatagagacaggcagacccttggaataaaatgaagaattgattgaggaagacactcaacattgagctccactgcatacacccacacatgcacacacagacatctgcatacacagagcaaaagtatttcctatttgtttccattccatgctcgtaactgctgtttgagtgagatgagaaagtttatttcctgtatggtggaggacatgctgagccataaatagaagactgggtcatgttatgggctcaacaaaaagtgcctgggacaacattggtttttttgtttgtttgtttgtttgttttttgtttgtttttttgttttttgttttttgttttttttggcactgctgctttccaaacataagaggactaaagactgaatgcctgttcacctgtggttatgttttagcggcgtctccgacatctccggaacatcgctgctcggaacattgttaatagaaatggccatcagcttctggatacctacttcactcttcatttgtgtgataatgagaaaatctttaaaggtaagggggccctccgggtcagtcatgtctgtgcgcttgtaacaggagcagcttgcagtgccttcttctactgcttactagaaagctcagtcatgctttctgaaaacatctcaagtgatgtctgctagagacatagctaatgggtagtgctctagggtatagccttactttggtaagtttgtctcccttttattaatgttactgttactattccagttgctaagtaagtttgtttccccttcatgaatggtatggatactattccagtccctagcatttaaaacaaatgatgggagttcagtatcttatattagttttacatttctttaacatatttccttttctagtgaccaagtttatgaaaacaagtttgtatcttcccatacttagatttatgtatatggggtcattttcagaagaatagcctggtttcttccaattctgttttgttttattagatttattaattttattttacatttggcctgcatgtgctcggtgcccgtggaagacagcagagtcatgagatttcctggaactggagttatagctggttgtaaaccaccatgtgggtgctggggattgaactctgatcctctgcaagagcaacaggtgctcttcaccaccgagccatctctccagcctccaatttatttatatattacattgtggattcttctagaagtggcggtttaaaaggagatcaattatttgattccagatcacagtcatctttgggactcacacagagtaggaagtggtagggtgccatggcttaggtggcatggtgcaagaagatcagggtgcagtgttattcctgccattggcttgggattgaaaaccaggaagacagtcgctctgcctcggttgctctctctcagcctctggcttcatgctttggaagaaagttttctggagatgaaatgaaaacaagaaataagaaggaaaggacatggctgttcctaggtatggtgcagaagaaggtttattctagataaaaaggagagcacagccagaggcagggacatctggggggagtccctagtgggcgtggccctgagcggggggttggggtgggggcacatgaggacaaggagaggagagaggagagccagaccaagaggccaggagggtaaagggtagatggaaaaaggccaggtaaccaaaacggttggaatacatagggcaggccagctggaaagacttagagtagggtgtggagtatgtcagccaggcagcctgtaattggactgagggatgcagggagaacctggcagccagcatccactttgataggttaaataggtaccttggcagcttgtctctggtttgagacccaacagtgataaccatgtcttataaactaggtgagacaggttttttgtttttttttttttttttttttttttgtggatcatgctgataagttgcctttattagactatgcaaacaaaagacagtgaatgccttaataagaggtagtgaactcttattttgaaaaaatattggggcaacaaagtactacttctggatagcgaagagatagacttggctcatagggaaatggtggtttataaaagtacgaggggaaaccctgtgttaggaggaggcatttaattttaattgggcatgttaatacaggaagccacagggggcttttgactgcttgatttcaatactttgatagctggaccttggtggtcagtgtcaggtagagggagtggctaaataagggaatacaccttggtggtagctttaggaatgcaacttactggtttttagcaaggcagaggggatggggagaagagcaaggcctgccagagccatgctcactatgcccaagctggctagagtccttttacttagtgtcttctggcaattttgaaaatggtggccattgttattgggattgcagtataaattagactggcttcttaaaaaagcagccatgggactgctggtgactgtgatgtaaagatggacacagaatgactgtcttttctcttttgtctctgacttcaatttgttttctccccctggctggcttagaactcactgcattgaccatgctgcccagaactcacagtgatctgcctccttctgcctccccaagtgctgggattaaaggtgtgggctaccacatctggcctggtgattgcagctttttgaaagtacttagattttcttgtggttaccaatgagaagaccattaatgtacacaggggacagcagtgccagggtcgcccacagtctacggcagtagagcctgtcacttcttcagaaaccccttagggctgtatttcccctggtgagctttggttaattcatctttgcagtgagatggctggtgacttgtgaggcatctttctgctccagccagtcgtgatggaacaaagtgttttctgcactcttgtaactcatcacaggagctggagagtcgtctagtaatcctggttaacgttacctcatctggttggctgtcatgacagtcatcagtatgccgtcgtccttctgtgacctttggtgcagagcagccacagaggctgattgcctctccttcctaaaccactttcctagctagttaatctcccagttttacaagatttttttttaaggatatcagaaatgctggcttctcagttactcttttatctcatctgaattcatagtagatcccaagaagataaggggattttttttttattttacatctttttagttatctataggagattgtctacatttaaggttgtacacacaaaatagtgttgatacatgtttggaacaaagcctgtgttggtgaatggaagctcacttttaatcctggttccctcttaaacttagaagttttaaatttgtagttttattttatttcggagaccttactgtgtaggccagtcttgcctcaaactcctggtagtcctggcgtccccagtgttttgactgcagctatgagccaccatacccagctagagggtttatctatttattttttaaaagatttatattttaaaatttcatgcttctgtctggggaatgtgtgaccaggcagtgcgggtgtctcagaggcaagaagaaggtgtgggacctcctggggttggaactagtggatgctgtgagtaggctggttggtgaactcctgcaagagcagtttgtgctcttagctgctgagccggctcgccagcctctcccgtctgttttagccatagttatcttctcccctgggaagtgctcagggcctgtcctcttccgactaccagccagcaggaatccattggggcagagccttgcagtcctttgctctcacccaagacccatcctcaggtggcctttcctctgaggtcatgtcctctatccagttgcctgctctgtgtctcctttggagtcagtaggtgacttaaacttggtatatccaagactgagtctctgctgtgccagctcactgaccttatgttcttctgtcagaaaatgacaactgcatttccagggctacaacccagggccatggtggaccgccttctctctctagttcccgcagccagcctttccgcaggtacttttctggaggcttctttgtacctctgtgccactgccctcccttgcatggatggcagaaggcccaccgactgacagtctgtctgcccacgcatgccctctctcccagctggtcttcaacccagactccttgcaaatgaaagatcatgctatctgtcgccaaaaaatgctggtgtggtttcttagctcattccgaataaggccatgatcctcgtgtcctatgtcactgctcagaacgtcctgctgctcgtcagcgtttgctggtagtgaactatagaaacgatccctgaaggcctagcctttcttctgctttctccgctccagccatgccgtgtcttgactgtctccttttcttctgtgtaactaatgctttacacttggtctgcactttggcctgaacaccttcctccaggtacggagctggcaagcaagcccttccacattcccgctggcctttactctgcatgcttctcagagccactctgatgctgactaaccctttcacaagttctgaccttgtatttgctgggctttttgtttgttggttgttgttcctttgtttttttgttttttgtttttcttaattcttccccatagttattttacgatcacctggcattggtgtgtttagttaacggctcgttccttcctgtaggagtagggtccacaggaacagacatttttatgtccctttaaccactctgactctaataaccagaagcctctggttattagaagatgccgggtgcatcttctctctcctccccttccctccatttattttcagtttaatttttttgggtagataatgcagtcagtgtttcaaaacataagtggaggtttatgttaaaactacctttcatcaatgtctcatcaagctgtttccctttctgtcctggtaactgctactatctttttcctgtttgtctttcctaaattatttgcagaaacagaagaaagctaagatcttcttcctccattcccagcagttcccttgcggatggcatgtgtgcgcagatactgtgcgcttggcatttttcactttatatgtctgccctagagggcatctctgatgcactgcttctggctttgcattgactagctgctctctggtggtgtctgtggttggccctgcggaggactttgaggttgttttgtctcttgctgcattggctaacttttactagtgcattgttttgtgttagtcagcccttagggtaagttctagggagtggagttcttgggacactgagaaagtatgttctgttttggttggtattacaaaattgtattgggtgggaattgttttatgtgtgtctttccctatagccttattagtgtaagcccttgaattcttgttagtcagatagttgaaaaatagttttgccatttaggttaagcttatatttctcctcttaggagtgaggtcgaggctcttcataaacatttactgaatgaaggagtgtagcatgccagccagcctgggccattggcattgcgctctgcagactcttcgtcattggtcctttaggtgtgagcacggctgtcttatcattaaggtgtgaacatggcttcctggtcctttaatgtgagcatggctgttctggtctttaggcgtgggcatggctgtctagaaaagctcttgtatgtagtgatccaaggggacataaggctctgataggactctttgaggatctactttatgactttattcacatgaaaagaataaaatgagtagaagtttattaatagacactgtggctcataaggtgtttttaacctagtatttaatttatgcctcacaatgccctgttctctcctgggaagagaaggagatgataattgactattgatgactgcataggtcattaattttttttctgttttaaagatttatttatctaatgcatatgagtacaatgttgctgtcttcagacacaccagaagaggacatctgatctcattacagatggttgtgagccaccatttggttgctgggaattgaactcaggacctctggaagagcagtcagtgctcttaatctctgagccatctctccagccccgcataggtcgttaatattacacgagagactgagggctgcgtgtgctttagtcttaaaattgcgtatccattgttttcaagccctgtttctgttctgctactttagacctaacaggatggtggcatagtgttttggagatcggctcacaccccctgatctttctcttcacagggactatggcccttgtgttgggctccatccttttggtcagcctgtctagtttggaacactaatggacatgggaaattgcctagtttggcttatctacagagtcagccactcaacattttagcagaaatgaccctgttcctctcttagcagtggagagctgttctgtgagaatgctggacttaggtgcttgcaggagaagctgaataattcttttttttttccaaaagaattaaaatacgcctttgttgtcttctcactgactttgatttttatatttaaatctctttagtttgtcacagggattgaagagaggcaagtactccaacagggccgtaatgctcccagcatagtttctcaccacctttaagcaatatagtcttgctagacagtggtggcgcacgcctttaatcccagcacttgggaggcagaggcaggtgcatttgtgagtttgaggccagcctggtttgcaaagtgagttcctaggacannnnnnnnnnnnnnnnnnnnnnnnnnnnnnnnnnnnnnnnnnnnnnnnnnnnnnnnnnnnccccaagcccccccccaaaacccccacacccccctaaaaaggcaatacatttttgtaacaaagtaaagcaaaatgagtatggttaagtaaataataaataacatgtattaactcgaaagtaaaaaatactgtgtttaaaaaaagcctcagggctaggactaaaggtggactgggggagcattgacattgtatgtgtgaggccctgggtttggtccaagaccacagacagtgtcagtaagaacaaatcccaataataacagaaccagacaaatgaaggcacagggagactcctttaaaatcttgttttgtttgtttgtatgtatgtatgtatgtgtgtgtgtatgcatgaaagtatacatgcatgcaagcatgtatgacggatatactcgggatcctgtggtaagtggctgcagtgtttgatgaatgtttgggagttagagttgtagggagcctgggaaatgagtcttccttaagtggagggatcgcacagtttagtcagagtgacttgtctgtcatagctagcgtggaacccatttgctagtgggtctcgcagttttgtttctaatggtacttctctaagccacaccgtttaggttatatatctttgaaagactgtttatttctagcactatctgaaagatgctaaaatccatagcaacgtcaggatattcccttttaaaagtatagaattttcttattccatactctagggatttatacctgggacacattttatataccaaaatatataaatcccgcatcccccgtccctgctctttacagggcgtggctggcacgccccgccccctgtggggccaggcttcccctcccccagaagctttcctttgtaaatcagacatttggtctctgtccctgcagtgcacacactctttctctctttctcttcccccttccctctgtctccctggccttgttctttgggcccagtgaacccaccagagagctgcttcccaatacacctgcctttaaggatggaattggctcatttaatcaccggagataacttaccacagttattcatgattaaaaaaaaaaaaaaatcaaaccaccattcagctagtgcatgtaagtagcctagagctgtaacctaagataaacattgctggcttaattagaaaaattggaccctgctgtaaatcctctggcagaacctgttcctgcatttaatgtgttgtgagatgttctcaaaacatacagtaagtgcccttttgtgtggaagatgagggtgaagtagcacaggcagcctgtccacaaggaaatgccttaacaccagagctgctgggagggagagcttccctgcaagggtggacatcagtgcactccctgggcatgtcattgttcattcataaaaacagaattggctgagtgtctgtccttgtgccagggacagttctgagagatgaggacacggtagttatagggtttgggcccacagtaacaaatggagtgtctaggcacacattgcaatcatggcctttgtccatgtatcgtgcctcagttcatctcaagtaccagtagtgtgtggatcacatgtgagaaacactgtcctgtagcaacaggggactccaggagtccctagggtctgcattgacagtggcatggagataatctgggtgggtggctgcagagcactggagggttgtcgggaatgtctatcaggacctatagcatagttttattttattttatttattttttggttttgtaacatttgatgctatatatgaaggtttatggaatcatgaacattttaaaaatatttatttatttatttaatgtatatgagtgctctgtctttacacacaccagaagagggaatcagatggttgtgagccaccgtgtgggtgctgggaattgaactcagggcctctggaagagcagtcagtgctcttagtcatctctccagccctggaatcatgaaattttaatgcttgcagaagaacttcagctatccaaattttccaagttgagaaagggcctgacaaagttgaagaggtagaatgttagcacaagcacaaataaagcttgggtcacatggtttctaaattggtattcattctacactcctatgagggaatgttctagaggtgcctgaagaacagagagaatcagtcatagaaactggaaatgggggatttgggagtcagaggttaaagtacttgctggacagatgaaaactggagtttaaattcccaggacccacctggatgcagggggactgtggcagcccacctgtaatctagccccagaaggcagagatggatccccagagccagctggctggccacacgagctgtgtagaggaggttttggcttgattgagatatcctgccttaaagagaatagggaaagaatcctgacctcatctcagccccctgaaggacccccccgcccccccctcattgtgttcacatgaaaagaaaggagtgagtagaaatgggaaaaggagaacatttggatttttaagggcttaaattagaatgtgctgcagaaggagacaggtaacaattccgagactaaatctgaacaatttgtgatgtgcttcactgatgtttttcctccttaagagacttttacttaattttggttttctattctcattggtaaagatggcaggcgctggatcagtttagacgccttcctagagcgccagagccttacagtgcttagttaacgagctgcttgtctttcctgtcacttactgttgtttttcttcttttccagaattttataggagtgaagtgattaagaattccttggtaagtttgtttcccaacaggtacatgtgacaccgcgtatatccctgattcttaagatgtgagtggtttgcgttgaggtctggttctttggttatgtgtggttcatgcacagatctgttaatgttcagttgtttctgattttttaaattgttgtaaactttaattttgcatcattttcatttataaaaaatttaatgatttttgattctgtatttatttgggtaaaattcataaaagtagtttgtacaggcctctgtatacaggactaatttctgggtgataacagccttgctcagttagctggccgtgtctagctgggcatgggtacatacctgtaatactagggtttgggaggaaatagccaggagggttgtgagcctcagctacacagtgagaccctggcaccaagaaaccaaaaccaaaacaacgagctaccgagcatcccacatctctccatctggaaagggtcgttgtggaattgtgtgtatgtgtgaggatgcacaacggtgctgctgggcagtttccctgattctgagttttgtgtgaatgaagtaatgcagtaagcccctggtgactggcgcccacctgtgtgttggcttggttgtcaggatcagctggccctgtgtgctgtgtttgatttgtttgtgtgtattctactgagtgaatataataggtgatcattttttcccctgttggtgagcatgtttgacttctggttcgagccagcgtgcatcctgctgctgtaaatactgccctgggtgtctgctggcgcatgcatgcttttctctgcagcctgtagtcttcagtcctgtggatacacacccgatcagccagggcttctggctggttccacaccattgctatttcatttctactcactgcattgctgggagaattctgattatattattatgaacacttgatgtttttaaaaatttagggagctggagagatggctcagtggttaagagcactgactgctcttttcgaggtcctgagttcaattcctagcagccacatggtggctcacaaccatctgtaatgggatccaatgccctcttctagtgtgtgtctgaagacagatgcagtgtactcatataaataaaataaataaaaaaaattttaaaaaaaatttagatgttgatgcaaatcatatacaggacttttttgcttttgcaatcgaggcagatattgtaaagttagaatatctagtgccaaaggtatggttaactgaaaagacttgatagcagttacagctttttaagggtgtgcttgtaggcacagggcttccagaagactgccacctggtggttaaatacttgagaactttagtgatttctcccccacacctctctgtcttcctctctccttctccctttctttcccccctcctttcctctttcctcatccctccctcccaaaagaaaccaaatcaaaatggagatgggtgggagggatacggatagggagggagggggacggaagtgtgtctgcaggttgtatgccagagtcacagttcttttccacattcctttagttaataacagttaatggggataattccgctttgtttgcctctgacttcagctagacataccttcccccaagttattattatttctgttgttattgttttttttttagagactgtatccgtactatgattgacaggccattagagtgactaaaatgattgaaaagtaatagtgggagtggctagccagagcccccaaagttgatttgatacccagagcgggtcggtgtgtggagattctctacacgagtctctttagtgaagaggtgtgattgtgaccaggttaggtgagttctgtacattatttcccacggaagacaatgcttcaaggtagggtgtattcttgtttcaaagtgagggaacaggccaggaacttgatgtgggctgcacacagcttgtaacaaataaaactgaagttctgaggctctaaccgcacacacacttccttcagctgtttgacctagaggtcagtgagccttactattgcataaacaaagcccagagcagacatgtttagagaaaacacgagatacaacttagcagagccatcactggcatcatgactggagttgtttttcagcagagatgggaagatgggcaggatcagtaggtctttgtgagttactgactgcctgtggggtgctccagtctctctccagtgcctctgtggaactgcggctgaataaattaacatttgagctgtctctgtgttgctcatgccaaaactgtgaccctggggtaaataactgcatcaccatcaatcttccagcttcctctggctccacagttgggagcgaggctgagctagctcaggtagaagatgccgcgaagactgtaggactctgatttacttcggggttgggggagcagtcagggaaggttgctggcagtaagtcatccctcagctgggtcaggaggcctgagctgagctgaggaagggcagggagggagtttgctgggcttctactaattaaaaaagccagcatgaattgtaaagagatactctgaatatgctttttaaaaattggtacagcttttatacatttttagttgtgtttcttgtgactatgtagttgctattaaacagtttagagaaacaaatgctggtaataaacaatttttaattttctttgggatggggtttttcagtgtagtcctagctgtcctggaacacactatggagactcagaggagcactgcgtctagtgttaggattaaagccatgcaccaccaacccccagctgataaaggctttttaaaactcctgataagaggtagtgatcttatgtcctctggttggcaatttgtaggcagtgaacttttaagactatagcagtcctagtagtcagtggatgtagactgggtcacctgacgttactatttgaacagtctctttcacctcaaaattgagttggtatgtgtaggtgaaagagaaatttaaaaaatcatatggatcaaaaatgttgggcatgggggctggagagatggctcagtggttaagagcactgactgctctttcaaaggtcctgagttcaaatcccagcaaccacatggtggctcacaaaccatatgtaacaagatctgacactctcttctggagtgtctgaagacagctacagtgtacttaaatataataaataaataaatcttaaaaaaaatattgggcatgggggctggagaggtggctcagtggttaagacactgactgctcttccagaggtcctgagttcaaatcccagcaaccacatggtgtctcccaaccatctgtaatgggattgatgccctcttctggtgtgtctgaagtcagccacagtgtactcatataaataaaataaatcttaacaaaaaaatattgggcagtagctatgaatagatggtaggctgtgtctgcatgtaccaacttgagaattctcccttgtgtactggcgactgttttgtaagctcacagagaaaagtctgtggggagaagattgtcagaacactgctgtgttagcgtagcagcctataagggagcccaggccagctgtcttcttatgaaataagccctggttcctccaagggcaggtctcagcagagactggtacactggaggatattccgtaccccacccccctgaccctgtagcatggatcctccgaggcatcttcactttggaggagagtggttacttcatgctttttcttaacactttgtcacatgggtggttcaggatctggactgatgctgttttaggttctagagcccgtatttgttgtgatctcatagggagttaagtggccgcctttcaggcagtgtgagccagtgcccgcctttcaggcttttgactgagatcaaggtagtcaagatgtcacttcctgccccccatttaaaaatttcaaaaaaaaaaaaaaaaaaaaaccaaccaaccaaccaacgaagccccatttcactcctttatgccaggcatggtggtgcaccactttaaattctggcacttgggaggcagatgcaggtaaatctccacgtcatggccagcgtgggagttgcagcaatcagctggtactgtgaaacacagtgagaccatgccttgaaaaacagaaataaacaacgaataaaggacgtagtgcagggtgtggtagtggacacctctaataccaacaaatgggaagcagaagcaggcgaagctctgttccaggacagtgtgatctgtatcgtgagttctgcaacagccagaactacatagaaaagtcctgtgtcaaacatgcaaacatacaaacaaacagaagaggaatggaacacaattattttctcctgtgtcgccttccagtcactaacacttcccaaagagaccagcaagctcccccttccccggttcccacagcagagtacctatgcctagcttgaccctcaagtggcaaatggnnnnnnnnnnnnnnnnnnnntgagtgtgtgtcctatgttactatgtctgtgtctgtgagtgtgtgtgttagtgtgtctctgagtgtgtgtgtgcccatgcagagcgtcagtaatgggcttttctgctcagctgtagaagacatttgtcaaaagattgcagaggtttctgtaccagctctgtcccttagacagtgtgaggctctggagttgttccagatcctagcccaaactcagtgtctattgcagtcattgtggtgggactgtggtatcattgtgacgtcagtttgtacgtcctcatagactgttctgactggacacctttcctagtattgattggccgttttgatgatctcacgttagaacagtgggagaacatgctagctaatgccaagtttaagaataagcaaacctaatgcaaggatttcagactttaagtaattagagataaattttttttaaaaacacgtttatttatttatttatttattatatgtaagtacactgtagctgtcttcagactctccagaagagggcatcagatttcgttatggatggttgtgagccaccatgtggttgctgggatttgaactcaggacctttggaagagcagtcagtgctcttaactgctgagccatctcaccagttctagagataaaatcttataatgtaactcaggttggccttgaataatcttcttgcctaagccttagtacttactccagtaagtactagaattataggcacgaggccctgtgactggcctgaaactttacgtttataatatttgtttgatataacttggtagcttttcattttttccatttccattatttaaagacatatgcagttgctggtctgttgaatctcagtgaatatgaattcatgcccatgtcacctttttgtggtctccttcttcccaatcctttaaaatggttttacatgcacacatttgtctacctgcgtgtgtgcatgtgtgtggaggtcagaagagagtgtcggatcccttggagctggagtcagaggcatccgtaggccaccctgcttgttacagggagtctgaactccagtctgcgtgactgttcagcacgtctctcttcctctcttccttcccttcttttcataagggagaattatttaacttctcaagaactccaggttattatgaagaacattagttattataccaagctggtttttcagtggctgcagcacaaagccacacccatagctcttacctggaatggtcccttgtgtagcccgtgtcctggggacagttacctagggctggagatgcagacgctgctttcctctgaggctggtctctggtgcagtataaaactggtcatggtggtgcttgcctgcagtcctagaacttaggaggttcagaagttcaaagtcgtccttggctgcacagggagtttgaggctagcccaggatatataagacatgattttgtttttaaagcaagttttctaccacttcctgcctttggagtggactgtaagctttgactgccagctccaactatgaccccatgtgtgacagacaggttcttactgtctcccacacatgagtcctctgaagaagcagtcacacaggctctggagttctaaaattaaggcaaagtgtgtacacacattgctaatagggacctgtaggccttaagttaaatgcactggagaagcctctgcctgtggggtggggaggagacaagggaagcctggtgctgtgaggtgctgggagagagagtcagggacttgcagttttcctggagcggatgtgttgtgttctataaaacgagccaggatctgttttgtagagcagggtatggtgaggtgagcctgcccatgctgaggcaccccttccccctgaggtctagagtttatttgggggcatgggaaggaggattgagaagggagtagtggcagagaaagacacagagggagggggaagggacaggagaagggagggaggaatacatagagagaggggggaggggagagaaagagaaacagatcaggagggagagaagagagtcagagagagaagggacagagagcttaaggaggggccaaacagccccttttatcgaaagcccggcctacctggctattgccaggtaactgctgggcggagcctaggagtaatgctaactgaatgggccttagggcctcacagctcagagtgctcttcttttctagtgatagttacaccagcctgtttttaaatggccatttagaaaacatgatgtacgtcagacagaaaggcggcaccattttcaaaggaatcttaacttctgctttccactgtaagatttttttaccttaagctgattagaacttctttagtacagtacctggaatataatgtgccattgttgttgtttatttagcaaatatccttgctgtgttcccagggaactagtcggggaagagtgtcaggaaggccccgcagccttacaaagggtctgcaggagaccctgacagttggcaggcgaggcagacatggtcagtgactaggtaactagggagtccccagaggccgccacttcctcattcaaaacttgagttaggttgacaggttcaaaggtccttgtttttcctggcatttctagaatagataaactaatgttgcctgtcacacgttccttcctcatttgtgctgttccttcctcatttcctcattaaactacaccgagtacaatgctcagaggaagactgggggaagcagaggagagcaggggggagcaggggggaaaagaggggnnnnnnnnnnnnnnnnnnnnnnnnnnnnnnnnnnnnnnnnnnnnnnnnnnnnnnnnnnnnnnnnnnnnnnnnnnnnnnnnnnnnnnnnnnnnnnnnnnnnnagcagaggggagcagaggggaggagggggagcagaaggggatacgaagggagcagaggggagcaggggtataatagggagcagagaggattaggggggtacagtggagagcagaggggaagggggacggacggacagagaggagcctagtctcaggctccagagctagagttagtccagaactctcctgcagggttctcaagttgtagatgagccgaggaccagttcctgcctggctgatctgtgaaggtcgctttaatcttgcactagttttaacatttgcttcacgtccattctcttaattgtgtcttgtttgcattttaccaacccgttggcaggggtaactggtttgaggtatttgagcacagtgtctcagcaatcactggctgaccactgagctctgcagagaggttaccattagaaatgtgggttaggatgggtgaatgagcatgggtcagcccagcccacatgggtggaatgacagggagagtcatttaacttcctctgaagagaggagagggcagtgtgcagtagaaagggcatgactaggctacatgcctgaatcccacatcccacagtccactgtctcagggtcttcagctataaagactgaaaccccattacctggcaagacttcatgagcttaagcagggtgatactgagggtgagaggggtggggaagccaggtgatgggggggtgttggggtgttgggcacctcacacagcagccgcaggtgtactgcctgcaagccttcctttgttgcctcacacctctgagtgcttgtaatacattccctttgcctggcattcccaagtttaatctgctgaaattctatttgtgctttcgaagccaagctccgtgctcttgggcatcctccctgcttcttagagtttattgtttgttctgtgctgctgcgtaacctttagcatgactctgtcactggactttgcactgttccagtgtaatcgttcctgtttgtactggggatggtacccagggccttgcacttgccaggcagtcactctgctgtcgggctacatctccagttttaaatgtcagtcctttgggggcattgcctatatgctattgccccgcccattgtttgtgcatattatgcatgcgtgtagtgtggtttatcacctcccatcccttcccttctcctctagttccttctctatgcctgaagaaaacgaattcttccaaccccagcagctatcaattcccagctgcctaactcctcagcttggggtgaaacgtaatgagcgcccccacccctaccccactccagagcttgctggtgtgaagtcctgtgcatgcagtcgcagccacagcgagtgcttgtacgcagtgcttctgacgtgcttggcagatactgtttgactgcagctgtccagaaacctctccaccccttcaccctttataaccctgagccttggaggtggggatgctgtgcggctgtcccagttagagccgagcacagcatgtgttcttattctctgcatgatgaccagttgcgttcatgtgttaatctgtgcttgcttttaatcatcatgtattttcttgaatgcatgaatgaaagtgttgtatgaagccctgtcagtgagggtcagcgtctgtgcctctaataagcagaccaatcccagggtgtcatcatccccccacttctgcctgtgataccccttgtcttctaagaaagggtttattttgtgtatgtcaaggagctgggcgtctgagcatgccaggtgcatgaggaggtcagaggacagcttgcaggagttggctcacgtggttctggcgattgagctcaggttgtcaggcttggtggcaaatgttcttacccactgagccaccctgcctgctctggtctttcttttttagctttttaagtatgtgggtgttttgcctgcatgtgtgactgcatatgacttgtgtgtctggtgattgcagaggccacagagggcatcaggtctcttggaactggaggtagaggcagttgggagctgacgtgtgagtgctggtgatgaaacttgggccctctagaagagcagccagtgccctcatccacggagccacctcatcagcctctgtcctcatccacggagccacctcatcagcctctcttttagattgaaaacaaaatgacctaccgtctaatgggaattcttgtgaagaagttaagagtcttcctaaagtatgttttaattttcatcaacagaatccgacgtggaggagtcttgactttggaataatgccggatcgtctggatacatctgtgtcctgctttgtggtgaagatttggggtggaaaggaagaggcctttcagctgttgatagagtggaaagtctacctggatgggctgaagtacttgggacagcaggtaattttcagagtgacattttaaggggttgtactctacaaattaacctgcctctctctactgatgctccttcctacattttcagttatgatagatgttagtagaagagaaaacggtaaaaaagtaagttagtacaagaaaaaaaggacaactgtccaggcttggtgacacatgtttcatcccagcactcagaaggaacaggcaggaggattgccttaagttggagttctgtctggactacagagaattcctggctagctagagccttgttacagaaccaggtcacaaacaaacaaggcttgtggtactgtgtttacgtatgatacttactttgccacatttgagttacaaaaaagcccttagctaggggtggtggctcacacctgtggtagatcccagccccaggagcctgaggtaggatctcagcagctctaaggccaggctagggtggacacagtgagtttccggccatcctgggctagagtgagacccaggtagcagaaaggaacccagaggatctttaacttcagaaactcagtgcttgcagataggagcccagcatggctgccctccgagaggcccaacaaatagctgtaagagtcagatgtagatactagcacccaaccaatggagggaagccagggacccctgtggttgaattggggaaaacctggaagaagctgaggagggagtgacctcataggaagagcagcagtctcaactaacctggactcctgagatcaccagccactgagccaccaaccaggcagcaaacagcagctgatatgaggcccccgacacatatacacaacagaggactgccgggtctggcctcactcagagaagatgcacctgaccctcaggagatttgaggccccagggagtggggatgtcagttgttggtgggggtggggggcatattctgggggtggctatgggggatgaagactggactgaaaaaaaaggattaaattaaaaaaaaactttgggaactcagaagtaccctagtgtgcatgtccatacatggctgtgttgtgtgcgtgtgtctgtgtgtatgtgagtgtgtaagtgtgtatgtgtgtgtatgtattttccttagttcttgtgcttctttggcctcgttggatattctccccttgattgtggaaatgaagttgaaacaaagtgccggccattaaacatctccctttcctccagtagggttgggtcatccaggagtgggaaggagagctgctcttacctggagtccagagatgacaggtgtgccttttgtactgggcccagcgctgcttttgttgctgtgtgattgatattccctactcttaaactctcctggccaagctcagaggtcgctccatcgtcctttctagtagctccagagtgtgtaggaagtctgtcaggactgcacatgaaacgaaatgggtttactgtgccatacagaagttattatgattaacggctagaacaactttgcagaggttgatattttcgcccttctttttcaattgggaaaattgaagcttgagagagtttaacaaagtccttaagaccacttagaagggtgaagctaagagttgggttcagatctgtccgacctaagaactcctccttgtgctgtgccacagaggcacgtctgagcaggcacaggcggccctctgctccgtcttggcactcttgttactactgttaaacgttaccccaagatgtcagctgtaggttgtttataaacatcctaatgttttggtaatatttgtttagtgtgtacattctgatacttcttttgaaaggagccatttaaatttgatttttttcagattacaaaatcaccatattcagtgtgtttaccatactttcatttttatttgattgtttattgattacaatgatgttgatgtgcctgagatgaaactcagggtcttgtgccagctggaacttatctatcactgagctgcatgcctaggccaacaatgggttgctcaaactttctaactgattaaacacctgcccctcctgggtcccagtcccagcagatcacgatatcacgatctctctgttcctttgagtccatctcttcaagacgaacatatgaggccactgccagatcttcactttgtgtcattctgtcctgaccagagctgtgcctttaacatcactcttccttgctttgccaacttctagtctcctaaaatggtttcttttagcgttttcatttttgttggtattttgctgctggtctttcagaagtcctcctaggagtattagaagcacactggagtattagaagcacactggagtattagaagcacactggagtattagaagcacactgggtggcagagcccagcgctgtaagccaaccagagcgttcccatcagcatggggaacccagccttggctgaagcagaggcacagcgcacactagagcagtgggctcccagagcgacagggaaagagaaagacaggtggattgccattggattctgccaagagaatcaggttcattgagtggtttgtgctttctaccagttcttgctcttagtggtaaggacccagagagtcagaagacaccattttaaatagagttagaaagcatgaggaagaagtattcacaccagccccagagtcagggagggatggcttgagagcgtttggttttgccttaggcttattgaggtgtcaggtgcatatgatcagttcactggaggctaggtgtagctaggtggtgcagcattcgccccggaacttccatcttcagcacggaactgcagtacagtataacagtgtacagttcagtgaatcatgtaagtggagttgaataactaccaccatggtgactgaagctgctgtgagtagttagctgtgggcctttgtgttgatagatgttgtcatttcttttgggtaaagacccaagaatgcaattgtctgttcttaggttaagtgtgtgtgtgtgtgtgtgtgtgcgcgcgcgcgcgtgtgtgtgtgtgtgtgtgtgtgtgcagtgtttgtttatatcattctttcctaggttgtttaaatttttagctactgacttgtaaagtctttatataaaggctagtgagagaacttaaagtagttgtcccacagatgtgtagattagattttggatttcaagaactcactaaaaccctggtgtgcatgctagcatactagtgtgtgggagatagagactatgagcatctcttagcaagctgctagccagagtagcaaaaaggcaagtcctggattcagtaagagaccttgcctcaatatataaggtagagagtgctagaaagacgatgctgaagtcaggcttgggcttccaggttcacacacacacacagaggtatgtactatgcaaaatactccttatatattgtacacacattagttctttataaaatatgtgttttccagatacttttttctgtcttcattttctatttcttttaaaaaactttttatttatttactttctatgtataaatattttgatagtgtgcatgtatgtgcaccatgtgtgcctgttggattccctggaactggggttatagatggttgggagccattatgtgggtgttaggtattggactcaggttcattgtaagagcagcaaccattcttaatctctgagccatctctccagcctcctctttttaaaaaaagatttatttatttatttatttatttatttatttttcgagacagggtttctctgtatagccttggctgtcctggaactcactttgtagaccaggctggcctcgaactcagaaatctgcctgcctctgcctcccaagtgctgggattaaaggtgtgcgccaccacacctggtgatttttttttttttgaatgttttgtcggtgtgtatagctgtgtaccaaatgcatacagtaccggcagaggacagaagggggagctggatccctggaactggaattacagatggtaggatctgccacatgggtactaggaatcaaattcaggacctttagaacagcagtagccaatgcccttaatcactggataatctcttcagtcctgtaggtctgtttgtccttccttccttccttccttcctttttttttgaaacagggtgtcagtatttagtatcctggaactcaatatgtagagcaggctggcctcgaacttagagacctgagtgctgggattaaagtcctacactgctcccttttcctttccttaagagtggcatttaaagaacacattaaaaaatgttgatgaagtctgcaatatcaacttttaagctttcatgccttttatatcatctaaaatacatggcttagcctaaggccaccaaaattttttcctattttgtaaaattttttggttgaagttgtaggtttaatatttgtccattttttgttattattttgaaagtatctgtctgcctacctgtctgtctgtctgtctgtctgtctgtctatctatctatctatctatctatctatctgagacaggatttctcttgagtattcctggctgtcctgaaacttttgtagaccaggctgggcttgaactcacagagatcctcctgcctctgccttctaagagctaggataaaagtcatgtgccaccactgcccagcattttatttctatttaaattttatgtacactggtatgtttgtctgccagtgggtgtgtgtatgtgagtacagatgcccacagaggccagaagagtttatggaatcctttccaactgaactggagttacaggcggctgtaagccactgacatgggcactgggaactgaactggagttacaggcggctgtaagccacttgacatgggcactgggaactgaactggagttacaggcggctgtaagccacctgacatgggcactgggaactgacctcgaggcctttgtaagagaagcacttgctcttagctgctcagccatctgtccagcctctgtgttgttatttttgaccttgcttattgaaacaaggtctcatgtagactagggtggtcttgagcttgctctgtgtagttgaggcttgccttgaactcctgaccctctcgcctccagctcccaggcgctgaggttacatatgtgcgtcactgtgcctggcttgcaggtattcattttgagctaacatttatataaatataaaggtcattgttctgcagatgaatggataatggctctgtacttttataaaggctaccatgtcttcattgaacctttgggtcttgcattgttttccttcctataattgcattgtaagtcatccacagtggtgggtcacattacagcacattcacacgcactgtttttatcacccctcctcagttgccctttcatcccccacaccccttttgttggttccctttcccacaagcagctctcccctgactcacgcacattctcttaccttttctttgacgttgttgttgaagatcatttgtgtgaatcttgtttctcgactctgactcattgatgtgtgcgtctgtcttgactacagtagttttatattatgccctgggtttaggtcccctggccccttggttttagttctaaactatcagtcaaaacattaacgttataaaaataaaaaccaaaattattttggctattgtaagttttttttgtcttctgtagattttttaatggtattttaataggtattgaatcaaagcaagcttggggactattgagtcttttgttctgtaggcattatatatatttattatatatctgttcatttatgaaaattcactaggattttgaagtttttagcctacaggtctcacatattagatttctacctctatattcccatctttttatgccaatttaaatcgatgctgttttagaggtggctcagtcagtaaggtccttgctgcatagctgtgagggcctgaataaactctgcagacctatgtaaaagccacacctatagtgccgatctgtaagccagccctgggatgctaagatgaggatccctggagttgactggtcagccaccctgctgaataggcgagctctgggtcgtgtgagagtccctgcctcagaacatcaggtagaaaaagactgaggaagacatctaatgttgacctctggcctgcatacacttgcatgctcatttgcagatacacactgcagagcagtcaggaaccaaagtgagacgaataggaaatgcccccctccccaaacctcaagacccagccctagtgactcacttcctttagcaggctccattttgttaaggttccccagcctctcctatcagcctcatcatcggggaaccaagtgttcaaatacccgagccaacgcgaggatcatcgcacatttaacacccaccttatatcttttgggcggggtcttatttagttgctactacccttcagtacattgtccaataaaaattaatgaggggcaaatccttgtttttctttcttttcctgccctatctagagggggaacattcagctttggctattaagtataatattaccagattattcagcctttcactattaagtatatcagattatttagccctctgctattaagtatattattatcaggttaaggaagttccttcttgctcttaatctatcctgacagatttgattcgttaatattttgttaaaggaaacaatacctcattcctgagaggtacttgcccttttcttagcagtgtacgtgtctgctggtctgctgcgggtcttagcagtgtctgtgtctgctggtctggtgcgggtcttagcagtgtccgtgtctgctggtctgctgcgggtcttagcagtgtctgtgtctgctggtctgctgcgggtcttagcagtgtctgtgtctgctggtctggtgcgggtcttagcagtgtccgtgtctgctggtctggtgcgggtcttagctgtgtccatgtccgctggtctggtgcaggtcttagcagtgtccgtgtccgctggtctggtgcgggtcttagcagtgtccgtgtcctctggtctggtgcgggtcaggctgttctcacatgggctgcgcgtgtctgtttctggttttggagttgttgtagatgttttactgttctgcaaacatttgacagaatttctcaatggaaccatctgggtgctgagacttctttgcggggagttttgaagtgggacttactgtctccgatgcagggccgcctcagtgagtgctgatggattttctttgaaagttgcctgtttcatctgaggcgttatgtacatcggtagagagatatccaccctcatcaccaatcctttggctgtgggtaggtctacagcgagcctgctgtgttctgtgcctggggttttctatcttcttcctctcctgacctgtcactagtgatgtaacagtttactaaccttaaggtagtgtgtgagggcattgactgtctttatcgtttcaggctcatgaatctgttttcagcttagcatggttactattttgcttgctgtagattttcctggttattctttttttagttcttagagagaatggaattcctgatttgagaacttaacttctatcttcagaataagcatttagtaaaaaatttttaagcattgctttaggcatagtccatacatttccccttgtgcttttactcagttccaaatactttcaaatgtatcttttttattctttgagcataatagtatgctagtaacttttaaatatttgtggattttctggacatcttcctgtgggtgatacctactttcattctattgagtttagggaaagtcatttctgtggtttcattgctttgaactgtctttcttaaggctcattttacggccccagatagtcaatgcacagtggtaaatgctccatgagtgtgtcgtgtgaactctgctgtcaatcagcaaatagaattcttcattcatagttaggtgatgttggtctcaagtaaatctggaagaaagagtttgagtcaaccagagaagagaagttgagagtgggcccagaagttgatttcttcattttgagctgaggaaatcagaagaagtgggggaatttgaagcatttgttgatagtgctggcacagggcatgcagcaccctgacgtgtgatggccgagtcctcatgcttggagctgaatgggtgaagcctggtggctgtatcctcttccccttcccgacacgcacacgcacacaatgctcagggcctttcctcagtgctgtgagaaacagaagcacagacacagcaagtgacttataaagatatagaagtgcagctttggggtagattattaattattaataattaataaacacagttcttgtctatttttttcatgtgatcatcccagcacagctgagtcaattaaagaggaagaatgagacacacacttctctccgtgatctaagagctctgtgatgtttcataatgtgtgctctgtcctgtagcctgttttattcagtgtatttttctttcttttttttctttttttacatttcaatttttttctttaaaaggagtgaattgtgtacaggagggttaaatgctttatagacaagaaaaaaaaactgtgctagaaccaacttatccatcatcatcatcatcttcatctttgtcttcctcttttccctcctcttccttatcctcttcatccttctaatcatcttcctcttccttctttattttgctcttttcagccttgaaacaccccccccccttcactgcatcaggttttcctttagctctgtaggcaccaatagccctctcgtacttctccttcagcttggcagccttcttctcatagggctgcttgtcattcactgcagtgttgttccacatctctcctagtttctttgcaacatcaccaatggataagccaggatgctcgcctttgattttggggtggtactcagagcagaacaagaagaaggccgaaggaggcctcttgggtgcattggggtccttgaacttctttttggtctcccctttagtggggatgtaggttttcatttttcttttataacgagccttgtcagcctttgccatatcttcaaatttccccttttctttagcagacatggtcttccacctctcttggcacttcttggagaactctgagaagttgacagaagcatccgggtgcttcttcttgtgctcctcctggcggtttgcacaaagaatgcatatgaggtcattttgcctctcggcttcttaggatctcctttccccatgtttagttgattttcctccccgaggtacagagttgcccagtgcctgtccgctagtgtatttttttattagtcaaaaacagatagattgctctgagatttataatccctgatctccaatacatcagtagacaatgtggttgttttttggtttcacttctccagacagtttcccatgcagctatgtccttctgtcttttggacactcttcagagcagggcttctccacctcacagaggtgggaactaactaaagtgcatgctgctgcaggcaattggctgcagggttgggagtgtgtgccattacaagcgattggctgcagggttggaagcatgctgggcacctggctgcaaaaactagctgcctttgatgttagctgcctttgatgttgccgcagacctgggccgctgcctttttagctcatatctaattttccagtgaactaattcagtggccagctttgcatatcatacactttggaaaactgcttcacgtagatgtgtttctctccatgctttctctcccctttagtgacagtcatatttttctttcagtttaaaaagtaatagttgtttttgggccagtgagatcacttcccggctacagttgctaacattttgatgagcataattttagtcttctctcttcaggtacatatatttctaaggtttcagacccatctaatcttgaaatggatttttgaaacattttgcctcagaagcagaaaacttcttgtgagccgggtgtggtgacgcacgcctttgatcccagcacttgggaggcagaggcaggcggatttctgagttcgaggccagcctggtctacaaagtgagttccaggacagccagggctacacagagaaaccctgtcttgaaaaacaaacaaacaaacaaacaaacaaacaaacaaacagaaaaaaagaaaacttcttgcttgacttatggtggccattgcacattagtgattacagaaccatctttgctgttgctgtgtttggttcattaagcaaccaggtaaataggaagtgtgtggttcatggaaggagggcagtagaggccagtgctcacaggggctgtctgctgaaggatggcactggctggctcactggggctgtctgctgatgggtggcactggctgttctggctcttgctgaggcgttcctcacgggaagcccttgtttttacccttttgtaactcttcacttgaattcctcatttcaaaagcagagccttttttttttttttaaccacaattctttctgatgaaatgggtgttcatttcatagttgagtattattttagatctcagttcttcttccctcctctcccccatgtgttttttgagacagggtcttaactatgaagcatgggctggtctaaacttacggtcttcctgccttttctcccctcccaccaagtaagggttacaggcctgtgccactgtgtctcactacttctttattttttttaaaaaagagatttatttttattttatgtgtatgggtgttttgactgttgtgtgtctgtacactgtgtgtgtattgtgctcctggagggcagaaggaggttgggttctccgggatgatagctatagccagtcaccttacatgggtcatgccaatggaatcctggtgctctggaagagcagccagtgctcttaagcccagagccgtctccagtccctgttttttaatccttccaagttgtatttttccggtcttgcaggtgaagttgggtcagcacagggcagttgatcccaaaaagaccagaaagtagaagctaatctgatgtcataattttaaagcatttgtagagtttttttttatttttaatttttttagtggtttgctgctgtccttcaggcataactgttccatcacaagttaacaatgttggtgacaatcactaatggctccaatagcctcacgtggtgtttgtgaggcttttgactaaagctggatggactgtcctctctgtcactcactggcctttgagacctgatttctttgctgcccctttgtttaggtggagccggcctgttcgttggcatggaaatttcagctgttatgctctgacatctggaataagatcaactaatagtatgttttcctccttccttagatccatgcccgcaaccagaatgaaatcatttttgggctgaatgatggctactacggtgctccctgtgaacacaaggtaagaggggtctccgagtgctctgagttttggttagtgcagggcctgtgcacccgggaagctggactcccgagaagagctgagcagtcagaatcgtgttgtaagtgtccctttgagtctgctcttcggggtggtgtggaggaatgccttccgcagtgagaacgagtttcgcaggacacacaagcacgctgagaagtcggtactaaatcctgatcatgttttctcaaagggaaacctgagctagctggtttctgcataattcctgggggattaagagagtggtgagctgggcatggtggcataggcttgcagtcctagccacttagaaggctgtgtgtagcaggaggactaaaggtcagatactgcccaggttcagagtgagttcaaggccagcctaggaagctgagttaggccctgtctcagaatgaaaagaggctgggtgtgttgctcagcagtggggctttaccaccgtgctggaagcccaggttcaatcttcagtcctgccctccccccaaaataggcaaggtgacttttgtctaaatggaagagtttaatggaaatgttcagttgtgtttatcattctcagtaagcctaagaaacccaaattgtgctggacatagtcgcacatgctattaatcccagcaagtgggaagcagaggcaggtgtatccttgtgagtttgaggctagcctggtctacatagagagttccagatcagcctgatgtatacagtgagatccagcctcaaaagagagaaagaaaggaactgaaactgaagctgtttcgtagccattgctgtctctgcatctaaaggtgatgagaggaaggcgaggcagagccccgtttgttcttagccgggagcttctgtgagcagcatccttgtggcggggactcagcatctgcctcctgtttacactcaccacaaaccactgtggtggtggctttgttctccatctcacagtacaggcaggaactgactgggaggatgcactccatagggtctagagagcggctgagctgagatgttagttatgtgcccaaggctgcttcccccactctgacaacttttaccaaaaaccaaaccaaccaaccaaccaaaccaaaacagtcctcccccagccttttgtaaactcttcacattgcttttgctcagaaattgttgctcataatctctgctgtgaggatgtcacactcggatgccctgtctgtcattcctgagtgcctgcccagggttggctcctgtgttcagtgctgagcacagtggtgaaggagggctgggtgcagacacacccctcccttccagctgtttggctaagacaggaggatggcctgtcctggtccccagaggagggatttggttgctaacgttgtaatccaggttctgaatagaagacagtatgtgaaaggtgtgggcgctgaatggagagagctttccaggggaggaggctgagcttgaaaggccacagagtagaaagggcacaaggtgagtctgagggacagaagggaggtgagagtagccccaggccagcccatggggagtttcgagattttatccacaggacagaggcgtgtgctctaaccagatttatgtaatagtttagctctggcttattttaaagagcaagagtgactgtggagagacagtgagaaggaccttgcagtgccatggacaagagatgacagtttggcatggaccatagcagggtagggaagacagatgacatccaggcccaggcacgtgctaggcaagctctttaccactgagccacacacccagctaggaaggcgacagagttggggttttaggagagaaaatcactaggatttgttgtggtttgcatttgagataaaaggaaaaaagagatgtcaagggtgattttggatttctggtttaaagtaactggatagatgaaaggtgatagccacaggaagcttagcgacaaggcggggtgggcagggaggaagagcacagatcctgaggtaagatggccacaggcatgtgcagtgtctttaaacccctgtgttgacgacaagtagccatctgaattcctgaacctggagagaaatgaactataaacatggggcgatgacaaagcctctgaagtcatgtgagacacaggctggcaacatgctgttcagtagagaaggactgagtagcccaggctggagaagaagcaggcagtggtgtgaccaagaagcagtagagcacgtgctgctgggtctggggcccagcgtctctgctttcttctctcccatctcggtaaactgtgggcttggctggtcctgttgctttgttttttaaggagatgcagtggtcaagtaaaccaagaacagaaaaattgcgttgtgtactttagcaagtggatttatgctaggtggtgtctttagaacatccaactccggaagtcttccctttgtgtcccagcttcatcttctgagttcctggagtccttgaacatcttccagatctcctctgccagatgcactgctctgtccagtggcctgcccttcttccctctgtaggctttgtggggtcagactgacatgagcaatgctgaccttccctcaccccccctccccaaactccctgccacaatgcttgggacatggtatttacttagtaaaaacatttgggattaagtcagagacttgtgaggctgccattgctgggctgtttgccattgccaaggctggctgtcctggtgtgggagggagggtgactcactctgcagccggtccctgactctacatctggtagagtcttgcagtcagaggcaatggtagcattcagagccaatgtctgcccgccattgtagttaaaaccccaagaaccccacggctagagactcacagttggtgaccgttggtgtaagcaccagtacccggcttctctgtctacttgtgaacaagtagaaagttttgaacaagttttgaacaagttcagacaagatgggtgacaggaaaatggagttcagaaggtggcttgagaacagataaaactgactggcaaacattgtttaactttgactaaaagctcgccatgactaaaaaggcttgtgtgcatttcctcttgacctgatcctcttccctccaaaataacagagcaaatggaaatgaagtcgtcccattatagacaaagcctagtcctccaagccaagcagtgttgtgtgttggcatagacagttcctcatgatgtagcatctgggaggagctgagccacgcatgcccagccttcagagctcatggataagccacctagagctgctgaggaggagaaagctacagcccagagggatttgagagggtctttcaagatggggtctgggaatttttttttcctttgtggaagcttgggaacgtggaatgaatagttaaccctaacagtagtagcaataactaatatttagtgagcgcttaataactaatatttagtgagtacctaatttactaccaggtagcaaacactttccatctttactgtgttttaactccacagttgtttgtctatagaaaagaaactggtacagagagatttagtaattttcctaagattgcacagcagacaaatagccagagccgggattcagacccagatggttaggaaatgtttatcaagtatgtgcttgttatgtgtgctacattttattccgtagtcctccagttaattagctttgtcagtttagaattctttagcaactttcaacagaactcttgcaatatcagctgacacttaaaagcattatctgaaaagacttatctgtattacttgtgctcttgtgtctgtgtgtatggttacaggtgcctacagaggctgtgtgtgtgtgtgtgtgtgtgtgtgtgtgtgtgtatgtacatgtacaggtccctacagagaatatgtatgtatgtgccaatgcaggagcctgcagagagtggctgtgccatggctccctggagccagagttgcaggtggtgtgagctgcatgctggaggtgctggacactgaactctggtcttcagcaagagcagtgctgagtgattgcttttaaccacggtacatttccttagcaacaaaaagcgtggttctttgtgactattggtgaatatattaagactgtctctgggggctggtgagatggctcagcggttaagagcactgactgctaaaggtcccgagttcaaatcccagcaaccacatggtgactcacaactatccataatgagatctgataccctcttctggtgtgtctgaagacagctacagtgtccttacatataataaatcttaaaaaaaaaaaaagaaaagactgtctctgggttggagagatggctcagcagtttggagtattggctgctcttccagaggtcctgagtttaattccagcaatcacatgttggcttactgccatctataatggtatctgatgccctcttctgtcatgcaggcatacatgcaaatagagcactcatatacagaaatacatctttaataaaaaatctagattaaaataaatgggtctggtgagatggctcagcggttaagagcactgactactcttccaaagatcctgagttcaaatcccagcaaccacatggtggcttacaaccatccataatgagagctgatgccctcttctggtacgtctgaagacagctacagtatacttagatttaataaaaaataaatcttaaaaatgtctcctataccaaacaaaaagcaagtcaaagaaatgtagacaatcaaacatagtaatgaacattctggcataggaattgaagtgtagggaagtggctgagcgagcactcccggctgagatagagacaaatggatgtggaaaagaaacttcagaactttagaataaacttgaagggggaaacttgaagctaccagggagaagagctttccttactaaagagagtaaagttggaccctcatcacctgcagcaggtgctagaagtcttaactggaaagcgctggctgtcacccactagtgagcagccttgcctctagcactgtttcaggcaaaagggcataacagctacatttaatttctaagttgagctttacagctcacagacatttcaccaacagggaatgacctgaaagggatgatgtgcgatgtaagagaacgtagactgtaaatggtccagacagaaggggtttaactgctgacaaaagcaagtacgtgataaactagtactttttggctgttgtgatgagatatctgagaagagagattgaagagaggcaggtttattttagctcacagtttgaagggatacagttgatctggacaggaaggcgtggctgcaggatcaggatgcatcagttacattgtatccactgtcagaaagtagagcaagtgctggtcctgagcttattcccgtggagagtccagcccacnnnnnnnnnnnnnnnnnnnncccacccccacccccacacccctcacctctcatttcagccacacggtttctctttaatggtgctaatctcttcaatacttcaagctgctttcactgaactcttcttgcttccaactgtaaatctgacgaggctgttcctcagactttctgctctgcgaacctgactgagagcagtgagcagaaaccacaccatacataccctggtcctgatggggtccattttgtgagcatcatccccactgtccatgcttcttttggtttccacactcccatcagaacagcccattaagttattttagcattgtagagtttctttcatccaaagctccaaactcttctatatcctaccataacccagttccaaaggccccgaaagccaagctatcaggtagtcagcagcagcctctctcccggtacccttccatactggcctggctacatttcctgttgctgtgacagagcacctggcagaaagcaactctaggagggggcaggtacttggtctgaggagattcactccatcatggaggggagggcatggccgcagcacagtgaggtaatgagtcaggaggcagagagagagggatgtgagtgtgagaagctcggcttgcgtacacttccccccttttattatctagtcggagacctcagtccttgaagtggtgctgcccacaatgggcagtggatattttcatcctcagctaagtctctggaaacactgtcgcaggcaagtccagtccagtgacagtgattgatcccacagtgagtttatgtgttataagagatcaaatcaggtggtggcagtgcacttgagaggcagaggcaggagcatctctgagtttgaggccagccttgtctagggcaagttccaggatagctagggttgcacaaagaaacaacaacaacaacaacaacaacaaaacaaacaataaacaaaatcaaagtagactattgttactcagaatgtgctcttcccactctgaccagtctgccttcagtttgtgggtgtgctgaggagaaacttttacaaaattttataaaattttttattatcattgtgacatttttaagggatgctctttgaaagtatcagatctcagtggctggaatgaagaacttcagcaatggctgcttccccagaggggttgaaatgtcacagaagtgatgtgtggtgtcgattgagattgtctgtttgacaggaggttacagatattaaacagctgtaggatttagtagaaaaacttgaattctagtcagccatggtggcaaatagaggcaaggagattaagaaggagttcaaagttagcctctgctacatagaaagtttgaggccagcctgagctacatgacactctctatctaaaaacaaaaaataaagcacacctatgtgtacatgttcagaattaaagaattcctggtaattgctagaggtttctgattagcgaagggaaatagagggctggaaagacttaaggaaaaaaaaacgctttgtccacatggtttcacatggtagtgttaaatgtgatggagtgagacggcagcagtgtgtccacatttgtgacccaggtagttgtgagtgacggtgagacgtttaatcttgaaggttacagggctttgagaacggcacatttctaagaacatgaattctggaccagagtttctagagtcctggtgcagcctttgctgtctgccacagcattgtccactctgccttccagtgtggtgtgcacaactcactgtgtgtgtgcgtagggggaagtctttgaaaagcacacaccaggactcgtgatccagtgttcagtcccttgcttaatcgtctgctggcatcattgaggactcctttattctaattaacttggtgtaataaaatttcatattaattttatgtaatacagtttcattgacttggcaagtgtgtctttgagtgacttaaatctttatctactctccccttcatctctgttcactaccccagcattgagcacctactgcatacctattaaactaagaatggtgagactaaagaatgtaaaatacagaagaacagtcattttgtctgtgtgtgtgtgtgttaaagaggaaaggcagtatgtatgtattccagaccacggtcttcactgagttgattaaaaggttatcttggatggtgagttgcatgggttctgcagtgatgtaggtgaactttgaacaaacgttggagaccccagagacactggtagcttgagggctgtgcctgggggaatggctgctggatgggatcaggaggttgggagataaaatcggctttgcagtctgcttacagcctttcaggacttttcctgtaacgtgtgcaggtcggctccctggcctgggtttctttttggcaaccgctcttctgggaggctgctggctgccatcttgggtaactgggaagtcaataagaaacaccagcttcagagtcaggctgctctggatttcaccttgagttgactgctgcttactgagggggccctgggaaaactggctctgtttctcatgcgtaagtgcaggaaaccaactgtacctcagccctcagctggctggggttaaattaaacatgagagttgtgtatatgaggaggctggcatgtatgcagagttcagcaaccaatgggaatgatgctcactaggtaggatctgaaccccacagagagtgtgcacacctcgagtgctcaccactgtactggcacggtgctcccagcccaggcctgccatgcttgggcagagaatgctggtgtagcagctttgtttaggactatcatagcttgggaattaaaattttgagagggaggtatctccttcagcctaactctcctgtcttaaccttgtggtatttagttttatacaacttaccctggtgggacacttaaattatctgacagattgtaaaaaatttagactgcagaattttcttttcatgccaaaaactgcaaaagcaatgtccagagggatccagtaggtggcgctgctttctcactttagtgaaaagaaaattggaccaggaatggaattcaagtcaaaatgttcaacatttttcaaatgaaagaaacagattgaaatcacaacttgctgagtttcacacatgtaatcacgtaaatggtcatctcgagtagatggtgaggctgacaatggctgagggacagagggacgagagcaagcttcccatctgttttgagtcctggtcctacacctttgaaatgtaggtgctctgacttacagcccagctttggacaatgcttattaaccaatcacttagcctcttagtgttagctgccgcatcttgaaagtcaagaaattctagtttgctccagggagccaggcatggctgcatgcacctgtggtctcagaagttgagaggccaaggcaggaggtactcaaactcaaagccaacatgggcttcatcataagatcttgccttaaaaaaagaaaaaaaggaaaaaaaaagcatgaactattggaattttctagcccagtgcctccatttcataaataaagaaacggaggctcaggagccttctggcctctcgggcttgcatgtaagttagtgccatgctgtagatgatagctgagcacagctgtaattacatatgatcagcacagctgtagatagtgtactagaaccactgtatacgtcagcctgtaaggacttctctgagtaatctcagcccatctttacagcagtcacagagaaggcagggcagggcaggtctgcttcgggctatgtgcatttgaaacacagaggtcagctgactttctatacctgtgactcacccatctctatgcaggattgacgcttctgttcttcactttagaagcctctggacagacagacagaccaccgtgggcaaccgggccagcttgttataatcttttggagggtctgtccccctttttagggtacacaacaatcctaatgcctgtctctgatgccagggtcaggcgcctgcgcctgccagggatgcagtagggagccgccatgggaaggaagagcgggctgtgtgctaggatgagggcatggtggacatgggaatcagagcgcggctctacctccctttagactcctttcttcattctgctctgtaacctggggaaaggtatcggctatcctttttacctttccatttcttttggggatttctaaagtgctgtatttccttagctgtgaggggtgctggtggtatcttctttgccttacagtcactgaagtagacaggggtggggtgaggtgtgaggggtggcgcagaacctggaaaagtgaagaggttttatttaattgcccttctaagactgactgagaggttggacagtggctgttcgctcttggtcatcctgcactgggtctagcttgatggcagagagcatcctgccctgtagtacacagcagagcacttagaagttaggattttttaagttcagcctgtctttgattgacaccgagctgggcagtagatcatttctgctcagacttttaaacagttggaaaaccttttcttttttgtgaatataaatgttttacctgtatgtatgtaagtgtaccacttggaatttgagttatagatggttatgagctactgtgtgggggctgggaattgaacctggtcttctgaaagagcagtaagatgctctcagctgctgagctatctcttcagtcctgaaaaagtggagaacttttcaaagttgttcttatatgtatctcagtcagtcatcatttgtgtctccagtaaacaagacaggctggacagatagatagtcagggctgtctgtttgctgcctgtgttattctaacacatcttggtatctgaccttgtaaacaccggtgagcttgtttcagaaccatccttggtccactactgcatcaggcaggggcgggcctttgaaaacctcccattgccagcctcattgccaagtcctttaaatggcagacattatagtagatgcagtgcatatattcatttaatgtggagcaactccacgacacggccattttcagtggatgggcaaagcgcctgggaagaaatcgtcaggctatggacgcaggattgcacagccagtaggtaggcagcaggcttttcatttgagcgctggtctgactcccttagaaacttgtatctctgaattgggccacgtggtgtctgcattccctcccacttgaggtggtgggtcccaggcctgtagtttcacattcaattagaactgtccactagcagtgcagagagctggaggagagctctcaggccagtggctcgttaggctgacgaggtattgctaaagcagagacgtgctgggaactgaagccgtcaccccgcccagacccactgacgtcacatccattagtcactgcatttggcctccctctggctctcccactcccctttcttcttggatcaaattaacttttttgacagatgtttggaaaatagtcttatcctgtaatttatatttataaatccttctgctacagtgtggtccccattctccgccttcattgaagccagaaaataacctgggagaaggcctcgtttcctgttatgagtttggaggctcttgtcttcgtagcatactttttgagcttttgagaattgtatgtagcaccaggaggtgggaagccaagagagatgcttcggagagatgctttagactcttcagaggtaaacaccatcagcctgaggtttgtcctccccagactcagagctgagccttttgtttgtttaaaatccttagtctcttttagattagatttggaatgaagacattcttagctctgaaaagtcagtgccattcaagcttccccacaagccgggccccttactccgtccagtgatgatggttagccacaccactgctgcccgctcctcctccctcatgtctgctgcccggctcctcctccctcatgtctgctggcttctccctggttataggagattttagatgtactctttctgcctctaaggtatatgctcctgtgtgcgccttgcacgtctttgtgtgtctgtgtatacccatgtgcatatgtaggtatggaagctaggggtcagtgacaagtgtcttactttactgttctctacattattgacgtcatcgtcggggacccagtctctcactgaacccagagttcattggcctggtgaggctggagtgatccacctacctcagcaccccaaaccagttacagacacataacagctctacctggcttttaccgaacaagacagcatgcttgtccggcgggcatttccctggccaaggttctccccagcccgctgtctcacttgtatggtctcaggctctagtgttttttctgcctggccacatttttccaggaatgaatgcagtccacttgagttctgttcctcctctctgctctgccctgctgtaaaatggacaccacactccagaggcggccactccagcaggccctcctgtccttctgaaagtagcagcaccaagactcttagtctactttctgcttgagtgtttatagttgtgacttcttactttaaacccaagaaccttaatttaaaagaaccttccttattgctttgaatgctccttaaaaagcagtaatgcccatttcaggactcacgtgtcttcgcttacattgctgtccttactgcacagtgcttctcacggtttcgagagaggaaaggcacgtctgaagctgtggccacactggaggcaggagggtgtccatactgagctcagtgtctgagaagaggtctccccctccctctttaacggttcagcatctgggcttcatcagagcccaggcagagggtgtccaagacctgcagacgcttagcagagacacttgccgttttactcagtttcaacttggccaacacttgaaagcgcattagtgtccgtgcacatgtgcacatgggacccaggctgtctgtggatccagcaggtagccctcctcacgcatagtgtaaccagcctactgcaaccatagaaaggacacttccccatatgtgggataagccgtcagctttgttttattgtcttttatttttcttcttgcctatctgatttcttattctgtccaggttggtgagtctgggctgtgcaaagttcacttgccactcaaagacggtgcgcccagcattgctggaaacctgcaggggatcgcttacgctgtcctcaggctctgccagacttttgttctccttgcccattgtatccggattttcttaaaaactttcttcatttgtttgtgtgtgtgtgtgtgtgtgtgtgtgggggggggcattagagtctgcagagcttggagttacaggtgcttctgagcttttgaccgggcgctaggaggtcacctccagtccttttagcccctcaccccccagcctcccagtctccccacatagctccttcctggccagctggactttggtcaggtgcttcagagactggtgcaccctcctggccccaattgagtaggttcctcccctctgccacagtgaccctttatccaatagtaccagtgcccacccctctcttagcccaggctgtctcacgtcatcccctctctctttgaaccagtaacgatagaacctgccagtgtccactccttcactgtgggctttggttgttttccatttctaaaatgttaatgtactttgttgtttcaaatcaaggcattagcatctgtcttcactaatcagtggcttgcactcctatcaaggtctggtttcttctttctaaaccattactaaaacttcttcttcttctttttttttttttttttaagatatggtttctctgtgtagccctagctgtcctggaactcactctgtagaccaggctggcctggaactcagaaatgcctctgccctctgccctctgcccctctgcccctctgcccctctgcccctctgcccctctgcccctctgcccctctgcctcccaagtgctgggattaaaggtgtgcgccaccactgcccggcttctaaaacattttctcatgctaaaatttgtccttgtcacttagacctatttccctaggacagttcttgtgctcccatgatgcatggcgtttccctcagcaccttactgtgatgtctgtttgcctgctgtctcatctctttcttgtctgactgtcctgtgtatgaagccagggcaagtgtctgctctggtatagcttattgctggtgtgtagcagtgccctggcatgtagtcatgacttagcagatgcttggtggtctatggtggggaccccaggaggggtactacttggttgtcagcagttgtgaggctccttacccagaattcagtctgttttgctcaatttcttatagacacttgtttgcaaattattattatactgtaaagggagtttttcggcttccagacttatttttttgttcaattttccacattttcatttactatatagttgttgatcccaggttcatgtctctagtgaggtttggctgactttctctctttccctccctcccacccggaggctccctccctccttccctccctcccttctattcatgcagccactgggtccttcagagtccttctttgaaacaactctggtctccctagcttcttttccatctccattccgtaatgcagtcagccacctctagagggctggattcctgcagcagccggtctcctgatggcctgtggactctgctgctgtctgctgtgtcttgctcaccgcatctctttaatcttgccatggcatactttatttctttgcttaaaagttatatcgagtaaattgtcatcatctgctctgtgtgtgtgttccattcggattccttccattgtgctccctccccgcccctccctccccaccccttctttcccacggctgttgttgagtcagagctctcagtacatgcagtgtgtgagtgtgcatacttttgttgtgtctctgtgtgtggcatatgtacatgtttgtgtgtgtatacaaacatggctactcctaaaatagccacctgctgaatccacaaacagcctgggtccaatgtgcacatgtacacagaccctaatgcactttccagtgctggccaagttgaaactgagaaaggcaaatatgtctctgcgcgaggttgagtgacttccttgtgacaaatgtctctggtgaggctgagcgctttccccagtcactctccacctcgttttcttagccatctccctgcgcctggactattataacagccaactcactgtagttggtcattctgcctccgccagctcgtcacattagttcttccctaagtagcctttattatatacagctctgatggtcacactgcagtgttagaaacccttcccgagctttgctgactgtgggttgtctcagttctggcctggtgtcagggctcccagcctacttacccagccatgtctcccatcactttcaccatcagcgttcctgaagccgaacaaaccaggacacttggattttgtctgagcgccgcttctgtttcctgctgctgtgcttttggctggaggtgttcagtctggatggggctttccttcccagccattcaggttcccaggaccacctaacccaccccaaatactgccatctctgcagccttggatgttctgtgcttgctggatggagtccacgccacatcagaatgcctgtgtggtgtattttggttttaagctggttttataacccctttattttcttatttatttcacctggacctttaactggtatttgtgctttctgaggagagtgagagacaagcttaatgtcctttgtgtattggatgtttaatacacctaattaatgaataaaggattgtgtaaactggttggcctaataagagaattcttttctttccttccttcctcctttccttccctctttcctgcaggatcttattatttagctctggctgtcctagaacttactatgtagaccaggctggccccaaaactcacagaagcccacctccttctgcctcccacatgctaggattaatggcatgctcactacgcccagcaagtgggttatttcaggattgctttagtgtttgtaaggatgataagggcagccaagacagctcattttttcaaggtgaccttgctgggagcactaacacagcttaaattttgtgtggtctgcaaaccaataaaaatatgtttttaaattttcaacaatttgaaagatgaaacaaataagaatatactcagatgtgacatgtgtctttgcaaagctgaaaaccactaatctagacatacagcacatttgaccagaatgctggctctgacacaggactctccatataagcattctttttgttttctttcttttttattagatattttctttatttatatttcaaatgttatcctctggagttttagctgtgccccatgacccctgcctcagtactggagatcaaattcaggtctcatctgccacttaactgtcttcccagtctcaaaaataccttctgaccctttatggaagaagcgccctgacaactaatctagacatacagctcatctgcccggctggagctgcggaactgtctgcttccccaacagtttcccagaccctctccaggcggaggagagtccctcggtggaaggaaatccttaggcctggcttcagaagagttttgagtggcgtgcaaatctttcctgggctctttggcacttggcactatctcccacagataaccagatacaaatgagccatttctttccattctagccctcaccagaacctggaggattgcacagctggcccagttagtcgctgtccagagtgaggctcctggcatatttgaagaatgttaattgctaagtgcagggtaaagtcaaagagctttgtaatgtccttaagctgctttaaatgtacgtagcctgagaattttagaccagaaagggcctgggagatcaccgagtttaccaaggtccttaagagcagggcctgtgagccagactgtgtggctcttccccttaatcctcctgtgtctcagtttcttcacctttaaagtggggctaagaatagcacctagccaatgggcttgtgagtatcagcagcaagtatgagtgtttcccacagccacatttgaccggaatgctggctctgacacaggactctccacataagcattcttcttcttttttctttcttttttattagatattttctttatttatatttcaaatgttatcctctttcctggtttcccccccgaaaaccccctatctcatccccccatcccccaaaccctcccacttctgcttccctgtcctggcattcccctacactggggcatcgagcattctcgggacctaggacctttcctcccattgatgtccaacaaggccaccctctgctacatatgcagctggagccctgggtccctccgtgcctccatgtgtactctttggttggtggtttggcccctgggagctctgggggtactggttggctcatacagttgttcctcctatgggactgcaagctccttcagctccttgggtcctttctctagctcttcccttggggaccttgtgcccagtccaatggatgactgagagcatccacctctgtatttgtcaggcattgtcagatcctctcaggagatagctatatcaggctcctgtcagcaagcacttgttggcatccacaatagtgtctgggtttggtgactgtatatgggatggatccccaggtggggcaatctctggatggcctttcagtctctgctccacactttgtctctgtatctcctcccatgggtattttgttcccccttctaagaaggactgacgtatccatactttggtcttccttcttcttgagcttcaattggtctgtgaattgtatcttgggtattccgagcttctgggctaatatccacttatcagtgagtacataccatgtgtgttcttttgtgattgggttacctcactcaggttgatattttctagttccacctacttgactgtgaatttcatgaatccattgtgcaaatgtaccacattttctgtatccattcctctgttgagggacatctggattctttccagcttctggctactataaataaggctgctatgaacatagtggagcatgtatccttattacatgttggaacatcttctgggtatatgcccaggagaggtatagctgggtcctctggtagtattatgtccagttttctgaggaaccaccaaactgatttctagagtggttgtaccagcttgcaatctcacataagcattcttgtttcattgatgcttttagtagttgtctcattttatagttataggtaatgaggacgagaggagcgaaacaagtttcctgccttacctgacaggcagagtgggctaaagcctggctgcagcttttcagttcagtgttccctccctgttaccatgtgcttcttgcttgtagatatgtgtttaacacttgtagattaaatgtgtgtgtttgtgtgtgtgttaaactcatgagtggggttatatgagcacatgtgtgtaaatgtatatggaagccagagatagataccagtgtctttctcagtcagttttcatcttagtttttgagacagggtctgtcactaacttggtgctcccagattcaagtaggctggccagacagcgaacctcctggaccctcctgttgctgcttttcttgggcctgcattaacgattctatgcctccgcaccaggcttttacaccagcactaggcaagcactttcttggctcaaccatcctcatggctccttatttttatttttcatacagatgtcacccaagctggccttacacttcaagttctgtctcagcctcctaagtgatgggatgacagtaattgtgtcaccataactggcttggatggttaaaaaaaaaccacagatttatttattttactttatgtgtatgactattttgcaagcctgcatttatgtacaatacatatgtgcctgctggagtccttggaacttgggttatagatgtttgtaagccaaccatgtgggtgctagagatccagcccaggtcctctccaagagcaagtactcttagctgctgagcttaccgctccaggccctgggtgagttttaataactagaaaaaatgcatggcagctttttagataaactaagaaggctaagttactttatagcttagtctcctgtctctcctgcgtgtcattgtcttctcatcttcatgataggacattatttcctagccaagtcttctgaaattgaagtgctgctcatgtgactactgtctctatcaagctgacaagctttctattatcctaaagaaaacccaagagtgttggagagatggctctgcttaagaatgcttcctgctctcacagaggatgtgagttcagttcccagcatccaagtcagatagtttccaactgtttataactccagctccaagggacccagtgccgtcttctgcaagcacctgcactcacatgcacataaacacatagactgacacatcagtaaaagttcatcctaaagaaaacttggtgccagtgtgcctttccccacgtccacctcccagagctctcagtctgctttcggtctttacagactcatgtattcagtgtattccatgtcagtgggatcacactgtgatattccatgtcagtgggatcacatggtgtgtgacattccatgtcagtgggatcacactgtgatattccatgtcattgggatcacatggtgtgtgacattccatgtcagtgggatcacactgtgtgacattccatgttagtgtgattgcatggtgtgtgacattccatgtcagtgggatcacatagtctgtgtattccatgttaatgtgatcgcatggtgtgtgacattccatgtcagtgggatcacatagtctgtgtattccatgtcagtgggatcacactgtgtgacattccatgttagtgtgatcacatggtatgtgacattccatgtcagtgggaccacgaggtgtgtgacatttcatgtcagtgggatcacatagtctgtgatcttttggatttagcagttttcatatagtatgtttttatatttgcatataataaatttacctacatattatatatagcacttcatctttctgaggatgtaccagtttcgttatccattagccttggatggacattggggttgtgtcctttgactatcataacatttgagggcaaattcttgtttgagtgcctgtgttcagttctttttggtaggaacctgggagcaaaattgttattgccaggcagtggtggagaatgcctttcgcctttaatctcagcaagtggatctctgtgagtttgaggtcagcttggtctacaatgtgagttctaggacagccaggannnnnnnnnnnnnnnnnnnnnnnnnnnnnnnnnnnnnnnnnnnnnnnnnnnnnnnnnnnnnnnnnnnnnnnnnnnnnnnnnnnnnnnnnnnnnnnnnnnnnnnnnnnnnnnnnnnnnnnnnnnnnnnnnnnnnnnnnnnnnnnnnnnnnnnnnnnnnnnnnnnnnnnnnnnnnnnnnnnnnnnnnnnnnnnnnnnnnnnnnnnnnnnnnnnnnnnnnnnnnnnnnnnnnnnnnnnnnnnnnnnnnnnnnnnnnnnnnnnnnnnnnnnnnnnnnnnnnnnnnnnnnnnnnnnnnnnnnnnnnnnnnnnnnnnnnnnnnnnnnnnnnnnnnnnnnnnnnnnnnnnnnnnnnnnnnnnnnnnnnnnnnnnnnnnnnnnnnnnnnnnnnnnnnnnnnnnnnnnnnnnnnnnnnnnnnnnnnnnnnnnnnnnnnnnnnnnnnnnnnnnnnnnnnnnnnnnnnnnnnnnnnnnnnnnnnnnnnnnnnnnnnnnnnnnnnnnnnnnnnnnnnnnnnnnnnnnnnnnnnnnnnnnnnnnnnnnnnnnnnnnnnnnnnnnnnnnnnnnnnnnnnnnnnnnnnnnnnnnnnnnnnnnnnnnnnnnnnnnnnnnnnnnnnnnnnnnnnnnnnnnnnnnnnnnnnnnnnnnnnnnnnnnnnnnnnnnnnnnnnnnnnnnnnnnnnnnnnnnnnnnnnnnnnnnnnnnnnnnnnnnnnnnnnnnnnnnnnnnnnnnnnnnnnnnnnnnnnnnnnnnnnnnnnnnnnnnnnnnnnnnnnnnnnnnnnnnnnnnnnnnnnnnnnnnnnnnnnnnnnnnnnnnnnnnnnnnnnnnnnnnnnnnnnnnnnnnnnnnnnnnnnnnnnnnnnnnnnnnnnnnnnnnnnnnnnnnnnnnnnnnnnnnnnnnnnnnnnnnnnnnnnnnnnnnnnnnnnnnnnnnnnnnnnnnnnnnnnnnnnnnnnnnnnnnnnnnnnnnnnnnnnnnnnnnnnnnnnnnnnnnnnnnnnnnnnnnnnnnnnnnnnnnnnnnnnnnnnnnnnnnnnnnnnnnnnnnnnnnnnnnnnnnnnnnnnnnnnnnnnnnnnnnnnnnnnnnnnnnnnnnnnnnnnnnnnnnnnnnnnnnnnnnnnnnnnnnnnnnnnnnnnnnnnnnnnnnnnnnnnnnnnnnnnnnnnnnnnnnnnnnnnnnnnnnnnnnnnnnnnnnnnnnnnnnnnnnnnnnnnnnnnnnnnnnnnnnnnnnnnnnnnnnnnnnnnnnnnnnnnnnnnnnnnnnnnnnnnnnnnnnnnnnnnnnnnnnnnnnnnnnnnnnnnnnnnnnnnnnnnnnnnnnnnnnnnnnnnnnnnnnnnnnnnnnnnnnnnnnnnnnnnnnnnnnnnnnnnnnnnnnnnnnnnnnnnnnnnnnnnnnnnnnnnnnnnnnnnnnnnnnnnnnnnnnnnnnnnnnnnnnnnnnnnnnnnnnnnnnnnnnnnnnnnnnnnnnnnnnnnnnnnnnnnnnnnnnnnnnnnnnnnnnnnnnnnnnnnnnnnnnnnnnnnnnnnnnnnnnnnnnnnnnnnnnnnnnnnnnnnnnnnnnnnnnnnnnnnnnnnnnnnnnnnnnnnnnnnnnnnnnnnnnnnnnnnnnnnnnnnnnnnnnnnnnnnnnnnnnnnnnnnnnnnnnnnnnnnnnnnnnnnnnnnnnnnnnnnnnnnnnnnnnnnnnnnnnnnnnnnnnnnnnnnnnnnnnnnnnnnnnnnnnnnnnnnnnnnnnnnnnnnnnnnnnnnnnnnnnnnnnnnnnnnnnnnnnnnnnnnnnnnnnnnnnnnnnnnnnnnnnnnnnnnnnnnnnnnnnnnnnnnnnnnnnnnnnnnnnnnnnnnnnnnnnnnnnnnnnnnnnnnnnnnnnnnnnnnnnnnnnnnnnnnnnnnnnnnnnnnnnnnnnnnnnnnnnnnnnnnnnnnnnnnnnnnnnnnnnnnnnnnnnnnnnnnnnnnnnnnnnnnnnnnnnnnnnnnnnnnnnnnnnnnnnnnnnnnnnnnnnnnnnnnnnnnnnnnnnnnnnnnnnnnnnnnnnnnnnnnnnnnnnnnnnnnnnnnnnnnnnnnnnnnnnnnnnnnnnnnnnnnnnnnnnnnnnnnnnnnnnnnnnnnnnnnnnnnnnnnnnnnnnnnnnnnnnnnnnnnnnnnnnnnnnnnnnnnnnnnnnnnnnnnnnnnnnnnnnnnnnnnnnnnnnnnnnnnnnnnnnnnnnnnnnnnnnnnnnnnnnnnnnntggacccaggtctttgatgagtcataacctgagaaaggcaggcatggttggtctggcacagattttgtgtctgtctgtttactttcttcaccattgcctttcagggtcatccaaacgcacagaagaacctccttcaggtggaccagaactgtgttcgcaattcttacgatgtcttctctttgctgcggtaagaacctccctaggggctcctggatttgaatgatctctggctgtggctctgtggtgctgaggtgtgagggatgtcgggctggagaggccagtgctcgctcaggcttagcattgtttagtgaaggctccataaatcctgttgttcagtgatttaagtttatctccctgacagaggctttgaaaagccatttcctctcactgggtagtgggaaagaacagctgcagactgcagatccgaaagcagagcgcgaggctcttgctggtctgcagagcagggacatcactggaacttaccaaggatgcttccccaggagagcccacccacagccctaggctaggttctagcttgctcggcaccttaagaggcaccttaagagggcccaagtgacagggccaggggagctttgcagagatccaaggctcagaggtttaattgcctctgctctctgtatggatgcgtgtctgtatgaaatgcttgggattaagtttgaaagacttaaaaatctagcttcagtttttcatgtggtaggtgatcagggacacttcccaggggacatttcccagtatagtcagcgcaacactcagcctttgttcggctcagattgctagtggacatttgatttggttagcgtttttctaatgtttacttagcacatcataaattttagggccttacatctcctctatagattttctagtggaagaatccagaaggattcatgaagaatggttatctgctaaacattatacaagtggcctttcctttgtgagccttgaatcttatatttgatgacatagagtttggttatgagacttgtgaaaattattcttatgggataacaacccgaaagctgccacatatgtttgatgacctttgacctgtgtctgagaggtgtcttcagtttgtctgcttgggatgtgtaaacagatagggtttactaattgcatggacattcttttgagtctgttgaattggggacgtagaaagtgaagaatagagtgtgcagaaatagttcaaatgcaaataaactgctacatttcctgaccttgatttaagagaacattttttaaaaaggtattttctaagtatgagattgtgcaatcttatgggagaaaacaatagcgctaaaagaaaaatccccaacttagagaaaagagggtgtgttaaagggtgcagaaagctctaagctattcaggaggataggaggtaagagatgggataccataggaaatgcaggagtggggctgcagggatagctcagtggaaaagcacttacctgccatgtgtgaggtgcagagttcagtccccagtacctccaattgtcctgtttactccagttcatttaaccgttctggttcttgtggtgggagaagtggtggtgttaagctgtatagtttataggtgctttttaaaatcactgttgtagtaataaattgctacgaaacaacatagacttacttttgtgtggggtgtggtggtatatgcacattgtgtgtgcacatgtgcatatgtatgnnnnnnnnnnnnnnnnnnnnnnnnnnnnnnnnnnnnnnnnnnnnnnnnnnnnnnnnnnnnnnnnnnnnnnnnnnnnnnnnnnnnnnnnnnnnnnnnnnnnnnnnnnnnnnnnnnnnnnnnnnnnnnnnnnnnnnnnnnnnnnnnnnnnnnnnnnnnnnnnnnnnnnnnnnnnnnnnnnnnnnnnnnnnnnnnnnnnnnnnnnnnnnnnnnnnnnnnnnnnnnnnnnnnnnnnnnnnnnnnnnnnnnnnnnnnnnnnnnnnnnnnnnnnnnnnnnnnnnnnnnnnnnnnnnnnnnnnnnnnnnnnnnnnnnnnnnnnnnnnnnnnnnnnnnnnnnnnnnnnnnnnnnnnnnnnnnnnnnnnnnnnnnnnnnnnnnnnnnnnnnnnnnnnnnnnnnnnnnnnnnnnnnnnnnnnnnnnnnnnnnnnnnnnnnnnnnnnnnnnnnnnnnnnnnnnnnnnnnnnnnnnnnnnnnnnnnnnnnnnnnnnnnnnnnnnnnnnnnnnnnnnnnnnnnnnnnnnnnnnnnnnnnnnnnnnnnnnnnnnnnnnnnnnnnnnnnnnnnnnnnnnnnnnnnnnnnnnnnnnnnnnnnnnnnnnnnnnnnnnnnnnnnnnnnnnnnnnnnnnnnnnnnnnnnnnnnnnnnnnnnnnnnnnnnnnnnnnnnnnnnnnnnnnnnnnnnnnnnnnnnnnnnnnnnnnnnnnnnnnnnnnnnnnnnnnnnnnnnnnnnnnnnnnnnnnnnnnnnnnnnnnnnnnnnnnnnnnnnnnnnnnnnnnnnnnnnnnnnnnnnnnnnnnnnnnnnnnnnnnnnnnnnnnnnnnnnnnnnnnnnnnnnnnnnnnnnnnnnnnnnnnnnnnnnnnnnnnnnnnnnnnnnnnnnnnnnnnnnnnnnnnnnnnnnnnnnnnnnnnnnnnnnnnnnnnnnnnnnnnnnnnnnnnnnnnnnnnnnnnnnnnnnnnnnnnnnnnnnnnnnnnnnnnnnnnnnnnnnnnnnnnnnnnnnnnnnnnnnnnnnnnnnnnnnnnnnnnnnnnnnnnnnnnnnnnnnnnnnnnnnnnnnnnnnnnnnnnnnnnnnnnnnnnnnnnnnnnnnnnnnnnnnnnnnnnnnnnnnnnnnnnnnnnnnnnnnnnnnntgcccacattgcctgcattccttaacgacccttcgcttcagagtgagaatgttagtctcctggttgtgctttttaggagtatatgctaattaataacctgcaccagctaggaggctttgtgctgcccgtttgccctaatacctaataccgagggaagatggtctcaaggttgaggccaacctgggctgcatagtgagtttcaggcctgcactataagtgagaccttgtctcaaaattaaaaataaaagttaataaaaaaattctttcagtgtattgtgatcctgggagccatagtttcttagtaatgcttgctggtaagtgtcatgggaaactagggaatcttggtgaagttagggctttggaacgtctagaccagggtgtgcaccaaaaccacctacttcccatgggagttttgtattgtgtgtaggaaagcagtcaggtgccttggctcacactggagaccccaggctagctttaccatttccccaggagtaatcaagtctgccagagttgccgtcagtgggggggaggggggggcagtgaactttggttagctctgagattgcaggtttgttttccggcagacagacaggaggtatttggcttttgtgttccatactttgggatgttcaccacaaggtgtcaatgttggttttgtgttccatactttgggatgttcaccacaaggtgtcaatgttggttttgtgttccatactttgggatgttcaccacaaaggtgtcaatgttgtccttcaactgacattgaaatgccagttacttttcagtttggatgagcagctggctagagggagggcctccacacagcatggaccgctgctgtggaaggctgctcagtaagcacttgtccagatctagatttccctgttgtaggggcacaggtaattcgataaagcgcaggggtggggcaactctggactttgttgttgttgcctttaaacacttttcttgctggtggtagtgaattactgagtgggtatgagagggtcagcatggtgagtttcgaaggctgtccctggtgtcctcagggtaagactggagccacagggtcacctctaatctttccactctctgagggtaaaagatctttcagggtgtcatccttggcctcaccccttaatactttgtagagagggggccgtattgtaggctttcttctcatttgaaatgcctcgccctttccaggttagtacacaggaaacagcagtggcaccggctgtggtcctctgcgtgggccctcctactgaaagtgcccggtgctggtagacggtacaggaccttgggtaggatccttcccttttgtttgctccaggctggtcgggtttgtctcatcagattaggaatgttgggagggtgagtggaggccaggagtgcgaaatccctaagacagttcccatgacacgacgggggtgcctggtgtgtgcagccctcactgtcagctcctctctgcgatgcctgagttccagcttgttctgctggctctttctcttagcatcatcttccccttcgccttcttgctgtctttcctgcatgtttcctgcggtcactcctgctttcaaagttagcttcgttctccctggtcagtcatggttttacaaccttgtttgtctcttcacactgatgaagagcattgaggcttcttgaaggagggattcttcacccggccatgtggctggctcttcagtgtgtatctgaggttccgttcccatgccagggactctggggtgttatttcccctgtcagctctgctccactggcacagcatcaacctgcctgtctgaatgctagaagccccagtctagatccccattgctgcctgcctttccttggtctcacagtctgtgtttctcaggggtgtctgttggactttcagtcatgcccttgaggagcctcagctccagcctggccagattcactcatcagctttgccctctccccctcctctttctctcctctggtgtctgtaccacggttctagaaatcagagtcatctttgttttctgactcatcttccttcactggggcttagttggctctgagtcctctcgagtctcctccgggtggctcttgtgtcacccttccctgttcttctgtctgtcttcctgggctgtatctttttgctgcagattttttcatgtgctgtcagtagctctgcctcactgggcgttttacaataacataattcagggattgtagctcttgcttctgcagaggacccagatcctgtttctagcacccacgtggtggttctcggtcaaccatctgtaactcagttctagggaacccgatgcctcttttggtcttcctgggctcccccacacacgtgtatatgctcaggcacataggtatagaataaataaagagctgactcagtgtgctgggattaaaggtgtgcaccacctgggctggctaagtattgacagcaatgcaactccgtccttttgtggtaaagcctggtcctttttttttctttaatagatgaggacattgaaacacaaggcagttagttgcatacccacagtcacacggctggtagtatgagcttgtccgggtccatagatggttgccaaagcaggtccgagaaccccagccaggttccagtgtgagtagtttcccatcaggccgtggctgctagtcagtggaatcgaatactgctcatttagcctttgtggaagagcagagacagggtaagtttcagaaagattctcaatcagaatggaaagtttggatattctgtgcaagcatgggttaaacaaaagttgtgtttatgtataatggcattttaaaatttttttttaattttctccttttctgtctacataatatagatatatgtgctcgtattcatattcataaaggcacacacacattgtaaaaataggattttaataaatgttagtgtaattttaggtggtccctccttttcctttctggcttttctcctttttaagccccttttccccattccttgccagaaaaccacccaaacccagaacccatgtccaagtgatccccagtcacacactgctgtgtcagcaatccctgcctcatctctagctgtccgcatctttcccacggtctgtgcgtatgtcatggatactatgtgtggatatggttttaattactgacttacagagttggatggaaaatgcacacagtaatgattctctgtctcagtttcctactcagcacggcctatacaagccctccagctcgttctctggtgattcagtgatagtccctgctgcgactaacgctcatttaccccaccattgtcctgttactattttacatgtacttatgtttaacagtttacttctgtggggctgagattaagagcactggcttctcttccagaggactcaagtttggttcccagcacccacgtggcagcttacaacagtttgtaactccagttccaggggatctgacattctcactcagatatatctatagacaaaacaccaatgaacctgaaattaaagaaaatttaaaaattacttatgcgacccaagaatcaaggaaggaacatttaaaaagttactttaaaataccattacaactttttaaaaatatcagttgcataagacaaagtagaaaatgtaaatataatcttgtggacatatatgctgttttaatcaactctttgcctgtgagtcagtctctctctctctctctctctctctctctctctctctctctctctctctctctctctctctctctctctctctctctctctctttggtttttcaagacagggtttctctgtatagccctggctgtcctggaactcactttgtagaccaggctggcctcgaactcagaaatccacctgcctctgcctcccgagtgctgggattaaaggtgtgcgccaccatgcctggcgagtttctctttttatcttgttttgttgtttactttttaaagtttagctttgttctgagacagttttatagctattctgtagagtgtgttctggccactctaacccagcctctaaccactttcccagcctttcctgcctagctccctgtcctgttcccagatttgtgactttggttttgttttacaaaacagttagtataacagggtcttgtgtgtgtgtgtgtgagacatctttgggttgcagtgatccactggagcctgtaggcctgaagcaccccccaccttagatagacattttcttttctctttttttcttcgcttcgcttctcttttcctttcttttcctttctccttccttccttcctttctttctttctttctttctttctttctttctttctttctttctttctctctctctctctctctttctttctttctctctttctctctttctctctttctctttctttctttctttctttctttctttctttctttctttctttccttctttctttctttcttagacagacattttctatttaccctgactgtagtattttaatgcttgctttgccagtgtctacagtgctgcagaatgcttgtgtgcgtgtttgcttgtgcatgcacgtgcatacatgtgatataacatatatactcttggttttccatcttttatttctgtgctacaatcctggaagtggggtttctgagtcttaaaaacatactcagtttaattctannnnnnnnnnnnnnnnnnnnnnnnnnnnnnnnnnnnnnnnnnnnnnnnnnnnnnnnnnnnnnnnnnnnnnnnnnnnnnnnnnnnnnnnnnnnnnnnnnnnnnnnnnnnnnnnnnnnnnnnnnnnnnnnnnnnnnnnnnnnnnnnnnnnnnnnnnnnnnnnnnnnnnnnnnnnnnnnnnnnnnnnnnnnnnnnnnnnnnnnnnnnnnnnnnnnnnnnnnnnnnnnnnnnnnnnnnnnnnnnnnnnnnnnnnnnnnnnnnnnnnnnnnnnnnnnnnnacacaaacaacatgtggtgtttaagttcatcctaaaaatgaaaatcaactttattgaaatcttaaagggaaaatatgattaactgaattttcataataactttgggagaactgtcattcttaggttagcattcccaccaaagctatgtctttatgttggcccactttgttcatttcctcagtaatattttgaggttttcttcatgtgatttcatgtgatttgcttttatactaaacttgctcttaagtatgttagaccttttgtatattattttattttatatattgagtaaaatattcctatttagtattagctatacctttccttctgtttttgtgtacatattgctaccataagaaaacagtataagccgggcatggtggcgcacgcctttaatcccagcactcgggaggcagaggcaggtggatttctgagttcaaggccagcctggtctacagagtgagttccaggacagccagggctacatagagaaaccctgtctcaaaaaaccaaagggggaaaaaaaaagaaagccgtataattttaagaaaaccttattctcagttactatatccagccattcatcctaccatctcctccacatcttttcctgccatgtgccgccaggcatgcttcttgttttctgaggaaaattctctcttgcttttcttgggatgcacattgtcattaatgaaaagatagagcatggcggtgcctgcctgtaatgccagcacttgggaagctgaggcaggaggatctttggtttactggatgttcagtagatggtgggacatagagggttaatcccacaagtcattccaaaaccctgtgagggatttttggtttagcataaatgttaaatttcagatgttattaaaaaggtgagtgaagtttaagatgagcttggagaggtgaaggacggacgtcatcagaggcagttaagtctgtggatcatcttcccctcgagacgtgctccctctgcctgctgcccagcacaagctccctctgccccggtgcgcgcatcctcgcctgggttcacagggttactttactcaggacgactttgtttaagatgtcacttcgagttaaggctccagcatccgcccctcgtggctgcccggtaacttcatttgcactgtgccgggcatgttctgaggcagctttccaacggttagtgatttcaccctcatgtctgtgccaaggaaaacaaccagttaccattaagcacccaccccacccatcacttgattttgacatccagttttattaagaggacgaatcagaggctttggaagacttaaaaccttatctgtgtcagggtattacgtggccccagtaccgcagttgttctaaaggtggatactacacctttgaaggaaatcagagtttagcctttatcccctgacagtgtgcttataataactgagttcctgcaaatagctccttaggactggaaatgtctgtgcacataagaagccaggttttaccttgggaacttagattctagagattaacaggctagcgagcaaatagtcttttatttgttgaaagttaggaataatttctaaatagttcatgtcctagacttagctaacttctttcttttcctgattaaggcctacatagtagacagggaaagaaagtggtatccaaacatctagaatacaaacagtattcagtgctaaaatttttgcatacccttattattatttttttttttactttttctgtatatgagttcctatatgtgtactatgtgcatatctggtgcccagggaatctagaagagggtattagatgtcctggaactagagttacagatggttgtgagctgccatatgggtgctgggaaccaaacctaggtctttataagagcatccctgctcttgactgctgagccatttctttagcgtctgcatacatatttttgtagtagcacagtagacacgctgctgttataattctgttttattattagggaaactcaagctcagagaagttgagcacgttggtcccaagttactcatgtaggaaatcacagagggctcagaagggcagataacaaaggctttacccgtagatcctccaggtagtgtggagacttctcttgaaacacctctcttttattgaggccactcagtggcagtcctctcagtaaagtccctttggtgggcacacttgggccaggtatcttggtgtcctggagactttcacagtgggctccactggtgtcctccatggcgtacctgcgacccatggatgctgttgtgtgtgtttgtcttcaacattacctgtcagtgtggatgatctaacactgactcccttccccctaccctgccagtttccaggcttctcttccttgcattcaccatggaggtaagacggttttttcacattagcattctttctttgttttccttaagattatttgattctggcgacagaattatttgaacccgagtggtgctggctttaaacaactcttggggaagttatccggaaactggagttcatgaagactttggtataagccatacagtcgactcagcatcatttaagaaggagctaagattgttatggtgcaccaatgaaaatatattgtccagatgaggtagggtaatgggctgttgggcttggagcccattagatcacgtttggaatattctatctgggtgccagtttactatggtgagacaacgcctggggaggtggccagcatcatggccagcctctagctgtcttataaggattagttgaaataggacatttagcccagagagagagcagctttgggaatatgcttgttgtctgtctttaagcagtttatttggttaatctggtgaataacaataaagtgaacacgtgtcaaccaagtattctctctcggctagagaagtcattgtctgctttgtgtcatttaccctgcaaaggggatttttcttttttccctctctctagatctcagaaaactgaggcccagcactgggaatgactcactgaaggcagcactaggccagagtcaaaggcttctgatttcattttccttcttgcttcctacgcgccttacatttgtaggtttttgagctccttaggaagggatacatctcaggtatgctgtccctgagagcgagtgaagctgacacccacaggtgctggtgtctggggtggaccagatccgtctctgcaagatgaaatacaaggtctatcttcacagacgtggcaccccactgggaaataaatggacaacttttgggtagtttttatttttcccagtagtcagtgacagagagcaaaactggggcaggggtcgggagtgccgaggatggagggatgagatattagagttcacggaggattttacagagggaaaaaattgaacaaaaagacttgaaatagagaagacagcaagcagagtgggcatctggaggaagaacattccagaaaggagtgatcacaggtatcaaagaactggggtgggagggagtttggtttgtttcaagaacagctacagccagaaggttgtcttgtttgaatgcagtgaacagatctttcatagggttttagatacatgccccccaccccaccccttcgctctccccatgcataatatgaagcttgtccaagggttttgaacaaaatgataatgtgatttgagttatgtaaagaaaatgatttatgatctgggggtttagctcagtggttagagcaggctatggcatttcagggtcctgggtttgattccagtaccacagaataaaacgtatagacaagataagagagtggtttagctgctgtgaagaaggtggtcaaatgctgacacagttttcaaggcagctagctagacctgcggatggactggatagtggtgtgtgaggaagagatttgacttagggataaatgtttgccccaagtaactcggtggatcgggtagaataatgaaagcaaatgcttcgggatgccttgggcggggtaggcactgacaggaaatgaagagtgcgttcatagcatgttagggtgagataccaaggaagctgttgtttgtatgtaagtgtgtatgcatatatgtatttgatctcaggagccagttgatgcccaataagtgaattagggattatatcagtgtagttaacataaaccactccctggaaatatttgttatctcagggccagggaactagaagtgagaggttgctatgaagcaccagaagtgtgttactattgctcttccagaccgtcccattgtagtattgaagtgccaagggccatcctgggcttgcaggggggatctgaggaaggagttttggggaacagcaaaaagaatgacttgaagaaaattgtgcgtatgtagtgccatggaagtgttagtgaacccctaaaaacaaacaggagctgatctgggctccctgcccgccagtcctaacacagcagaaagactttgatgaagaggagccctgaatatggggtaaggctttatagaaagcagcaagcagggggtgaatgtttctagcctggcagctatctaattggggagctactatggcctttaacataattggctggtgctgggagtcaagctataaacttaacttctgctcccctcagccttggtggtgattaggcaggggacaggcttgttgtggattaacctagaaacgctgagttgttgggggagattaacctggatatgctggtctgttggggttagcctagaaacaggaggtcccggtctgttagtttatctgagttttctaaactggaggctgaacttaggatttggtctctcaggtacacgctgacagcctgtgttctgcttgagagacttcctgaagatcaccagacagctcagctctcgcagacccagtcttttatttacttatcaattcacttgtccactccaggttcccttttgattatgccaccattctgcatttttttttcaccttagcaccttgacttctagggaaagacagcaagcacattttcttaacattgcaaatgaatttggagatctgcctgcctttgtaagaacagacaataagctagctgggttggatctggctctgagatcactgcttccatcacgcaggggccaaacgttgccccatttcaggctgaccttgaactcaggaatctgcctgcctttgtatctttctggcaagctgtctcatagtgcagctgtccctgttcttttggcccatgaagctcctcatagaactcataatgcatccttatattttgcatagttgggaaatgatatatatatttgaacctaattttagagttctttcctacagccttaagggatgtcctgaagatcacagcatttactattttgctaagatcattaaacataccctcacttcccagactagtgctgtctctgattatcatggagttattaaccttggcagagacaaggtctcccaaaggaggaacataaagtaaattatgtatattatataaacaagcctcatgcatagcaaccatgaacattcctggaggcctgtgccctgctggctctgctccaggggcggggactatgtcacacagtcccttgtacatggccatgcaggacttgacacttaagcagctggtggagaaaaggcaacctcattctccatgcctgaaaaaggaagctgccttgcaaaaacacacagctccaaggccagcaggaaggaggacccccaccacagcccctagattctgtttaaaggattccagcatttaacagaaattctgcacagacaagattggagggatctagagtagcatgttccagaagcctaagtaaatcaagatttttgaagaatgagatcaattggatgccaggttgctgattggatacaatgagtcctgggagcagaatgctgacctcagcagctttgagtgcactgatgacggcacaagagcttgggcagtgtgatgggtgtgactagggggtcagtggaagtgagaacatgaagagaagaactgaagactactgggttttttttctgtccaaaggaacaaggaagcgatactaacactggggtgaaggagaggatcaggaatgcacgctctgttcaccaaatttatatcctacccgttgatgtatagactacaggcacactgcagtcatacaaacctagttaagggagtcagtgtttgggtggatggcaggccctcagaaaggagggatgtacatgttgatgtcacagtggaagcagtaaataggggacagtcacagaatcccttgtcacaattgcagatgggaaagtcatgcttttccctgtacttgactgcttttcagtagggtcttctggctggtgtgaggaaggtgaggagatgtaaacatctgtggacagagaagcagattacagaatagctgggcttaacatctcccaattccccctcttggatttaggtggtgacctggatataaaactcctgtgtcctatctctatagtctccaaatcaccggatctgtggtggagccttagggttgcatttctaactgtctaggtgatcacgatgctgcaggctcagggaggatgcttgggctctgaatataagacatcattctgggctggagagatggctcagaggttaagagcactgactgctcttctgaaggtcctgagttcaaatcccagcaaccacatggtggctcacaaccatcagtaatgaaatctgattccctcttctggattgtgtgaggacagctacagtgtacttacatataataaataaagtcacccaagtgactttttaaagataagtcacttgggtccagagagttcaggggccagaagaaaggactgaagaactaattaataacaataggccttggaaactgagctgaatgggagagaaacaaggacagtcattgtatattacatttttcaccagggtgaaaatatctgtgactactaaaatggctattgcttcttcaatgtgctgataactcttcattcccagtgtcacatgaggccctttgggcacaaggaaatagaaaggtggtcttgattttatggaccgtagagtgtttggggttggtgtccatggtctgtgtgcagagctcactgtcatatgtgggggtgcatcttcccataaaaccacttccaaccttctgagctggggagggaatgcatactccaggggatggctgccacttctcaccatggcactcgacacagggcatcattccaggtgggctccgctctgcagtgtcagcctcagaggcaggcccctttgctcatttttcaagatcttcaagtttgaactgtttctttcatcagtccagaaatagctggacaaggattagactgccaacttgctattttagaagtgtcctcttaactgagtctcttgtcaaaggatttggttggtcttgcagaaggctgctgggtttctgtgaggcctcactacaacttagcaggatttctttgaaaacatgctcctttgtttgaagcaaaagggattgcttgttggttgtgtcttgctggccagtttccagtaggatctaggcactgctttctcacagtgctggcgtaagcagcctgagtctggtgttatgacaaattacctgttctttattttgtggtttaaaaaaagtctgttcttgttttacaaaattagcttgaaacctcatcagaatgttgctgttagtgccagatgcattttctaacattgaaaaaaaattaaagcagttttatgttgaaaattgctaagatagtacacattttcatacagtccacgcttgattagcctcacctgttcttaatattgtgtattagtgtgatacacttattatgattagtgaaccagaattgacatgttactaactaaggctcacgctttcctcggatgtcaccacccaggccatcatagtgtgcccagccagtctccctaagcttctctggactgttagtttcgcagagttttattgacgaccctgacagacctaagatatttttagaatgtctcattggagatgtctgatgtttctgtcattatttgattgggtttataggtttgccaagattttgtcatgatcaattgtgactatgaaaaaaacatagattactaacaatcaagagccttgctatatggtatccttatgactctcattgctatatggaacatatgttgtgtgacagacactgtagttgaaaattcaaggattagggtgtaataatccaggagagcactggtgagttatttgaaattcagtgtccttgggcgcattgttttgttaggttcctgctattagcaggaccctgtgtttctgtcagctcttccaccctgttctagagaagctattcccaaaggaacagagccccacttagtcaagagccaccccagggcacagtcagctgctgggactctggaaggaacctgggttaaaaggggtggccttaccccttctggagcctcctacattgccctatctaaatctgcatctcagcctgaccagttacatcattgtttggggctttatgttggtgaggaagaggaagtaccacgttataagtggtgtgtttattagtctttctgtttccatgacagaatacacaggacaaatagcttgagggagaaaagatatattttggtttctagtttcagtccatagccactgtgggcctaaggtagggcgcattacagtcatgacatgtggactgtggacgaagctttctcctcaccgtggagacacggacagggagcttgccgccgaggaggtgccaggaagaatgtactggtaggttttctttcctttgatctccgtctttacctgaagcctatggggtggtgccaaatgtccagggtgggtcttccccgttctttaatgcttcctggaaatgcctttacagtttgttttactaatcttaggagcttctcagttgaaccaagttgacagtcaagatcaaggttctcagggcctctcctcatcaacttgacaccccaagcatctccttcaaccgtagtattctgtctccaaaggctcaggttcatatcctagcacaatgcgtcagctcatgtccagagtttgctgtatctttaacccctgcattcctcagaagttctaatccagggtttcctctgagattcaaggtggagctcttagctgtgatgtgttgtgaattacgaagacaagtcatgtgctccaaggaaacagtgacaacaagacaagatgggattggaccaaagcaaggctgctgctacctaacacggcagcctctgatcttgtagctccaggtatcttagacaggcgatggtgtgatgtgaactcccaagggctcgagtactgtccctgccactttcccatttgcaaagcccaaggccactctcttaaaaatggcttggcagtctacctcagctgaccttccgtgttcttgtcatctctgatttcctagagtccccatgtgtcttcagtttcacccttacagctccacagatcattgtcttgggaattctcaccctgccatgcgtgcgtgtactgcctaacctcctaggtcctcctttgaagtctggatgcaggcctctcagagcctgtttcaataagcatgcatgacaaggacatgtaagggtgatatcaaagttggctgccagtttgaacattggcctcaatcccttcacctcagctgtggtgccacctggatggctggacataggcaaacccttccttccctagatggttttgctttttggttctgggcttaaacctagggcctcacatatgctaagcaaatgctctactacacctggagctatattcctagctttcagagtctgagattagttaaaatttgttttatcctgcaatgtgcacggcctgaccaaattcttaaatgtggttaaggcagttttcctaatgtccaaatgaaatatggcttctctttagtggccctgaccatatcttcttcagtcctagctttatgctctatttttgggcaaacagcaagtttttcaaatccgtttgctctgtttttttttctctctctctctttctctctctcagttctcactatggacttggctaagccagactctggtaatgtttttttcaatgtgataacaattcagtgtgaatgatgagctgactgtattccccttgccttgttagtctgttaactttaaatttagcctaaaagtctcaacaaaatgcacccaagttcttttaaaaattaatctgagtggcctctagttcacttccattgccatctgaaatccccgtctgaaagctcgctcacactgctgcgtgcttcatcctgctcacttacctaaacctttccagcaaactggctctaaagacttaaagaatgatgtgatcaggttagtcatagacatgtccctactcccagtattaatcttctgtgttagtttttccattgctgtgaccaaataactgagagaaacagttcaagggtagaaagatttattttgcctcatggggttcagaggtgtcagtccgtgaccactggttccatgactgtgagcttgagggaaggcactgcaatggtggtagcatgtaggagcaacttggcttttgttgtaagctttttcctttccccgtcagagactatttagggtccagtctgtgggatggtgctatccactttcagggtggctcttctctcttgtagtgaatttcttctgggactgtgttcacagatacaccagagatatggtttgctaatagtctaggaaagtctacttcagtaaagctggaagtcaagcttaacggtcataggtaggatagaattctccagttaactactctctgatccagtcgatactcagctagtaagcactggagtcagttatcctcggcatacagtaggtggtaacaaaacacaactggatctcatcaagcaggaccaagagcaggagacagcacccgtgaaatagcaagaaccaggcacacgtgcttgacttcttaaaaagactctcttccagacgtggaccgcatacccttgctctgtgaagcctccacagatctcacttcattctttgtacctttttgtattttacaagcctgctatgtgctgaccatttagctttaataccccgaattttttcttaaaaaaaaaacaaaaacaaagcagaaaacaacacaatccagggtttctctatatagccttggctgtgtagaccaggctggccttgaactcacagggatctgcctgcctttgcttctgggatgctgggatgaaagacaagcatcactaggcctggttgcattagttcctttgataatgtttatttgtggttctcctgcttttaaaccaggtctcactcttttgcctgtctcctagactcaagtgatttcttgcctgaggttgtcagtcagctgaggccatagatgtttgccgttttgagttgttgtgtataaagcttatgctgtgtgtgctttagcgtcccctttagccccttcagcaactctgtttgttaggtgtatggctcaggaaggctcagggagttttaatggcttattcaggcttgcgtggcatttttcttgtctccgcccccagtgtgaggtctccccactgttgcctgctctttctgatgggatgcacagaccctgtgcttggtgaggctttctttcattttcttgcactgtgctgcagctccgtttgggtttttttgtagatttgatcaaagagccatatgatcctaatacgtcttcaggcttcagagctgaaccttgcagtgggtgcaattgccaatgtcagacagtgtttccaaggctaaaagtgaatgtcttactgaccgatcctccatgttataaactgccgctgtggaactgtttatgtagagaacacagaaaacaggacttgtataatttctttcagagcacattgactcactggcactgagtcaggcatgccagttttgaagcttcaacacgaagccatcccgtatccttggaaaccatggcttctcagtgcttgttttaagccacagttttccttttaatgtaagtagattttgatggtagaaagaagttgtcatgtggaattactttgtgaagtcatttgaatagacttgaaacatcgtttacacataagtaaactcactagtctcaaagatgcccgggcacagcatggtgtacgcccccaccagaggcacagtgtgcgcccccagcccccttcattgcaacacacatgcctgcatctgcagctcagcctcggaggagatggcaaagtctctgataggaagcaagtggggaaggcactggttttctgtgactttttatgggttttcatcaaaaagcttcttttccaaatgaattattttggtgaggtatttttgttgtggcacaaataaagagaagttgaggtttgttttataatttttccttttttttttttttttgatactgcttttcaagtaaaagttggtatgagcaattttgttcacatcctgcatagattggtcaccccgtaagcaggggtttattgcgtccgtgctaactcctgtgcaggggagactccaggaagtgctgggttgcttaccttcagagaccctagccagggccttcgaggtagctgagcccacaggcactgtgcatcacattctcgctccgtgcttgcttttctagaaacagtgagaggaggccccatggcgaccacgagaactcccctcctgccacacacttaaaaattaaagtggacaaatggcatgccattaacaaatcagaccctagaattaaaagttgagactcccgttctgccctccccaaccttgcccattttcacccattagggatagctgccacctggaactctctctgttttgacttctggtggttatctgtaaaacttgacaccaacttctttgtttctgttatttgataaatgagtttttagatagcgcgctcttggctttggctcatgaggaatgaggaattcagggcattcctcccacggggcctcttccttttcttctgtcttaatactagtcacatctttacataatgaagcttagaaataactttatatttgatagtattgctatcaactattgtctgtctgtgcacggactgagaatggagccacgggggactcccttcatcgtatgactgtcaatgctgatggcctgaccccaagcagcctccacaatgccacagcccagtgactgggacaacggagagactgtttaaaagatttaaaaatgtaattatgaatttgtgtgtgcatgtgtgttaggtatttacactacatccgtgtaggtacccacacaggccagagacattgggccctctgtgctggagtcacaggtgcttgtacgctgcccagcgttggagctgggaagcaatctccagttcagcaagaacagtacgtcctcttaaacactgagccatctcccgaacgcctgaatagatttcttttggctatattttaattcatttgcttagttataaaggacaaagaatgtttctctgggttggatacgtgaattccagccatttgtgtgtgagcaacatttaacgttttgcttgaaaattgaaatagaatggtgcctcctttatataaactgccaaacaatagccctaaagctagagttaagctatctgcaaccgtacattttcttccactgacagagagaacgtacaggccaggttcagaaactcttgtctcttctgtgtcctacaaatcctgctaatcgggcagtggtggcgcacacctttgatcccagcacttgggaggcagaggcaggcagatttctgagttcaaggccagcctggtctatagagtgagttccaggacagccagggctacacagagaaaccctgtcttgaaaaaccaaaccaaaccaaaccaaaccaaaccaaaccaatcctgctgatctagtctccacatccccagtgacttaaatattacagtttagtgataaagctggcattgaaaactcattctcaataagttagttactgagtgaattatctctgggaggaagctgatcttgtgaaatatgttgccctgctcagtgatgccactggctgaagttgccttcagtgagcagactagctgttgacgggtgtgttgcctgcagtaaacagactagctgtcgatggcctgcagtgaacagactagctgttgatggcttgcagtgagcagactagctgtcgatggctgtgttgtttggggagattggggttgagattcggtatgtatttcttgccttcgtttcttgagcattttatatttcttttcctatgaaatatttccaaatttatgggagcgttgcagaaatagtaacaagtgctctccccctgttgccattgaaagtaaattagaagggccctcccagctgtaccaggggcatcagtaaagcgtctgcaaacacaagcgtttgcctagataactgcggtgcagccctggaaatcagtcagttcccattcacacctcagcaacacccaatccatccatcacgtcaagtctcaagagtctccatctgtttccgtgtccttcataccaaaaggattccatcccgtaccactcggtagctgtcctctttccttctcctctcagtctgaggcagttcctcagtcttctcttggcagtcattttataatgcctgtcattttgttttgtctgatgtttcctcatgaagatggtaagcattcttacttaagtcctaatatttatataatttgttcagtcttgactaatgcccatttcagtttgtcacaatatggacattcttgcatgggaagatttgatcagggtgatggctgtcatccttttcctcagtgaagttaacccttttgacttagatgatttcccatcgaagttcctcccactggtttcagcacacgtttatgttgtctgtattactgattactttctaattccttcatctcttctactttcatccgctgacattctagtgtaagaaaatatctagtcttctcctgtctgtctgcctgtcagtgtggacaggcagattctctctgagccagtgggttgtcatgtggtactgtaactccttactgtaaggctcaagccccttctttccttcctcattctctgagaacagcttcctcactgcccagtagtgactgctctgcaggcttccctctgcccccaagggaacctgtcacttgagggccttccggttcctttagcgcagttttgtaggagttaggatctgggcctttgtgtcttctttgcatctggtctacctctgtccccatccctctgcacacacaggcatgcctgtgtgtgtctgcatgtttatatcctctgcctctcttaccatctacccatgttgaaacctgaatttatacaggcatactgtaatccagatccctggatctagtgtaatccctggatgtagtggatccaggggctcatttgagggcttttgttttacagttcatagttatgaccacgttctccagcactgtgagttctgctacctgcctccatgacattcactattcagccagttcccagtgtgtatagtctgtctggctgttcctgctgtcgtttcacatacccaacccggcatgccctccacccaggactgcatcttcatctacttgggttggagtccttgtggcttgccctggctattacagctgtgccaggatcccacctcgtccatatcttcaatgccacatggaattttactttatttggtcctatcagaggggaccaaattgaattgttctactgaattgttcagaaaggagcaaaaaatggggttggggaaaattcacatttttgtaacatttccctctgaagcagactgtgtgtggcccatgacatccagtggagtccttttctagtttaaccattttttcttttaagagttacttacttttattttctgtgaatgagtgtttaatgtatatgtatgcaagcacgccatgtgcatgtccagtgccttcagaggtcgatagaaatgtcagctctcctggaggtggagctggaattataggccactgtgagccagccaccatttcagtgttgggaactgaatttgggtcttctctaggagcagtaattgctaagctagctatgtctgcctcctcccccaataagcctattttaagttgaaaatgtatttagtacacctgacttcctgaacaatgtaacttgattttagagagtctcccctaacccacaactgtatataattgtttaataacatgttttacaataaagggtaaatttgtaataaactgtagactctctatataatttattatctgtttctcagaagacaggaagagtgtgaaatcctcacctgatgtagtcatgttacacagacttacacttacgtgtcttaccactctagtggccaagtgtatttaaaatatacagcaaatgtgtctccttagcgcagtaaggagcatcggtgtcatgaaatatccattttgtggcagtctgtaaggttgatatctcacagtagatgcatatgcttacaagtctgtctctccataaggggccagaaagtcgagaatggtgatatctgatctaattatctctgccctaccctgcacatctagttcatcacggtctacgttgtaggtttacaaacagacccactggagaaatgaacagatgctaagacctgctgggttttccccagtagctttcgggagagtacccggtgtccttaccgtagtgggaggagtctgtatgcctgtgcactacttagtgaagctgctccgggttattgcagacagcgttgtttaggtacagctactacagtaacacttgtgtacttagggttgtgattttgttgttgttgttgtttgttttgttctccatgtctgattttgttgtgaagaaaaagctcacaatgtgtggtttaatttttttttttcagtttactgagatttgtgttttggttcagaatatttttttaatggtaaccgtttcttgatcatttgcaaagtaacacattctgttattattgagtgggagtttctaagttaatttggtcagatttgtaggcaaattaggtaggtaggtggttttttaaaatagcattttttattcattttctcatgtattgagagagcagcgttgagccctgtgacagtgtctgcttccccttgaggtcctgtcaccccttctttatgttcccaagctctgttactcggtgcataaacatttagaaattctttaaaaaaaatagagaagaatgtctactgtattcttttgacatgttggtattttaatcataaaattgccttctttattctagtaggcctttgtgctctgtctggtgttcatccaccatgctgtctttctttgcacagtgttaataagccatatattttctgaaccttttacctgttaacctttgtgcatttttatatttaagtggggtttgttctttttagatagaatgtggttgtgttgctttattaattctttgataattccatacatgtccacagtgtgtcttgatcatagctgactcctcccccacacccttcctcctccgcaacacagcccctcccaccttgatgttccccttgcgtatctagtgggataggctctgcccactgagtgggatgcttatccaggtcttaggctttttcttagcagctctgggtcctgaagcaaggattgtgagcaagcagggagagctctgtgttgagctgaattccagaccattttagttcccattcattgatactgttgctgaatttacgttccacctggtatctgtgctcactttaacccactgttattagtctctttcttttttataggctccttgggtttttatgacttgtcttcccagctctgttgtatcgttgctttcaagtttataatgtgggatttacatgctcacaggttgcttttcttctatcccagtgcagtggtttggctaagtaccctcagcagcctaccctggagaggattggttgctagacagtggtgctcctggggcacaggaggactattacccggtgcagcctagtagataaaagttgggtcatggagtgagtcattggtaggaagactaacactccaacccctcctgtatctctttttatttgtaaaacaaatagagaggtgcccatgaggtgacattttcttcaactgtggcctgccaccatggtggaattcctcatcagaggcccagaaacaactggccaggtgactgcactgaaactccaaaagtgtgaccccaaactcacctttctgtcctagagctaggtcatctcatgtatttccttacagtgataaaaagctaagactccagtgaagttgcgctacttttaggtactttctttcattacaagcctcagaatacttatgcagagctgttgttttttctgtcagcagttgactacatcagaaatgctttagcattgttgagccctgtgggtaagagcggaggaagcaggcgattgattttgtcattgtgcagacagcacatacaaatgtaaacggtgtgagtcagttgtacctgtgcagatgccacggccatgctcgtggagacacatgggtttgcatggtgaggtgtgtgggtgtgctgctagcatagctcagcattctgttatgtccgcaacttctctcttagaagcaggtttatactctaaagtgaacacgggcaccagcgatgggtatttactgttggtggctcttcaggctgtgctaactctatgtgctgtttattcttttacaacactcagtacattaggcttacttatatgcaagcatcacaaggaacatactataaattgtggcacagcattaaaatagctcaggtatcccatggaagaagaattttctagctctgttaggttttgaggggtcaccattgttatgttcaggccagcactgatggacacactgcttggtggcccatgactaaaggacaaggtcgtgtctgtccacacacttactcttgatgatgcttttcattcctggattcagggacgcatctccatctggaaccattttccctatgtctgaaatatttccttttgtatttttttgtggtacattttagttggtaattgaaaactttcagtatgtctgaaaacatctttgtatttttctcattttgaaggatattttgctggacatggaatctaggttaagcttttgttttttgctttttaattctttaaaggttttgttccattgtccaggcatcttaatatatccttcctatgtggggggctttttctcaggctgattttaaggttttgttgttgttgttttttatttttattttattattattttatttatttatttatttatttatttatttatttatttattttttggtttttcgagacagggtttctctgtgtagccctggctgtcctggaactcactctgtagaccaggatgacctctaactcagaaatccgcctgcccctgcctcccaagttctaggattaaaggcgtgtgccaccgctgctgggcttgtttttgcttttaactactgatagcaatttgattatgatgtcccttggaacagtgttttgttttgtttttttaacaaagatattttataatatttttgtgtactttatacatgtgggtgcacaacacatctgtatatgcatacatggccacaggttgaagtcctgtgaggttttttgcttctctgcttgtttggagttgtgtcttatttggttaggctggctatccagtcagccctggatcctcctgcctctcccttctagcaccggggttacagagtgtgctgccccgctgtgctcttgcgtaggaatcagggatctagcctcaggtcctctcaggccctcctgctgtgtggcaaggccctcgcccagtgtgccatctccccagcctgtcctttcctttttatgtatgggattgcttaagattcttgaatctctaggcttataatagttattaaaattggaaaatttttaactaataatttttggaagtattgttttttttgtctcctcttatatctgctatttgccctttttggattttgctcagttgtctgatggttcctggaactcatgcctctgcacataggtgcttccttgttttgattttgtgtaaaccttatttctccctgggtttcatatggacttaattccctttaaatatacatagctacttcatttgccattaagcttactaatctttaagtctataacatctgatttgtttatctgctacacacacagaggtcactctccctctgatttaaaccattgtgactaaatctcttagaagatcaaaactagggaccaggtgtaattggtggcaccagtcatcacagccgtgaggaggtaaattctaaggttttggctttttaattctttaaaggttttgttccattgtctagtcatcttagtatatccttcctatgtggtgagctttttcttagccagcctaagcctcatggttaaactctgcctcaaacaaacaagggcaggacttgtaagagatagagtacttaattagcatatacataataaaaatttcaatttctaccaggcagtgctggcatgcatctcaattccggcactcaggaggcagaggcaggaggatctctgagttcagttcaagggcagcctggtctatagaatacgttccaggacaactaaggctacatagagaaaccctgtcttaaaaaaaaaaaacaaaacaaaacaattcactttccagcccccaaaaagggaagaaacagttcaatttgggtctttcagatttttcttatatttctccttagtgtgttcagtctattttgtagtgttcaaacataaatttttgtggtggtaactgtttttaaggtcccgtttattaaacttgccatcagcggtgggccactttgaatggaataattttgctctcgatcttgtgttgtgtctttttgcgtctttatagatgtgatgattttctgttgaacctcaggcatccattgtaaatcttcctgccctgcctgctgcgtgttttacattcttatccatggttctgagctttgttctgagacacagttgtcttgcccttttgcttcaggctttgggctaggatgtaacccagacagttgtctctgcttctgaactaaaacctcctcagagcttgattatggctcttcctcagttcttagcccggaaactccctctaggctgtgagctgtggccatagggctcctctcctgtgattccctaactctcagtattaattactcttttctgaggctataatgacaatcttaaaagagccattgtttatggtgttttcttaagttcagtaaaacataaaaaacaaaacagaacaaaaccttcagggttatttcaggtgagaattaaatttggcccctgttactttgttctggtcagaagaatggattatgctggccctaaagattttgctaaccaaagagcatctttgtgccatcggggtgtcagtgacttttctctgcactattctttagtggagggcgtgactcttacttggacaaacctgtagctttgcctttgtctctttacattcaagtttgggcccactttatggacagccttcaggaaagcaggactgctggagcagtgtagagtcatacggtccctgtcctttccacagagcgctcagagcctagagctcctgaggggccacatgagaccctttatagcctcagctccttaatcgggagagctgaaatgtgagtaggaccctttgccttccatttgactttttttctcactgtagcaaagtgtccttatgtaattctctcccccaacccccacacgcacgaatacacatgcatacatgtgtgtgtgtgtgtgtgtgtgtgtgtgtgtgtacgtacatgtctatgtgtacagatacgtaacccatatcgctcaggaagcttaccatgcatatagtctgaagtcttaaccctcaccagatctttttttcttatcagtgatcaaaaggctttcgaagcactggagaatgtgcgaggctaggaaagaactaagtcagtgggatgaacagagaggaggagagcatggtggtttcattttggaacagacttcaagacttgtgcgtactagaaactcgactgtggaaacgctgtagtaattttgatctgtgtccagtgaaaactgtagtgaaactgccaatatagaaggaattctgggtttgctcattttcttcagatagtgggccaaatggagaaatttgttaagccaattctgaaacactacacccaaaactaaaatgagtaaatgtaatcacgtgtattggcaataggggattccttgaaaaatttcagattttcttataccagtaataagaccacgtgcataaatctgaacgtagcgtgcagatgggacaaagagggcaaagaggtaatggatgtgtggacccagcagctaattggaagttaaatttgggcatcagcccagatagctagctgtaagagctttgaaatactgggcaagtcccttcctccagctccgtgttctgtttgcatagttaaggtgagaacttgattaaaggagtctaaagtagctcctaggagattctttgatcttcatggtgatcttaattgacataagaccccgtttgttccttaattcctagaactaacagcacaagatggaagcattgctttacctgtaactacattgtgttatctatctaaaaggccattatcctgtgtgtttgctcagctaatttatagaaatgtttggctcacagcagttccgataattcttaaatatccaagcctccagcatgatagaggtcacctttatagggagtcttcaggggctagattgcaaaatctagctccccaaagtattttgagcagtgactttcttgctgggataaatgtacagaaggcatgactaataataacaagaatcattacctatattttaacagagagaaatgaggtggtaaaattatatacccttacaataagcctttaatagtattgttgtgttgaacgtgatggctcgtgactataacccttgtcctttggaggtgaacaaagtttacaaaggagaattaggaattcaagttagtccttgactagatgtgttgggtttgagagcatcctggactatgtgaaaccctgtctccaaaacaatacaaaacaaaagccaatagccaagtcacagagtcaacctaggtacttatcaatagattagtgttatagaaaatgtggcatttatatacaatagagttttattcaactatatagaaaaatgaaattagattgtttgcaagaaaatgggtggtggatttggagaccctcatgtttcattaggcaaaaaacttcctgtttgcattcctggttaatgtcaaccacgggccttctcgctttaggctctgtcttttagatgcagcgtggcttttctggaactctgtgcagtgagtctgagttcttgagctgtgctgtctttttattcttgctgtctgtggacctgtgtggcagtctgtctttcttgcttctccttcccagcagagtcctctccatgatggtgatggagcttctgcctgctccacacagcactgacctcatacttggagaaactccctgtgtgtttacagatccaagtcttctcttcacagttcaacactactgctttctgttaggacttagccacatgccgtaatttcctttccaaatgctcttcttatgaagtccagttaattggaaatactacataaagttaaaaatgatctttataatcacccagggttgctaactgtaccactgtttacagtgcagtgaaggacaggtgcagatgacaaggagccaaaagtgagtgctggcttgcaggccatgtgcttatttgaataaaacctgagccgacacctttagttccagtacttgagaggcagaagcaggctgatctctgtaagttcaagtcagtcagggctttgttatacagaaaaactgtgtttcaaaacccaaaagaaaaaagaaagggagagagggagggaggcagggagggagggaaagagagagaaaaaaagggaaagagagagagagaaagggcaggagggagggagagaaacagggtgagagagggggggagggagagannnnnnnnnnnnnnnnnnnnagagagagaactaaagcccacgacatataaaatactcattagtcatagttttgtgtgctttaagacagattgagaaaaagagaagccatgtgacttgggagggaggctttcagaggagggatgcagaaagccacagaattaggagaggagtcttgagcccaggaataagagaatgcaggaaggataaaggttaggacagtcggaggggtcttggtggaagcattgtgtagggcagctggtgtaatgcggtgtgtcctgagcacagtgagacctgaggaggtaggccttttgaaaccagtgtgttggcaaacacattcttactgcactgtcttcctgtgagcaaagattcagatctgcaagctatttaaccagggttaaagatacaactgatggccacaagccaaaacagactcaaatggttcatatgaaagtttattatagcaataaaattaaaatctatgctacacgcacagtatagcttcactggctgacatgatcagtctgattctgaattaatggagactcttgaagttgtcggtttgaaatgatgcgtgttggttgctacaattactttgctacatttaatctaacagttgctctttggaccgtggtggtctcccctcccgttgttaccactgtttgttgggctttgttatttctatccacttttaaaagaaacttgctgtgtctaggcagaaactcctaggttaaagcagtcctgcttcagcctcctgggtcactgtgctgggaccacagatgcgtcccacgtctggtccctgagcatagaggttctcatggcctcttgggtgttgtaaggttgaccacggttttgtcccgtgctaagcctggggtgtcttgtctcaagaaaaaaaaagtaaaatcaaataacaactcaactgcttcttatccctgtctgtggaatgacttgagcttaactgtatagctgtaatgagagacgcggccccatcttccctggcatttggttactctggtggacctacttgagccatggggctggctggatgtctctctttctgaacagcctttccaccagactagcttgagctccctcaccctgtgttctcagatttcttacactgaagctaagaagtgttaggttttccaggccagtttaaagtatcatttacacaaacttaattaagtttaaactattcttgtattcctgggatacattttacttgcttgtaaactccccctcccatccttaaaacacattggcttggatttgctgccctcttacttagtaatttacagttctttataagtgagacttacacatagcttcatggtttgtgtacattcctgtgcaaatcaaaactggtaagggtgctactgtaaaatgaatggagacactgggtacattttcccgtgatccgagatgggttatgtaatttagatttaggtgactctccctattctctttgccatcttgtgctgctgtaacaaaacacctgaggcaaacatttagcccattattgcttggcatcctcctcacatgcgaaatatatttatttactccatcccaataggctcaaaagtctcagctcattcgagcatcaaatgccgaactcaaagcctcatctgatcagacacaggtaggcaccaggcctggctcattctgaggcagatttctgaagtggaaacttaagggttctttggaaattcagttgtgttggatggtgttttgctggggcaagcacgtaaagaagtgttttcctggagtggacacaggtgaaaggctaaggtggactcatgaagaaacatttcactgaagcagacataagtgaaaggacattctgctaaagcaagcctgtggaaggacacatgatgaaggattcttcgctaacaaacatgcatgtattggtctgccttacattgcgtagttgagctgcatctgttgggactccatagagaaaaatacaccaaaaaacttatggtggtgtgctgcagtttcttgctgcagactggggccgattggcagagtgatgtcagctgacacagacctaacatgcctaggcaagctacatggtaaggacctgtggaggacacgtgatgtttggagggagtataaataggtccgacggcctgtaccggaggctgggctaggcttgcttatcttcacttcatccagagaggcacagccaagaacttctcctggcgtcctggcatccctctgtccctccaggtccctcctgctggtctgtgctgaggctgaggcctggctctgtctgctaggtattgcaaccgctgctgattcgtgtttgctgtcccgactttattgagctggactgctggaatatctgtgaagtctttgtgagcaaactgccactgctgacctgtaaactgaactcttaatttcctgacgtcacaggtgggatttgctccaaagaaccatttctaaacaggtccagtttccccttatcctttcttttccactacctctggtgggtggtaggctagaagggaggttaaagcatttaagaaccatcattaaaaataaagtttggagccaggcgtgttggtgcacgcctctaatcccagaatttaggaggcagaggcaggcagatttctgagttcaaggccagcctggtctacagagtgagttccagggcagccagggctacacagagaaaccttgtctcgaaaaaccaaaaaaaaaaaaaaaaattgaagttagagatttccttctagcaggagttgagcaagtttctgaaatgcagtggggggaagtcataggacagacatgctcttccaaagggagacatgggaaaagaaacagaagggtcgcaggcaagtaccatccatgccgaatccctcagctgtgaatgatctcttttattcctcacgttggcttctagctagcagttggcctctaccatgactctatccatgactctgcctggctcagctcataagatgggtctcgtaaattgaggattcatgttgtcaactttatgattctagaaagtcttgagggtagctttacccccatggttttataatgcattgccttagaggggactctatggcagcttcagcccctggctccacttggccttgtcctgagacattcttagaaatgtctgtagaggtcgttctccactgactgcagccccgggctgcctggtgtccacactcatctccttagcagttacgtgaccacatccttggtctttatgttctaaagtcatttgtttccttttacattttataatgcagttaaaaaacaaaacagcaactggaatgctctgcttcttgggcatgtctttctccaggtttttttttttgtttgttttttttttttttttttttttaatagtatagaatagagtttattcagggcatgagagggtagtagagacagagaaaggaagagacagagacagacagacagacagacagacagtcagagacaggccagccatgagcatgtagagagaggggggcagggaaatggggagagggagcagaggtgagaggacagagcatgcgctcattgccatctgaggtttcatcagaattgtctctgcttttcattggaagaaagttgttagtggtcagcacggtcagcccaaccagcgttctggtcccgacctcatactcgctaaggagggaagtccagatgctcctgatggcacagctcatgttctgagcatgggagacccagatctgcacacctcatgttctgagcatgggagacccagatgctgcacacctcatgttctgagcattcacaaaacccctagtcctctattcacgtcaatctcagtcttctagcttgttcctacaaattctttctgtcctgttctcactatccagttccaaagctgctttctcacttttaggtaactgttatagcagcaccccactcctggtcccagtttcctctgtttctgccgtaacagaatatctaagatttagcaatttgtaacaaacagaaatttatttcccatagttcacaagactgaattttaacacactggtgtctggtaggcctcggctgcatcaaaatactttggagcatcaagagagatggcttagcagttaagagttttctattcagccagtgaacctgaattcattttctgggacccatatcctgctgctcataatcatttgtaactccagctctggggatccagtgccttcttctaaccatcatgggcacccacacacggcatgctatatatcttgtacgcgcgcgcgcgcgcgcgcgcgcgcacacacacacacacacacacagatattacacttagagaaggtaaagaaaggtccagagggggaaaagaagggcaaactcaaccttttatgatggacctatggatgaatcttggatgaagtcataagggtagaacccagtcctaaactctgcctaaggatccactcccaaggctattacaattcagtttcatcttgcctttcaaaaggacattctagtacctataaaccatcaggacctctgtcccctccccactctggttgtcctttgtcagtctttgctgactattatatctgcgggtttccagccctcgttgagataatttggtaacatattttgctagagaatcataacttaaaacaacttactggcatcaagttgtccgtattccttcagtttaaagatcacatccatatctgcagtttgtttcttttctcatctctagttccaaagttcttttctgtgtacttcctcaagtgtgtttattgtgcaatgaatacattttaaattaaacttgctaaaatgcacatggatggtattaggaacaaatctgggaatgatttagcctgttcttaggccaagtgtggcggttgttgcctaaaatgagttatttgagttgtaaattggaaatgcgaagacttgattattgttctgtgaccattgccccatcatccttgctgctggttctgagaggacatcttagttagacttgacattctcatttgcacatgctctcaccctccacaccccgcccccatcttctcagtagaactttcccacccacagcgctactagttacttttcaatgaaagtatattaattttatatgtagcgcaagtattgtgttttatttgctgccattaccatgagactgtgtgttctcaactatgtgagtggtctagacagaggaatgtcggaggctttggggtagattcctggtttgggagaataatacttaataaactcttcaagtattggagggagtcccatgtgtccgagagtgctgtaggtgctgtcgagatgcaaatgatttggggcacatggagcgcacagtggtggagctctggtcgcctcccagactgtccctttggacgtagctcttccatacgttgttttagtgcatcacttcctttctgttgtggatatgcaagacattctactcctttaatgactttgagaagtgatttctaatcccctccaaggcagtccccttgcacacagcgtccagagccctgtatggccttctttcaaatggtagcttgactattgcttctttcaggcaagccctttcaggaacaagttatctcaggctgatgtatctgctttgaaaggataattagatttgcacagatacataactctagtatgtgcttgatgagagatgcggttatagctttgtcagcaagatgaagaagtatgagctaaatgacagagaagacacattgataactgcttaatgactcactatcagcccggaaggaaatgtttaataccgtggcacagggctctggttttgatctagtgctgttcaacatgtccactccttccactgctcaccagcaaagtgtttgctgagcgcctcatggtgggaaacgcagcatgctggggttgctgggtggggggtaggggtggcacatttacctcacgctactagcagatgggaactttgatttctaacatttaaaatacaccagcagccatctgaatgcaacattattagcatcgttattagtacggnnnnnnnnnnnnnnnnnnnngggtggcgagggggagggggagcatataacagtgaacaagggatgcattacagtgtaagcacatgaacaaagacttgctgtgcagtgcagttgtgatgtggagctggtagacaaggggagtgtatacacagcatgaagatttctgaggagaggaaagccagaagagagactcaatgcatcctaagtttcagtatgaaatgtaattgggacgagagttgtatgggaagaaggaagcttgccatgtggataacagctctacttatttgtttgtgtattttattctaaattgtgtgtttgtaaatgtggaactgtgtggatttgtgcgtgtgagtgaagtgctgagggaagccagaagagggcgccagatttcccagaaatcgagttgtaggtgttgtgagctgcccagcatgagtgctgggagtcaaaaaccagtcctctacccgagcagtatgtgcttagcatcactaaggtgttcctccaatgcagcagctgtgctgaaacaggcacccagagcctttagtcactcgtcaagtcagtgttgataatcagtgaggtctgaggagttagaaaaagttgagttacatccacaggcatgtggtatatccagaatgagaaatggtagggactttctgctttgctaactttaaaaaatgatctcaagatagtttcccaggcatttttttccatgctcaacacattgtaagaaagcataattaaacatgttagtcaatatatttcctaggacctgagaaaaatagaatcagtagaaatcaaaacattgacttattgtatactctgcagtgaagatctcgacagtgagatggacctgcacctactgagggaaggagggaaggagagaaagggaggggaagagaagagaagggaagggaagcagcgcaacactcgttgaagcagtgttctgagacgcctgtgcatagtgctgctacagacacgctcaggacctcagcactaacagggtgaggttacgtgttaaggagtctgggggcctgtgctggacaaatgaccacagtgtgatgagggtcatggtcccgggagactgcaggccctgtgtacgtgtcctgttgtgtcttagagctcagtgtccttatttaggtttgtgtggttgctggcacagctcacctccttgtggttgtaggagtcagcttcctagttctcgctggtcgtcacctgggcctacttcagctccagagaggctgctctaggtccttgcccagggccctaccccacaggtcctgtcatgctttaagccccgtctttcaggaagagctagtcactttaagagcttacctgatgaggtcagacctagcgagtgtattagtgtgggctgccacaagattccagagtctgggtggctttaacagaaatgtgttttctcatagatctgaaagcaggaagtctgagatcagagtgcccacatctcaatgtgtggggaggccgtctttcctggcctgcagacggctgccttctcacagtgtcctcccatagccttttttctaggcccgagagggacagttcttctagggcagtggttttcaaccttcctagtgctgcaaccttcagatacagttcctcgtgttgtggtgaccccaaccataaaattattttcattgctacttcctagctgagattttactactgttatgggttatagtgtaaatatgttttccagtggtcttagcccccgtgaaagggttgttcaaccccctaaggggttgtgaacacaggatgaaaaccactggtctagggccaccaattctattgtattaggatcccaaccatatgaccccatttaaccttagcttgtaaaagccttatgtatttatttgggaagttaataccttaacacatggaagtgagcaggcaagattcagttttagtatcttgataatctttttgactaattcaaaatctacagggaactgtgttataacttcgtaatgcctccagactccttcattgtataaaagaacaaatctgcgagaagtgtaacaaaacaaatttttgcttattttgcttatttcctgttgtcagttcactgcctagcacagcaaatctaaatgaatgtttatttgttcaatagaattattaagtaaataagtgtatgatgttccagatacaattattttaaaattgtaactcagaactgaccttaaattagtgattctcctgccttggcctcctaagttctggaatgagaagcatgtgccgccacgcatacctcttctctctttttaaatggacagataggctacctttaatcaaaaagcttatctaaccatgcctttttagagcccgtgaacactcggtgctagtacagagtctctcactgttgtccctcctggtgactgatacacagaggcctgaacgtctcttgaacctcattctggtgctgtgatcttgcgtgactactgttgagatgcatgttttggatattctgacagcagtgttcatttggacggaggaggctgtgggctgtctgtggaggagagtgagcactgagaggcctgggcagtgtgctgtgtggcagtcagctctgtagcatggtgattgccatctgttctggatgcgtgatagaaatgcatagtgtaaaacatcgataggctgtaacccttctacttaccaggaaagaacattttttaaaaactgatgggtaatgttaacatgactagacgtatatatatagtgtgagagatgtcacagttgtgaaagggacagctgaccataacccttagaggcctggagaacataggtttgtacttaccagagaagggagaaagtggcttgggtctggctgtacgaggcaacactaatacttatttattcatttattcatctgtctgtctatctgatttttggaaacagggtttctctatgtagctctggctaaactggacttgctctgtagaccaggctggactcagagatttgagtgcctctgcctcctgcatgtgccactactgccacagcactaacattttaagctatgagtttgtagcttgtgatatttctagttgtctttaagaaaatttaatcccaggcagagtcaaaaagcctctgtaatcgctgtctaaatgagaaccttaaactctcttctggcctatgagaggaaagccctggagtctagactgttgctggcaggaaagcctgaggtcttctgtgctcgctatgaagattgccgacaggtggcacaggtgaccggggtactgggtctgcaggacagatgggccaccgtgaggagctcagcactgaaatgggggtgcctcgaggaatgcgattgagaaaagcaagagctgacatggaaaaccagccaggggcttgttagctgggtgagaggatgattatggctgttgtttctcggtgaatagattagaaatgatcttttaaatcagccccttactgctaaatttgttgacactatccagacttcaggctcctagattcggagacagtggtcactgcttcccggagtgtctctaactgctgtgacatcaactcttgcagctgtcctggtctctgcatagtctcactttggggttttttgtttcttcttttctaattcctccagtattgacgttcctctgaaatctgttctagactctgctctctctcatcctcacagtcttactgggtgacctcattcactctgcttgtgttagtgatgttatgaaatgttgtaatgtttcataacattattagcatctgtgtgctaatgattgccacatttttatccccggccaaggtctatctcccagcacccgtctccataccgaacaaataccccactctactacagatatggcatcggcacccctgtctcaagtagaacttcccgagtggttcttcttatgctcccacacaatggcagcacttttgtcttgtcctctcctgtgatgtgataaatgtgtctgtgtcatcgtcattcagatcacagcacaagattcctttattattcagaaagtcccctcatcctctgccaggcactctgatatggtgttccagctcctggctgagctagttgtttgccaggttttccaggtcttcagctctctctctctctctctctctctctctctctctctctctctctgtgtgtgtgtgtctctctctctgtgtgtgtgtgtgcgcgcgctgcctgccaccatgcttcctctacttactatggactcaccctctggaagggtaaggcaaaataaacccttccctcctgtagttgcctttgggcatggcatttcatctcagctacagaaaagtagctagtacaacctttgacaggattagtagccagaacatacaaagaaggtaaacaactaacatggaatcaaaacaacccaggtaataaatgggctaatgaaacaccttttgagacaattctcaaaagatgaaatacaattggccagtaaacctaaggaaaaaaggttcaacttcactagaatacaaatcagaaccaccaaaattccatgctagctgagtcattgagatagtcatcgagaaaacagttaacaatgtgttggcaaggatgccagcaaaagagaaacccacacactgctggcagaagtgtgctagtccagcactatggaaggcactataagtagatcttccatatgacacagataaaccacttatgggcatctagccaaaggtccaagccgggatatccagagatcactgttgcacaggcctgcagttctgttcacagtagctaagtagtggagccagcctgcgtgctcaacaatggagggatggattaagaaaatatatgtgtacaatttaattgattttgatcataaagaggaaaatggaatcaatggaagagaatcgtattaagcctgtttaagccaatcccataacgatgaaatatatgctttctagattttatatagaaacataaaagcatgttgatatatatgatgtgaaataggagatgagctgtctggggtcagggtagtagtgacagggaggagactgatgctcagggtcttagtttgggttattattgctttgatgaaacaccatggaaagggtttatttggcttacacttcttcatcatggtccactattggaggaagtcagggcagtaacttagtgccaggagctgatgcagaggccatggaaggatgctgcttactggcttgctcctcatggctttcttagcctgcttttttataacacccaggaccaccagctcagggatgacaccacccacaaagggctgggccctcttccatcagtcattaagaaaatgccctatagctgtatcttagggaggcattttctcaattgaagttccttcctttcagataagtctagcttgtatcaagttgacaaaactagccagcacactcagacatgcaggcacacatctgcaatcggaacacatgtaatcccaggtagaatcatgagtctcgaaccagcctgggctacttatgtacatcaacattttgcatcttgaatataatttcctaaatgttaatttagaagctttatagttttcatttttatgttcaggtttctaaacaatgacatttttagcatggaatgagagaggaaattttttttctatagattaggttatttcagggccatttactaacaagggttttctttttcttgttaaagcagatgagttatatggaagttctgtttgtgaaatctgaattgtacttaactgatgtggttatacgggatcatgtgactatgacagttttgtgtaggtgctatggtctggtagtgtaagacctccagtgcaattcttcagcctttccatggctcttctggcccttgcatttctgccgtaccatctcctttagtaagggctgcagtagtttcgattgcttggctgctgtagatcagttaggcagagaatcactgacagtctgactcctcactccatgtgtctccacctgttcccctgcttgactgtctcagcaacatcttacgatttctgagttaaagtctttgacatccttcattagacttattcttagttatttgtttatatattttatatatcaaatatattatatacatatatatgcatatactatatttgtatatatacacacatataagcagtaactcatctatcacatttattctggaatcttagatttggctgaatttatttctagtagacttgaattacagatctcttttgatttttctatattcacaaccatagcgtttgcagatacatactcttagttcttcccttttggaaaaatgactgttaactggacaaagttgtttcattgtgtctgtccatacatggatacacatactttgaccagaccaatcccttgatacttttgtctcttgttttccttcccttcccacacctccagtgctttttttttaatgccctttctcagttgccttgattgctttaacatcaagtactgtgttgaataaagtactgactgtggacgtctcgccctcttcccagccttcaacgtaatgtagctatagatcattgttagtatacttactggtcagaagatttttgtgacagcctgtggtgttttggtttcagtgttactcttgtgttgttaggcaaaataaaacactttgtctgaaagattaatacagctagtattttacccgcaaagcctcgaggagacagataaggtgttttgctttgatgtttttagtgcaaggagttgaaacagggtctcacaggtcctagtcaggaactaccactaagcacactcctagccagagaaggctgtaactataagttaacaggcagtaatcgttcgtcttttgatatgggagctagtggtctgagggcagtttgactatttgatctaaattaaacctattgacaggaagttgtttgtgattgtcccttaattcctgcagatgcctgcagcttctccagcgttgctgtgtcacagagctgtcatggagtagagcttttgtagctcacagttctgcagtccatgtaggcagcccaggttctgatgcgcatggtggactgcagtgggcacagggtctgaaggagggaggatcagagcttaaatcaggaacagaggcagcacaggtgggccaagctggtccttctatgtaacaggcctggcctgagaatgggaagggtcccatgagagcgcttgggactttttaaagctacggttatctcccagtgccaccactgagaaccatgctttccctcaagtcatcccttagggggcgggcttaaaccactttcctgcctgagcagcaggtaatttgttttcaggcatcagactttatctctcttctaaccgacctttcaccctcaccatcttttgctatctctgtttcatccaggacaatgcctggttttgctcagatgcttgctgaccacacatcagccttcttgttcaccacacccctccaccttcactgcacaaactcaagagtctgctgtggcatttctctgcatgcatgtcctgtgcatcgatcatgcctgcccttctgtctagcctctgctgcccagtctaacctccttgtcccctctcccagccctcaccagtccctgataggccctgtgtagcattttcaaaagtataagtataataaaatcttttccagtgtaaagttgaatggcttcctcaggagagaggcctgcgctcttcccatcacgtgcagcctttccctgtctgtgcccatttgtccctcttagtctctgctgccatgcattttcttctccactttgtccctcctcacaagctacaggagttgtgttctgatctgcccttgctcctctgagacataggcgtagcaggtcacatgcctcatgatcaaccctaagcagacaaaaccgtcttctcaagcgccactgcctgagattatagtcactgtctgattgtagttctcaatatttgcaagtatttatttaatatacaacttttcatttgttatatctttatattcacaacaatatctagcttccaagaatttttgttaaatccactttctacttatctctctctcagataacgttacaaggcaaggcacatctgtcttgtgtcaccagggtgtctgactatgaggtagctgcttgaactctgagtgtgcagcgtgctgtgtttacctcagctgaggccactggcactggccaatcacccgggtgactagatggtgtgtttctctttctggatgcttttcatagatctcaaggagtgtccctcctcctctggcagccatcctgtgtgaaggcaaagcagttgtttctccgcctgtcaggcctttccctcctggcccccaggaggatcaagatgtaccatgctattttgaaaagcctaaatacttgaaacttttattctccagttggatttgaaagggggacattatgagccctatcctatgtggcaggggctctgagcgtctatttggataacactgaagattggaggaaatgtgactctgtctgtgtgttttaagcccctaaggtaagatcagaaagcgtctggggcagagagagccaaatagttgaagtcatacattaattatggtcatgaatcatttttatttttaaagtctttaccatttgacaaggttgtttgcatagtaccagcggagctctgagctgctccctccccgtaaaataatgctatttgttgacttgtccctgggttgataattcctaatgtttttagtaaaaattgcttacttccctggcctgaggagagtgatctttatgcattttttcttgataaaatattttgatcttataagtgtaggaaacaatgtctttcagttaatctcgaagactaagtcagtcaagatatccaatcttaggactgtgcttacatatacgtgaatgctggacagtcaggaaatgggtcaagagctcctttgtactacactctgcggagcatctagagtgtgcatgagaatatgagtattcttgcccctcaggaagacctgctaaggaaaaggacaagagaagaaccatttgctgtaatgtggtccttagtagtgtctgttgtcatgtgtgtgatctggtgtagatttccagaggaggagccaatgccttcagctgcctggtgcagccacagaaggccagaggagcagaggttacatctgagctgccttagtgggttagggttctgcttacctgcgagagacagggaaatgtgtgcgcagatgcatggattataaagagacacagaaaagaagtggcagtgcgtcatccagggagggagaccgggctgggcacggagtagggaccgtatgatgaagaccttcccttgtatccaggtttctgtagaggtgtgtttgtaggactctgttatcagtgtcttaaacaacaggatgctgagtctggagggaactgctcatcttcagtaattatcaggtacttcctaaagcctggaagggtcctactgaagtgcttccagagatactggtgctataaaagccactatacaatggcaccccagccctcatgatgatattcagtttaagactgagagctatttttttttaaatgaaatatttccacacagtacatcatagtgccattttggtgtggtcttcgttccagtcaggatttaaggttcccatcacctcagcttgtccctcagttccccattgtctgtcccttgctcagaagcagctgctactctgtgtcaccaatgatcgctcatacctgtgttgggttttagaccaggagcagtgcacagccctgttctcctctggttctctctttcctttccttgacttgtttggggatgtgttcatgtccttgtgtattatcagttactctcctttttattgctaagtagactacaagtcttaatttggtttttagtttcatatttggtggacaattggattgtttctgtgaccttttggtggggaggggggcagtgtcttatgtagccttgactggctttgaacttactgtgtagcccagcctggccttgaacttctgatcttcctccctctgcttcctgagttctgggattgcagatgtgcacagctccacttggcttctgtgtacattctgaaacagagcttacatgttagtcttttgtgtgtaagcacctatggctggacttggtgagtagaaggttagatgtatgctaaagttcatttaaatagtcatttcagaatgtgaggagcatttaacttaccagcagtgcatgtaaattctacttgctccccactcttgccatcactgtaactttagttattctaatgtgtaggaaatagtatctcatcgtgtatggtacattccctgagagactaagatgttaggtccccttttctatgcttattgagctttgtttttgaaatcaatatttagtgcacaaaagttggattttatcatggtagtttctctctctctctctnnnnnnnnnnnnnnnnnnnnnnnnnnnnnnnnnnnnnnnnnnnnnnnnnnnnnnnnnnnnnnnnnnnnnnnnnnnnnnnnnnnnnnnnnnnnnnnnnnnnnnnnnnnnnnnnnnnnnnnnnnnnnnnnnnnnnnnnnnnnnnnnnnnnnnnnnnnnnnnnnnnnnnnnnnnnnnnnnnnnnnnnnnnnnnnnnnnnnnnnnnnnnnnnnnnnnnnnnnnnnnnnnnnnnnnnnnnnnnnacacacacacacacacacacacacacacacacacaccctgtactttgttcaaggtatcttctacctttcctgtctacctctcttggttccttacctcttggttccttgcccaatgtagctttgcatggtggcggcacagatgtatatccctagcagctgggcatccttgtaagcttttgatatcctttgtttccttggtgctgacagatgagatgggggtgaggttggtaaggatcttccttctcctcttcctcttcttcttcctctgcttcctcctcttcctcctcatccacctctccttctttgtatatttattggtgatttttaaaaacttttttctattaagaaatacccatggcccctgctatgcacggctgggctgctggagtccttgcaggaagtcttggcctgtgcctggatctggaagttgcctatgcttatatcttgaagtggcttttgcttcttttggttttttctctagcattttcagagttttacaacttaaagtctttcatctatgttgaattaactttgtgcagagtgagaggaagctattgcattctcctttatgaggtgagctagctttcccacaccatttgatgaagagtctgccctttgcttggtgtggctccccaacacagttgttgtggttaggggtttcctcccacttttcctactgctatctctaggtgaacagacattcctgcctctggtaaactagttaaacaattgttctgcctctctctctctctctctctctctctctctgtgtgtgtgtgtgtgtgtgtgtgtgtgtgtgtgtgtgtgtgcgccatttgtatgcctggtgtccatggagaccagaagacggtattgggtccctgggaaccagcattacagacagctgtgagctactttgtgggtgctggaattcaaacctgggtcctttgagtgggtgttcaccactgagccatctctccagttcttgtttgtttttgagatggagtcttactactatgtgcccactagtctccaaattctgggctcgggtgagtttgcctcagtcttccagctctctgaatgtatgagagcagctggttattgatccattttccatctgtaagttagcagcatactttgctgatcatttacctatagacaaaccttgggatctgacagattttccgatcagtttgttacttctagatcttttactatttatataaattatagggatttatataaagttatccccatgagcccatgtctctgcctcctagcagtgagagtacaagcttgtgctgccatctccagggcttgaactcaggctctcatgtttgagctgcaggctgctttctgactaagccatcttctcagcccctcaactagatcacgttctaaagcacttctaaacccctagagtcctttgccctacccatgtcgtagcaggaggaggcattgcagagtactgttattttagggcttgtaattcctgttacttcattatatgtttgactctagaaataattggtttgttcaggattgattctatttatcctaggagatttataattcatgtctgtggctctctgtttagactttgtaattaactcacttacatttttctacaacttgtatttctaggcttcatagagcccagtgtgcaattaaacagactcaggtaactgttcagagacttggaaaggaaattgaagaaaaactaagactcacatcgacaagcaatgagctggtaggttcttgtataagtacctgttcaaactcttgtttttgtcaagcgattatcatattattcttggaaaaaaatctctagaccgtactaataacgatgctaataatgttgcattcagatggctgctggtgtattttaaatgttagaaatcaaagttcccatctgctagtagcgtgaggtaaatgtgccactttctattagatgaaacttgagatataattacttgggaggtgactggcagactgttttattaacgtcggataactgtgaactccaagcatgaaaggtacagtgagtgacctagagctgccaggacaggggagggggaaaggaagtcagtggaactaacgcacttgaagaaagcatttgggttggtattggtggctcagctgctgagagccctgcccccaagcctaacacctgagtgtggtccctgggattcctgcggcagaaggaaagagctcactcattcctatacgctgtcctctgactcgcaggacacacacacgtacgtaaatactaaacacataaacaaatgtaaaaaaaaaatcactttattagtgtatatacatagtgctgggtttaatgaagatagtttcttaccgtttaatttgttctttgattatattcagccaggatgaatccacttttgaaaggtggattttaaaatgaataggatcagttatgagagtctgatttgtgaagtgttcacctttagagagatgtgggttagctgaggcattccaaaggatccatgacctcagactggacgggcagatctcagggcttcacagcgtctggtgctttctgatgctcttcctcagaggaaaagaacggcggctttcaaacgactgttctgtgtcgggaagccacgtgtgcaccactaaatcacactctgctgcaaatgaagccacgtgacttcgaacggcctgcaatgtgcagtgagttagaaaaatactaaaaactcacagcttgcccggcagtcccgggagctgttacctcccatatgcagcctcttcccactgccgctcgcacatgcgcatccaaaggcgcctcttaaaccaagggttgtccaatcacaggcccctgagactgtgagcagctacctgtgcgcaggccctctcctgggacctaacgaaacacatttgttcatcttgtagagatgctgagattagcagtccattccaatgatcttcatccgcacacctgctcgtgctgttcctggccagagcaggtgtccgtggtacccaagcagcagcaggagctgcttgtctcttcatagcacttgccttgtctctggaaaatcctccctccacgctagagaaatggctgccttttgtgttataacttaggaccataaaggcctaatgccaggccacgagaacattgtagagggagggaaaattatcagatttttttttctgtaatgtacaaaaatgcatttttaggacctttgtctggggagaacttgctaggttttattttccttcctttcctctcccaggcaagactgggaattgacttgttccattaagtgactgcgtatgctttgtctcagtgtggacacatgtctgcttaatcctgtttttctaaactatgagtgctgacacccagggtaaggtgatagaacgtgtaagctgtagaggtcaggttcagagggtcactgtgtgtttgtatgccgcctagttaacacagaaggaagtcaagggagttttaaactggaagtgaacctagaaatcatatagtttcataacatcccactgagaaccacaccccagtacactcagtccctatcttgcttggttttcctatatagtatttattaccatctaatgtgatagctatttaatatatttgtgtctctctaaaccatgagacttgggatcccaacccccctactcccattctcccgcttcctttggtctctttcccctcctccctcctccccttcctccctcccttcctccttccttcccaaccttccatctcttttgagtcccaggatctagacaaatgtttgactcatagaagatataaagtatatattaagtatttgttgaatttcggaatgagtccatgggactggagagatggctcagcagttgaaggacttgctgttcttcagaggacccaggctcagttcccaacatttacgtggagtgtctcacagctgcctataactcaagctccaggggactgatggcctccatgggcgtctgagcacacaaggacacatccacatatagacacacaagtgtacacataaataaaaacaaagtaaaaaacaaaagagaatgaaacagaggaaaaaatatggcatatttgatgctgaaaccaaccagttacctgcctcaaacttcttcttaatgaatcctaagtatgtacctcttcagagatggcaggtttgtagctgaaaccttagcatcttcacatatgccatacgcgcccaacatgaactatggcacctaactgtatttcctaggagatagctggtataatgtgctcacttgtaatccagcactcaggaaacctgagtcaggataattgtcctatgtctgaggccagcccaggctacttagtgaattcaaggctggcctgagatacatagtaaaccctctctaaaatgagtagacatataatagtctttcagattgacttttgtcattctctggtgttctttcccctgtggtgctgtggtccagctcatcttgcatttgccctgcctgtagccatctttcaccaggacccagctccttaggttggctgaggtctttagaaacaagatctggtcactgtgtgtgcttgggtattgggggtgctcattgcttttaaagccccctcagcgtgcatggctatctctgtatgaatgtatacctatctatattaaaataaacatgagttcatactagtgtttgccattctaatgccacagactttattctggttttctcattcattttgtttatttgcaatatctttttctgatagtgagaaatctggctctcattaagtataatgtacttatccgttaagtcctggcatatgtgtaaagtggttccgatttctttttccattcgttttgttattataattattagtgtatattaaatctttgtattaatggactccactgtgacatttccacatatacacatatcacgctctcatcgtatctaccctcccccgccctccctcagcctctccccagccgccttgcctgagtattctctctgctaattttggatcatctgttaggctgtttttattttagcttttgcttatgagagaaaatatacaatactcttttcctgtttttaattagaatttttcaatcttatttgaagttttgtgcgtgtgtgtgaacatgtgtaaatgttttttgcctgcatgtgtgtctacatactgcatgtgtgcctgttgcctatggaggacagaagagggcatcagttccctggtactggaggtacataaaattgtgaaccaccatgttggtgttgagactctatcttggttcatctggaagagcagccagtacttttttaactactaacctgtctttcctgtctttattaataatgtaaatatattataaataaacatttatcatattatataagtgtatactatataatataactatgtatgacttatatatttatgtttatatatacaggtccttttccttacatgtacatgagaagtatgttctttaagtctgtgacttggattttttaaaaaatcatttggtttaaagattagtttttgttttatacatatatatatatatatatatatatatgaatgttttacctgcaggtatatgcacatatgcatgtatggtggtatacatacacacacatgtgttgccattggaggtcagaagagggctttgggtaccctaggactaagttacaggtatttgtgagccacctgatgtgggtgctgggaacgtaacccaggtcatctgcaagagcaggatatgctcttaaccactgagtcatctctctagcctgattattgttgttattctttttcttaatggtatttaaagagcaaacaatttaaagttcagtaaaatctaatctatttgtatatatatgtgtgtgcatgtgggtgcttacatgcatacctgtgtgtgtgtattcaccgtgtgcgggaagcgggagaacaccacaggtgtgcttctacaggacgctccaccttggtttggatttgttttctggcagggcctcacactggagccctggctggctgtgagctttctatgtagagcaggctgtgctcagactcacagagatgcaccttcctgtgccctctgagtgctgagattgaaggtagggcctatcactagcctggagctcaacagtcaagcccggctggccagcctgtctccacctcctcagtcctttcgctacaaatgtgtgccggtgggtactgcacccagctttagctctgtttcttacatgaattctggggaatctaactcaggccctcatgcttgcgtggtaagcactgcaccagcctaaccctctgatggtttgtttcttcattgtttttccttttgtttcaagtccttctcgtagtctttatcagaatcagctgcttagttcaagattccagacattttctggtgctttttttttttttcctagaagttttagcatctggggctttgtgtttatatctctgattcatttcaagttattatttttgtcctggatgaagaaagagtaaaaactttcctcccaaactgatgttcagttgacagaacagtatttggtgaacagcttttcctttccctattaattaccctgacatgtttgtctaaagtcagctgaccgtatacacgtgcatctgtttccgctctgtctcacagacctgtctgcggatccgccccagccattactgtaggtttgtcaaggaagccaggtaggctttctcaactttttttttaaaagttcctgtttttttttttttcttttattaaattccccataggttttttatgttgctgaatgaattttaaaactttatatgccccagtacaggggaacgccagggccaaaaaatgggaatgggtgggtaggggagtgggggggaagggtgtgggggacttttgggatagcattgaaaatataattgaggaaaatatgttaaaaaaaaaaaaaacctagttagtcagtttctaccaaagagagcctgttgcaattttagtaaggatttgtggagaattaccatcttaacaatgttgaggcctccagtctgtaaacatgacatttaggtcttatgtgaacttctctttaattctctgaatgatgtctttgaccccctttgttaagagttagtcttaagtttctgttggggtcgggcaagcacaaggcatcttgccaagttcagccgggtgtggtcgtacaccacgagaactggtcagagggagagaacagttcatgctgccattttaagtgcgggattaacaatgatttgttctggctttagggtatgcctcttcctagtctctggggttttatcatgaatgggtattacatttggaagaattaaattgagggaatttaagacaggagggtcaggagtttaaggttagcctagaccaactaggaagaccttgtctccaaaaactcagtaataattagggtaactccttttgaatttttatttgtcatttgtatatgagtagcatataaggatgctattcattctgatttatttctactttgatagttttattctgtagttagttatcttcactttgtagatttcttagtttttatgcagacaatagtatctaccaatttagatggtagggcattttgttgttgctattgttgcttttgagacaaagttttaatgtgtagcccaggctggccttaaacttgcagcaatcctcctgcttcaacatcatgttgtatcacagtcatgtaccaccccacccagcttgtgtttggataattctaaattctctgttcatttcagtagtggggacatccatacagaacagaatacacagggatccctgcctcgtgcctaggtgaggaataacattgtccctgcttcattaagtatgacattagcaatggtctctactagtttaggacttaattcatcctaatttctgggagtttttaaagtcatgaatggttttaatggtttttctatatataatgattttctcattaatttaaaaattattaaagcaaactgttatggttttgctttgttaagtttttgcaatactggtgattgattgaatgaaggccctcatacatgcatacattactcttgcattcccaaagtaaactgaattcataacaataggcaatctgtttgtgtcgggttggatttgccctggtgatgccagctttgttttcactcaggacactgaggtgagactttggtgtagggtagggtaccccacaccgccagctgtactcttgactagatcatttcactaaactccagtgctccgctgagatttttctctcctttgactccatgttagaatattgcctttccatctcagcagatttctcagtggatttcaaatctctggtactttatctggtactttttgtttttgtttttgtttttgtttttgtttttgttttcaagacagggtttctctgtatagccctggctgtcctggaactcactttgtagaccaggctggcctcgaactcagaaatccgcctgtctctgcctcccaagtgctgggattaaaggtgtgcgccaccactccgggctatctggtacttttaacatgttctggttgcccgtatcttcatgcctctttcatagagagggagtcacattctccaactgttcatgggttgagcagtattgcacagcaccctggacattctgaatgtaatatgtagactttgaggattttctttaacattcatgctccaggcaacgtggctccaattccagcttcactgttaagtgtgggcagctctgcattcatttgtgcatgtgtggcttagggttcagttggagagttcattgagtttgaacagaatttgggtgcccatctctatcttctccctattctggcatctttattttatcatttctggttccttcaagtggagacagttggctttctgctgtcctccaaagccacaggcataatcatagaataaggggagaaaattgcctgtgtgtgtgtgtgttgtgtgtttatatcaaacctcaacttctccttaaaacagcatgccattgatcactgtagaaactacagtagtatcttcatatacttcattgattagaagatcagtttgctaagtgtttattcttatttagaagccaatatttttatattttatatttataaagatatatatgctttctatctacatattctacctacacatgggttctaggcctgagagtactactgagtctgtgaaatcaatgagttggatgaaatgttttctaagtcttagtgactggctacttgtagaaggaaggaaagccacctgtaagtgacatttggaaaccatttggcaacttcaacagctctgagactttctccagattgttagttatttccagttgtggataatgaccacagataagataaatattctctaaatcaccaattcctcaaatgttttcgtcttaaggtcctttaatatgttaaaaatagtgacaatctctaaggacttgattacactattaatatttattatgttagaaatcaaagctgagaagtttgtttgtttgtttgtttgtttgtttttgttttttgagacaggctttctctgtgtagccctggctgtcctgaaactcaccctgtacaccaggctggcttcaaactctgatatctgcctgtctctgcctcccaagtgctgggatcaaaggagtgtgccatcactacctggcttaaatctgagaaattttaaagagttttctaatcttaaagtgctaatagcaaatctataatgttagtatgaatgatttttatgagaagtgcttttctttttaaaaggagattctgttttgtttttgtgactgaaaccttttgtgatgtgtcaaactgcattcttgcttaataagagaccagtgagatggctgactggataaaggcactgtcagacaagctgagttccatcccttgaatccacatgcttgaagggaagagtggactcccaaagtcatcctctgactccatgagtgcccgactgcatgcacaaacacgaacacacatacacatatgctcacatacacacatgtgcgcacacacaaatacatattaacaatttctgcaaggcctccagcagctcttgttgggcagtaaatcctttgcagtatccgagcatactctcatatgcttcatagataggaccaagactgtgacagaggggcccagctgctcagtgcgattacacgggtttgaaactttgattatcccagggccgtttattaggaacttgtgtctgagggttttaagctccagtgtgatctatgaaaaaatacttgtttgcttatattatttatagaccaatctgtcattgtaaaatgagtgtttaacattacccataattttttaaaagacgcataaatgggaatgtgcgcttgcaagcatgcatgtctgagtgttgtataaaatcttattaaaagtgactgatatattggggtagatgtatgacattaactgtacttggaatgaagaagactagagtgcagcccatagaagatacttagattaagatctttgatcagctcgactttgaagtgtgagcaaggaaacagagccatgccaatggcagcgtttgtttactcctcaaaaacgggagccaagaatcctggttcgagcgattgggtctgtttctgtcaacgggccagcttcctcacacggaccataacacaaacatgccttgctcacgcctttctgtgtgagctctgtatttagacagccttataagttctgtgctttgaaaccagaaaacattcccagtttgagtgtgtaccctggaacagagcaagttaaccccgtgagccaggttgggttttctgaagaatgctctgcccaaaatatttgtatgttttgtggaaaaaaaatgggtttgagcaattgaatacctacatctttctgaaaaaccttactctgaagagttttggtttttttttttttcccctcagtgatgttgaagacccaacggtttctgatcacactaaagaaaaccctactgtgtttggcttggttccctcaatttctcaaattataaagcatatgacataacatttctaatcttcatgaattatggattcatgtgtgaagggacatgtgccatggggttcacatggaggctggacaggtttgtggagtcagtttccccttctgccaagtgagttccaggaatcaagcacaggccatgaggcttggcagccagcacccttactcactggccagttcaccaggcggtttcagtcatttatacaagcccaattcatgggtgttttagggtttgtattgctgtggtgaaacgccatgaccacacgcaagttggggagaaaaggcttattgggcttacactgctgttcatcaccaaaggaaggcaggccaggaacctaggcaggccaggaacctggaggcaggaggtgatgcagaggccatgcatgggtgctgcttatggactgcttcccatggctttctcagcctgctgcttagagaaaagaggaccaccagccagagatgacaccacccacagtgggcgggcccctcccccattgatcattaattgagaaaatgccttacaactggatctcatggagctattttctcaactgagggtccttcttctctgataactaacctgtgtcacattggcacacagaacccgtcagtacagttggttttaaatacatttataatgtacagccacctttaccatctgtgactgcagctctttttattttgtaaacctgaaactttgtcactgttaagtactgactgccccttcctgtcactcccaggccctgccaccattctgtccgtgatccctatgcattctgagtgctcctcctccccacacctgctgggaattgaacccaggaccttgtctatggtaggcatgtgctctaccactggctcacagtcccagcccaactttgactattctaagtccctcacataagtggcattagacacagaggggctgcctgcagcttattcattttacaaggcataataactataaagacttaccaagttattgcatataccagggttcctccccttttaaagcagagtaatattctattctatctctacactacatttcgcttttccgtctctttgctgatgaatacttggtcacctccacattttagaacctcattgactcttcagtgtttgtttttacaatgttttggcaaaacaaaaataaatacctaagttagttgaaatcagctaaaactatatagtaagtccatcataaatgtttcataaatgtttatattgttaaaaaattctatttaggagcattctttttaagggcatatgtccttgattttcccagtctaatgtaatgatggtaggcgggctttgtactgctttcgtggctgtgtccacagtgaacgattgtaccatctacctagactgactgtttcagggatgaagaagaaaacattctgggtgagagatggttgctgctgggtgctttcaatacaattacctgggactgcttcctccccctgccttaaaggggccgagccacaacgagcctcacccaatccatctaaacttcaatcaaggactgacttcttccttagagaaatttacaacagctccttccacattttgttaatttttagtttatttaataaatatattttgtattgtaattttaattagctattttgtacttttggaaaagacaaaatgtcaccaggcatagccaaattaaaatttgatcaatatttatatcatagaaaatcataagaaagtatattactgataccatgtgatagaagccaacaaagatacctccttatagtgagtgcgtgctcactgagagtcagatggcagatttgtaaatggaggcaggtttggagaatatatttgaataaaaaggaatttacccccttttgcatgtgtgtgtgtgtgtgcgtgtgtgtgcgcatgttcacatgtgtggacttacagctcatgtgtatgtgtgaatattcacatacatcagaggcccaagggtgacaccaggaattgtcttctgtcctctatcttttcattgctcccagagctcacctacatgctagtctaactagccggcttgctcaggggatccctatctctgctcccctgtctctgagcaacacggctcacctaatattacatgggtactggagaaccaaactctatagtctttgctgtaattgcttatagtgccataggctggtttttgtctctttaggctcttctgtgtcaactgtcctatcacctgtgaatgtcttgttagtccttcttccctgtccacatagcctctcattcatttcttgtcttattgccatggtaatgatttctggtccacatgtgttaagtagaaactgtaaaggcaacttgttgtcttgttcttgaatctagggcagtttcttaccgtcaagtatgatggaagatgccagctaaggaagttttcacttattctttgtttctgaaacttgcagatctttattatcatgattaggtagtgtgttttgtggtatgtctttattgtgcacatttatcataagtatacatttattgatattatcagatgcctttgttgaatttaaatgtggtgggtatgcagttatagctatgactttatattcataaatttatctgtgattttatttatttagaaaaaagaaagtgaatgtctgcgattgaaaattttggtgcttcgaaatgaactggaaagacagaagaaagcgctggggcgggaggtggccttcctgcataagcaacagatggctctacaggacaaaggtgagcagcgcttctagacagcctcctccgcagacacatgtcagggtcatttgatttggttttatggttttggttttttgttgttgttgttgttgtttgttcatttgtttcttttgagacacagtgtctctgtgtagcccttttgtagtcttggaactcactctgtagaccaggatggcttcaaactcagagatctacctgcctctgcctcctgaaggctgggattgaaggtgaacaccaccatacccagcttgatcgtactgggtttttgttttgttttgttttaaatttttaaagtagttttgaaatatcttgacattggtatatgcataataatgcaaatacacatacacacaaacacacacacacgcacacacacacacatgcacacacacgcacacacgcatgcacacacacacacacacacacacacacacacacacacacacgtgcccgcacaggcagggagaatttccatactgaggactcatgaccctatgacaccgtctggtgctccccaccactcacctcagttcccgccacactaaccaggtaccttcaatcatgagaccagagtttggttttgcctaattatgtactttatagccgtcatgtgtacatattttgctagctttttcaacatgtttgttagcgtcagtcttaccttcctgtaattataattgattcttaaagccaaattatgcaaatatgtatttagatgctttcagtgttagtaatttccacttttaaactattaaattagtccttccatgcatgttctagtgtatgctcctaatggagattcctgtgcatttcagtttgctagaaacctagcagtagaactgcaggatcgtaaggtggaaatccttcttcagttgtaatagatggtctttcatctgcctggcctccatctttgctcggcaccctgctgtgcagtactctgtctttgtgtggtgtgtgcaatgtgcccttgtagttcagggttccattctggcaaacactatcctacacacttaagatgaatcttttattaggtgtcagttgaggtttttatttattatatttttatactgccagcttctgacgttcctgttgtttaaggatctggggacttttgttgacatgcgcattaggaacatgtccccatcctgtggcttgctgctgttttcattcttgtggttacatctgaggctttggggccaggtttaggaaacatttgcttgtttgaagaccttaaaggtgttcttctgtatgtcttcaggaatctttactgttttactttccacatttatatcaccgatccatccgaagcgagggctgtgaatcccatgagttacaagtagcatctgtttttaaccgagactgagtgctgcagctccacttccctgtgtgtccattactggggccttgctcaggcctgggaaggaccctctgctcctggccatcagtctacttttcagcttctattttccttctgtcatactttgttttgatgtctgttgaaattcttcagtctaattatttttcttccaaatcatcttggttatttttgttctttttgcatttttgtatgaatttctagacaaaacagaaagccttgctagtagtttaatgggacttgattgaatggatctgtcaggatagttatgggaaatagagtcttaaggttctgtctcccacccaagaaaacaccatctgccattgttttttagatctttacgaaatactattgaaactgtaatgcgtgggtctttgattagttgagtttattcctattttctgatgctttatgacactattatagctctgtttaaattttattttctacttgatgatggtatataaatatattattcgcctattttaaaaagtggtgctgacttttatatcatgttcaaaagaaaaattttggctgtagagatggctcagtggttaagagctctggctgctcttgcgaaatacctgggcttgcttctcagcatctgcatagtgatttacaacaattcatacataatttagttccaggccatccaacacctacttctgacctcaatggattcagggcacacatgttatttacagacatgaatgcaggcaaaatacacataaaataatagaatgatttttaacaattcactttttaaaaggctcattaatattttaaggcttagtgatactgacattaatagatatgataatttgatgcacaccctcaaagaaatgatagtaaaacgtctttgctttttatactgttttcaataagagctgagaactctgtatgtacagtgaacagtgcagttcataatgtaaaagcgttttggctgagcggaggtatttaaattcatgagcttaacaatgcaaggatgcaaatacttctgtggcttccatagctctgaatcacggccaagaacttccttttaaagcaagtagtatggtggccttgggagatacctctgttggattgccgcgtaaacatgatggcttaagtctagctccccagagtccacataggaagctgaagggtggcagtgtgtacctgcagtcccagtgctgcgagacagatatgggaggatcctgaggtgtgctatccagctagtcaagtcagtcagaaattgtcagattctggctgggagctttctgaagaaataaggtgcagagtgatagaggatgataacggagcaccagtctgccatgatccgatgtgtaggaagcacatacacatgcatacaggcactctacacacagaagtcatatgccgtgtaagcccatgttgtgtgtctgactccactgcacggtcaaggtaggaatctaccgctccttgactatgttcccttttatatttttgtcttctatgataaaaggaagcaccaagatgcctgtcaccagactaaaagttcagtgatttgtttagtcatttctataccactaaggagttgaaaggagaggtggagtgggtataatcatgatacattatgcacatgtatgattgtcaatgaatactagttgttaatttttagaaaagatgtgtgagtaatagtatatactcgtgagcttgtctttatggggaatatttatgttaggcaataacatacttcctgccctttctttcatttgatcatgactaagagtcctatgagttgaaaatacttcatctttttagtgatgaagatatggtattctattattctctttacaaagggtgaagatttgttcaaggcacatagaaagttatggccaagcttatattcagttaccagtgcctaagtgtgctgacaatgtagggcttgcatggctctagtgttgtgtttgagctgttacactcgtggagttccatttaatcatagacagaagggcagtcctcacgctaggtaagtctgcagcgtggcgaggcagacctgctgatttttaacactgagttttatcccctctctgacacttacagtagcatccgggataaaatgcatggcctcctgcatgagctccaccgctgagctatactccccaggcccagaattgaaattttatttctattccttgaactggtagaggcgtcagaaagttaggatctcatgttgatcttgtggtaaatacagtgaagcactagacagtgggagcagagtgtagctgggtataggtaaccaagtttatttattgataggtttgatatatttcaggatacccctgttcaccataatcatacttggtagacagacacaaacttacccacaagtctgagcctgagagcctggagaggagacaaggtcagaaatgtttgtttgatatttgaccttgaatttgctgctgattcttctgataaccctgggaattactttcttattcatctttccgtagcattgccacttagaggagagccatagggatccatttctgtgaacaatttgaagaagctaggtgcctattatatctatcgatttttgaaaataaaaatgcattgcaagatggtttattgcaaagagacaagagtttctgttcctactgctggctcaacaagtgacactaactcctcaggcctgatcagcctcacgagtagtttcccctccctgtgcctcaaaggcaggttcttagctcgtctacagcggttttcagctgggccacgagaggatctttccagaattgatgtctattaatatgtatacacacacatatacatatatttattctgggaagatattagtagtttaacttctgatgttaaataaaaaacaaaagcaaacaaagaaaaacaggtttccctgttagggtctcaagccaaggagctttggcagtgcctgcttgtcttgtctgcagggcatcttgtcctagctcagcctgcacatccttttgagatggagcatcctatcaaaatcagtctgctggaaactcggttcagaaagtcatatgaaacctggtcttaaggaaactcgctcagtaaattctggatcttttgagtagatgctgataggtattaattttataaaagtggactgctccagtatttgtagaaggtgactgcttttatctcatgtgcttgggaataaacatggggccttatgggggcctcacaggtgtgctaccactgagctttatctccagcccagaagctaacacccctcctctctggaagccaagctctcactgtgtagccatggcttggaactcactttgtagaccaggctggccagggaactagactctggagagttaggattaaagttgtacaccaccacactcagcttcccagtgtgttaaaaattcaaagctaatttttaaatacagtggatttaacagtaaaaacaacatatatctattatattcccgctggaaaatactgacattatacttgcttctcaaggcatcattggctactaagtaggacagctgtgagttcggatatgtatcaggcctcttgtgtttggaagacagtttccttagtcatcttagtctttctacctcctcctcttctgtgtagatccctgagacttggatttaatgaagacatcccatatacaaccgagtgttcccaagcctctcgttctccagacactggctagttgtaggtccttgtgttaatttcatctattacaaaaatcagcttctgggatgtgggccaagcgaggccctgatctatgggtaccgcagcacgttgtcattaggggtcatttattgctacgtagcattaccagaataatagcaataggttttctcataggcgcccgacatatctagtctcaggttcttggccacattaccaatgtgaggtacaggttccgtctcactggagtgggccttaagtccaatcacaaagagcttggttgctctctgaacatttgtgtcacaattgcaccagtttatcctgctggtagaccactgttgtaggccacagaatttatggctgggtgttatttataattttttgtctttcttctctatcaacaagaactcctagtacttggaagtactagttggggcattgtctcccccattatatgatagctccatttaaattacttacacacacacacaagcttcaacaacagtgggcctcctatgtttttcagaaggctcaggctctgaggcactcttaagttcttcatgatagaccctaattcatatacaagtttttctgaatttaaggcttatctggtttccactaaataagctgtccttgctgcagtctgtagtgtgcatctgatatgcaaactgtgtaaactgatagagtgccctgggctgtggaccaatagctagggaagttttttcttttttccttttcattgcatgacaacagtaatgactattccccaaagagtacttaggtttagtagcattttaattcacaggaaacctggaacagaggtcttccattttcttagtttgtccttataaaggtattcagctattttagggttgtgtttagaataccctcaggctgtaagattctgttctttccaaagtgtaggattgacagaaaggatggagatctggttttgttgttgttttgtcttgttttttgaatccttgttagaatttaatcctgtggtattcttccctggagaaaagacaccctactcactcgcccaaacaaaaactctccagcccctgtgtgtccagacttctccaaccggctgttctcctgttatgttacacttggctttcttagttcattgtaataagcaaaagtaaaatcaaacatgttttatatgcaactctcattaattataataatttcttatcatttttcaagaagttagataactagtgttgcctttgtctgtagtttgttctgtttatcttctgggcagtggaaagtttattttgttgccctggcctgcacttcaggtaaaagacaggcactagtgcttctgctggtagtgtgaaaacgtcacaggcatcgatctgaagctgcacttctttctgaacatggtgcgtgggttcctcttcactgagatcaggaggcttcttatgaaaagtcacttcttacagttttacccaatgcattcatcagaaataatgcagaactgaaaacttaaccctaggtgttttgactttttttcttttttcttgccgtgttggggattgagtcccatgccttgtgcatgctagggcaagtgcttcaccacagagttagagccgtccctaggctgtgtttttaacattttattgccatgttacagaacctgctagactggtttcctttacatttattaattcatgtcttcaaagtggaattaatgtaacgttttcttttttaaatttttcttaataatgtaatattattgtgtttgcatacattcatgcgtgacgtagtgcacatgtggagatcaggcgacaactttcaggagtcagtttcagacttaccttgtgattttctttaattaaactcagtcttgagacttgtgcagccagtgctttttctagtggagccatcttgttagctcttaatgtctgaactacgaagataggcaaaactgaatgtatggacttaaaaggggagaggcttggcttatagaattaaaaaagaaaccccagagctggagcaccgtattgtgtgcactgggtatctgagcgtttccatttgctgtgaagagacaccacagccatgacaactctaataaggaaaacatttaattagagctggcttacactttgagaggtttagtccatgattgtcatggcaggaagcatggcaacatgcaggcagacacgatgctgtaaagggagctgagagttctgcatcttgatcatcaggcagcagaagggactgtgagccacactgggcatagcttgagcacaggagaccttgaagcccaccccacagtgacaaacttcctgcaagaaggccacacctcttaatagtgctatggccaaggattcagacacatgaatctctgaggccagtcctattcaaaccaccacagttgggttgaatggaaaggagttcagaattgacttggaagtaatttcttattcggtgaataagacaaagctgagaaaattatagcatgggcagtttgattacatatatgatggccagaattctacaatatcgtattatgccatatcctgtgaggtggggtcactgttcaaattattggagttaggaaaggcttaggaaccacaggggctggtcttttccaagagtgtgaaacaaattagagactcaggtagaattggaaggcgggcacctccttgtgctttatggttatttttaagtaacgtttcaagccagctgtgtagttttgttcacgctctcggaccgtggcggtgtgcacagagagtgcaactgttggggaaaagagatgccatccttactttgtatgaacaaaaagaagctcagagaagttaagactttgctggtgggtggtggcactcataactccagtcctctagaaactgggactggttagcctatctagatagactactgttatttaatttttcaaacctatttttactgatagttcttaaaaactttaacctcccttctagctcaccacccccagagatagtggaaaagaaaggatatgggggaagtaggcctgtttagaaatggttctttggagcaactcccatctgcgttgtcaggaaatcagcagttcggttcacaggtcagcactggtggctcgctccacttcagggatacaccagcagtccggtttggtagtcaggacggcaaacacaatccgcagcagtggcacgacctagcaaagatatccaggcctcagctaaattggcagcaggaggaattagggccaacaaggacgccagaagttctcagctgtgcctctctccatgaagtgaagatcagcagagatgtgagaccaagaagcactgcacagctagctctacaagcaagcctgtctcagtccgttgagtcctatttatattccctccaaacatcacgtgttctccatgggtcttgcctcagcacgtgagtctgtctcagctgacaccactctgtcagtcggccagagtactccgaagctgcaggaagctgcaggaagccgcagcacaccaccagaagttttttggtacatttctctctatggagccctgacaaatggagctcaactacacagtgtaaggtggaccaatccatgcgcatcattagcaaagaatcctccatcatgtgtcatctcacatgtttgctttagaaaaacatctctctcttgtgtctgcttcagtgaaatgttccttcacaagtctgcctgtgtctttcacctgtgtccacttcaggaaaacattccttcgagtgcttgccccagcaaaacaccgacgtaactgactttccaaagaacccttaagtttccacttcaggctacatatggagaccttgtctcaatgaaaagaagatgaagtacagacttgtctagactcttgggtgtagcttaggtaatattttagcctagatacatatagtggacagtctaaattcagtagaagccccagagtcaacgctttcattcttaggaactaaatgagcgctgtccgcagctgtcagaccagttgtgtagaagcagaaagccaattacttcccatccctgtagtaaggaaacttaccagttccttaaagggtagaaagaattctcttagcactaagttctgggggtggaatttagtgtgcagtttcttatgtgcaagatagtgaactttgtaatgaaatacagtcaattacagttttgcaaaattcacggcaaaaaaaaaaaatcatatatacaaaaaactatctactagcccatgaaaagggcgccatcctaattcctggtgcagaacaggcagtttgctgaggagagagtctcacagtcaagaatactgggttctggtcacccgccattgtgtaaaactcagaatgatagtttattggtttttaactgtaactttgacgggatctggcctgtggctagtctaagaccaaattctctggggagagaaagcctaaagaagctatgttttgattttttgatggatattcttaggctgttagatttacaggcaccaacagtgacgtttagttgttaaatctacaccgcctgcctgtgttcccagtgcacagaggcacagctcagcagggtggaatacggacagacatgtgcctagacaggcggacagctctggggcgagctgggagatgcaaatccagcatatgtttcttttccttctctcccggagaccattgatagtagcgatatagacataagggataaatccatagtggggggaacaacacaactctaaatgacacagcataggtaagactatgtggagaaatacagtagagaaaaggggcagcccaggaagagatgggtaggctgctttcagggttcctgggagacagagcctgctgggatttttaacttagactttccaggtataaccatcaggagctaagaaaaagctgttgcctgtctgtgggatatgttcttctagctgggctgccttgcctggccacagcaggagaggatgtacagagactcgatgtgccaggttgggggcggggatgggggagggtggtacccagggagggcctcaaccctctcacaggaggattgtaggaggggtgaccggggggggggggagtgaagagggatgtaaagtaaataagaatgaatgaatgaatgaatgaatgaatgaatgaatgaatgaaagaaaaggaaggaaggaaggaaggaaggaaggggaggagagagagagaaagaaaaagagaaaagcagtagtagggaggtggcctatggcccattccgttccttctgtttgtttgaagtaacttttgataacatttgttctcactgctttctatacacaatggattcctgcccttgtttggttccatgtaagtatgtgcatacgtatatgtgtaaaattctttggcatactagaaaggtagagaagagaggagggtgactgtggactcttataactaactcagagaaagggtgaaagatggctgaacgtaggatggaaacaccctgtactaagacactaccatcataacatgctctcctcaacagttgcggtggttttaaataaagttactgtctctccacacccccaccccacctgatactctgtaggaaagctgcactgtcagcagttcctgctgcttctgctaagctggctctgcagaaggaggcattttgcatacataaatttctgttgtttcacatgaaacctatatcagttgtttatactaatcaattattcttgggggtgaagtgacttgaggggaaatatttgaggaaaaatgttagtatgtgaggaaaatatgcatggacaagaccacctagaacaaatggaatagcttccccacacactctcacaggcacacacgctttttaaaaattggaatgttcacgtttgactgcctgcaccggcctagaacccaagagagaaatctgatttttagcccaaagaaaaggagacgcactttcctcacacatcagagaactaagatctcagccaggtgtgcgcagagagcgggtgggaagctgtgctgcccaccagtgacgccacatggagaggctggagcctctgcagaagaggctgaaagaacttggcttttacccatcgttcatggccagctgtgggcttgcatgaagtcataggaattttcaggcaggtcgcgccggcttaaaagttctgaatgagcttcttttggatagtcacaggaagactgaggacatagcagaagctgaaggtgtgggtctcaaagaggccatggctgttcttgcaataacagcatgatccttctgtaataatagcagctctataagccttcacaagtctaagggacagaaaaacctggtgttcccaaaggacaaatgagagagtgcacaatagaagctaaaaagtgaagctcacatctctgagtaactgatgaacacagagagaaagctggtgaaaaggaaagtccttccacgctgctgtggaactgtgtcctctggcgtgatgcatcattgccacgtggaatcagaacacctgtgatctcccacccgacatacagtccctcttgggagggcataagagttcaggaggcagcacctgtgtcccaagaggccccacctcttcctaaggataaattcctctcatgattgttggaggagggagccggtttccttagtggtgcagctgcacaaaaggtgcccatgtttctgtaagctcagagggttcaccaggctagacttctgtcgaattctttatttggtctgtctgttgtcctgtggtaagtagatgtttgttcaggtctctccaggaaaaacttaacataatgataacgtgacagtggactgttgttttttcacagtgaacacagtggctttttgttttttcaaatgtacatgggacagtgatataaaccaagaagctttaaactgttatctgtcactaagaaagacaaaaatataaaattattaaaaatcacatgcaatatgttctcagcattaaattaagttagaaattactgacaaaaaaatctggaaaattccaaaaaatataaaaattatacaacatgtatattagaagctatgggtcagaaaaaagaaataccaaggcaagttagggagtattttgaaatgagtgaatatgaatatgaatgtttaaaggaatacataaaataacataaaagcatagaaggaaatttgatacgtatattttttttaaaaagtctccagtcagtaatctaaactttcttaagctagaaaaaggaaaacaactcatgcccattttgtacaagaaggaaggaagtggtaaagggcaaagagttcaaaagcagaaaacgagtgcagcgtatcagttaaacaacagacactctgtggaaagttcagtaaatgtgtagtctggggctgggtatggtagtgcatgccttcatcccagcactcaggagacagaggcaggaaggactctgagttcagggccacagtgaaaccctgtctcggttatttaattggttaattatcttattagctagtagccagatgaaccaagtacaaagcacgggttgccaggccaggaatggtggtgaacatcaccactggtcctacgagcagtaaagccaacagttccgaggatgaagagcggtgagagtctacgtctagggccactcgatcatgggtggtgagtgccaatccaatgacataaaaccattaagacaaagaattggggaggaatatttggctgcagaagatgagtggtgttccttgagtttgggatcttactcttccacatattggtctttatagttgaaagagaagaaaaccttaggtataaacagcacagggctaggggacgggtctgtagcacagcttttgtctaactcgaatgaagtccttggttaaattaaaagacaaaaactctgaaggtggtggattttgtgctaaagtccaaactggatcctggccaactaagcctgtgttctgttcttccctaggtgggtggggggagcagaggagctcagggcatgcttcttattacatcacagttcatgaaacaaaatcctttgaaaaatacgaaactgcgtatgtcaggatcttacactatttctatgcctgaggacctctgcagatgcaatcaggcctggactgtcaaacacaagctctcgttttctcagagtaggaggatggaaaaggattttattatcacaaaactgagggtcatacatttcatatagtcacaagattcaggcatatgaacacaaatattaatcattagcatactaaagcaaacactaagaggaaattaaatgctctgtaataggattcaagtgtgagcctgtgagataaaatgtgtgatagcactacaagccacatctataaagctgagttttacacagccataacttcagactgtcaccatgtaaaaatgcttgtgacataatacggaaaaatccgaatgcacattgcctgtgccctgtgattctcactaaaatatatacaagcaagatgaagttcataaacctggttatatgaactgtagcatagccatccaaacgtaggtaattttcctatcctacattttacattctcagtaatgttaagtagagttgtgactgaaaataagttaaccagtctttcaggagtgaagtctgaattttgaagtctcataaaggtttcttggtcagtgtccagaaacctgtgtgcaaagtgtgagagtcctgctgtttgcctcctgcaggatgctagaccgatgtaagccacgccagtggcagttagttcatctggaaaccctctgtactgatgcgcctcgcctgctggctctgtctagccccgtcacaggcaggagactgagctctgcgtgtgcacatgtggttgagcatcatgtctgtctgcagtatctcatcgggcctcgtctccctcatcttcccttgtaggaagtgcattttccactgagcatggcaagctccagctgcagaaggactccctgagtgagctgaggaaggagtgtactgccaaaaggtaaaaatggctgagaagagcttctctgagcattaagcttatgggaatgcagcattttaaaagactgctactaatttagacccgagtatctcagcaccctgttcaccatctcagcaggcatgtatgaacacccactgtgtgcttgtgccatgcaagaatctagaagccagaacactttcccattgcccaggccacagcactgggtcgatattaacatcctcttctcccgccttttccgtgcgcccctccagctagttggcttgccttcttcagacttctgcttctttgatatcacatttgatgacctccacaatacctagggcattgctctgagcactggctctccagcattccagctgaaccccaatgctgctatcagggagttcctctttttttattaatttatgtatttcatgtatgtgggtatactgtcatatactgtcactgtcttcagacacagcagaaggtgacatcagatactcatagatggttgtgagccaccatgtggttgctgggaattgaactcaggacctctggaagagcagtcagtgctcttaactgctgagtcatctctccagctcagggagttcctcttaaaataccatttttaaccatattttcctcttcttagtataatgattctatgcttaattttcagataccctgcaacaaactggcattatacaactatggtttattttagattttccctccacataagatgatgacaatagcttttctctccgtgaacattaattcctagtcacctctgtccctccccttacctttactcccttctgagacaagccctgtcatccctcattttcctttgaggactcaagactcctagacctaggacaaagcggagccaccaagggtccagtggccctcaggcagtaggagtaagtctgtgttctccatcatgctgacttggcaacgcttttgactccagattttcctacaagcagaagatctgtgtgtcttgtgatttaattcagttctgaccttgctggatacctcctgacaagttcctggagactgacacctgtgctggataccagtcataaactcctcacctgtgtgtgtttcctgccagccagctataatgattcccacaaagtccttcagttcagttaactggcgatttccttgaggactttgcagccttcaggaaacactgatatttactggttatgtatggtaagggttgccaaggatacagataaactgccagatggaggtggctctgtgccctctgtaggcttgtcattttctaggtaccttcagactatgacatacatcaggctctgccttccagaggtgatacagagatctctctccaaccccttctaaccccttcatggaaggaggtgtgtgtgggtagagctgaaaaccaatcctctattccttaggcatgctatgacctgcctgtccttggaatgtctcctgcaactcacctcattaccctaatcacgtaggcattatcaagaataacaaaaaataaaccccattattcagaaaattccaaaggtgttaggtgctctgtgattagagaccggagcagtctggcacatttgctagtgtccgcaggctcttcgaagcatcatgtggctggctctcccttctgctcttgcctgtagcttcttttaaatcccctctgtttttaagctgctaagaggcgggaaacatgctttgtgatgttttatgttggccacgtttttgaagtcgctcaggagatgagctctcatctcacccaacaccttgggattttgctcaactgttcatcttattttgttattcttctgatatcacagcacagtgtttcttgagacagtataaggtgtaactgtgaaaagatacttttatttttctcccctttaaaggaaataccatataaatcaaatcctgaaatctaatcagcttccctgagtcactggttatgaagtgtttagtgggtatagtgatagcttactgtggtctctggaataattgagcacacacttgcagtgctcctggtatgtagtaataggtgctcctggcatgggcatttggttattatattctttatagctcttagcacagtgctgatcacacacagtagcccacagaataaaccaatgtaactggcactggtagaaaccggtcaggactcaaggtggctatcactcttacctccactcctgaaattctctgggcaattccagaccatttaatcctctgtggtttaattaggtagaaataagtgttagaaagcatgcaaacataattttttcatgaatgcgcttttcctttctcctccttagggaactctttctgaagactaatgctcagttgaccatccgctgcaggcagctactctcagagctgtcctacatttaccctattgatttggtaagtctcgggttcctggagagatggagctgttggaaagatgatttctcgtgaaatttccttccagtgagaaagtcatcactctgcatgctccctcctggttcaggagaacttgaagagctagtatctagttcaaatgtatattagactcacttgggcagagatggacaagagccccaccctcagtgcttcccttctaggcacaaagacccaagtcccatcctcagaaccaagggaaaagctgggcatgacggcacactcttgtcccagtgctggggaggtggaggcaggaggatccctgagactcagtggctaactagtccacccaattatcgagcctcaagtcctattgagagaccctgtctcaaaaacaaggtggacaagccatattggggaatgcctcccagagttgcagagttaacacctctgcaccccaccccaccccccacaaacacatatttagttggtcttaggtcccatagtttcattgtcttatatatcaccttgatggtatgaattcatatcatcagaaacaatgccaaattatttctggttccttcagaatcttcttattcaaccagttatctgccatttctgatgtttcctctgatgaattgctgaggcaactctcaggacattaaatttttaatgcatttatttaaaatcagtataaaaggtgatagtggaaaaagtctgagtagggttattagctagaaaatcaagtctactaaaattggtagctaccatgctaatggttatcaacctagtaaattgattttcagagaaaaagccaatagaatgtgaatttgctcctagactcttgttcagttgtttatggaatggatatgggttagacagaatggttctttttcttgttttaagaacagatatcatgtaactccagcttcttcaaacacatgatgcagttaggagtgaatttgaactcccggtcctgccgccatgcccctagtgctggtattatagattatagattgtgccatgtccggcaagaagatactttataatgttactgacatgtgcccttttatttggatattgcacatgggattttattctataaaactgtcaggcataaggaaccccaggaaagcagtgtacccgtcaccatgtatcctcagcagcctgagcagccgtactctgggctgcatcgaagatgctctcactgcagaactgcagtctgggtttgtcttagtggcttctttgctttttaatacaatgaattaattttatcctttggttaaattcacagaatgagcacaaggattattttgtatgtggtgtcaagttgcctaattccgaggacttccaaggtatttcttccttccttcctttcttttttgtaactataaggatttggtatatacaatatgcatggtaatagagttatcctgataatggatacctagtactttgtctaaaggggattttagaatttctgtaccttcccagctagaagtacatagaatctgccttccgggtagtaactgtaacaaaacatttatcctaatcttggaacaaataattactgagctttgtatttgaaataaaaaaaaaaaagaaagaaattaatgggcttcagacagcaggctggtaatttccaggtgtttgttgttgtttttatggaaatctgtgtagagctgggagcagggctggagcagggctggagcgggggtcagtctgctgctgagagtcctgttcttgccctcctgataagtaactaagatttaaccttggggtgcttccccaagcatagctttaatttctcgcttctctcttttacattaaagggattacagattttcttttctagttcctgtatactgagataagagtatatattttaatgcatgtgccaggaatctgaactcgggtcctcacgtttgtacactttacccttcgagccttctccacagtccaggagactatttgcattattaataaactgtcttacttccccagtgcctaagtgctgcttgaatgtctcctgatatgtcttgtattcacaaagccagctgtataccacagagctccaggcagaggctgtcactagtatccatcgggctatgcttccatttcccttcgaagaacattgctgtttgtggtcagaaacgttcaggtggagtttacctaattaccccatctgcctgcataacacatggatagctgggacatgatataaggagcatgatagcccagagacaggcaatcttggttcaagttctaggcgcccatctgtagcggggtcacgtttggattattttccagtcaggcttccgtaactgctgtgagaacggggacacgcctgagtctatacagctggaggctttgctttatctttgatgcttattaagccaaaggaagcctgagaagtggagttagcagcagggcggggtggggcagggcggggcggggcggggccgcttccctgttgtatcttgagccttcacaccgctcagtcttgttggttttcattttatacaaaattgcagtgtcctaaagcccatggtgcactagcttcctctcattaaagagcatttcctagggctagagagagtgctctggctgctcctatagaagacctgggtttgagtcccagcacccacatgatacttacaaccatctgtaactctagttcaaggtaatacagcgcctccacaggcagcctgcacagacatgatacacagacgtgtgcaggcaaaatgcctgtacacataaattaaaatgataattacaattttatttactaagnnnnnnnnnnnnnnnnnnnnagagatagcctcctctctgcctgcctgcctcttgccacctacagcaggtgggagacctgaccctgggagcattcgagcaggagaactggccctccccatcaccagttatagcacttgggagaggggccctgtacctcacctgagcagcactagcaaagctgaccctagtggctggggcacgggtgagccaaccctgagggcatcagtgcgggataactggccctgccacttgtctgccctgcagtgacgtgtgcaagggagagatgccccctgaccccttgccacctaggacaggcagggagctggccccaaggtcatcagagtgggagagctggccctgcccctcccctgcagccctcgagagatcaggccctgcgcttctcctggacaggacagtagagctgaccgtaacggcgaggggggggggtgctggtaggcctgcttcaagggtttgagagtggaactgctggccctgcaacttgtctgtgccctccctccaccctcaccctttgtcacctaaggccctggggtcaagagagcaggagagctgtcctgtcccttgcctgctgcagcacagtagagctggccctgatgtgggggttgaaggtgagccaacccaagggtgtgagtgtgggagagccagccctgcttctgctgggtctactgggttcttgtctgctgggttgtcctctcctcagtaaacagaagtggaagtacttacagaagggaaaggagtgaaggaaagaaaagatcagatctatgtgattagaatatagtaagcagcgcgggggaagagagggtcagagaaggaggagatgtcagcagggccttggctgctggaaggggtctctgattcattctcagtaagtggccagtgcctagagcttcagaggggctgaggcatgcgctgagctgtgctgtcgtccctctggctgctaagtaggaatggcctggtgggagcaagagtagtgtcgtagcagtctgttactctgctctacccacaaggcttctggttctattttggttttctttgaagtgccttgtttctcatggcttccatagctgtctacacttagaatgcttagtaaagccgaatacattctccagtcctttaaaaatgcacagtagctcttcagtaaagtcgctgaagagtgaaatgggagataaaacgaagccaacatttaattttagtccaaggtcctgttcagtccactccctgagagccctagagtcagaagttttaggaaggatatacgctatattgtgttcacagtctgtgggacactcgtgtagtctaacaacacagcaccttgccaggtgctgaaggatacagagaggattaaggcaccggtctgaccttgggaagattatagttctgttgtgggcaacagataggtaattaagccaggcaagaaagtggttattgaatacatactatgttaaaggctcaaaaaagtgggaataattctcttggtaggggatcaagaaaaccacttcatagaatcagagaatgtttgaagaagggtaagagggtgatttaagatgggtgcgtaaatatgcagcaacatcaaccagatattgatggtgagtctgtggttccagcacccggaggcaggaagatcagggattcaatgccagctcccactacatgagagtttattttgaaaattgcaagagtagtgtttgatgttatgagattactttagttctgtgagaatttcctttatggatagagaattaccttgttttgttgtttcaattttaaaaagagaaagaaagagatgagggaaagagagagagggagtaagggagggagagagggagggaggagaggaaaataaaagaaaattgagactttgaaaatttcaaacatttttccatccaaggactcaccttaactggtggcaaagcttaatgttaccactgatctgcctgaatctaggatcttccttattcctgtcatgatgcaactttcttgtcttttaataatgacctcctgagcatccacagactttttagtgttctataatagtgcattctgggagaggttctaggaaagggatttctaacggttttctcatgatgtccatgaacctttgctggatacggattagcactgcatgggtcagtgatgtttgggaaaccccaccaggggccctgtatttattatgcttttctgaatgactcagttattgttagagcttgccagagagagctggacacaatgcgaggaaagggtccagagaggaacgctcatctgagttccattgactgagacatttagtttaaaaacgagaaatgaaaagaaaagaaaaaacccaatgtttgtgcttgtgtgtttttaagtaatccataacacgagaaccttttgtggtaatgagacccaggtgtcctctgtgtctgtgtcccttcatgcaggcatgatttcttggaaaggagagtccatatgtcaaacagtgtttcactgagaacatggaatgacttcataactgctgtggcactgattagagtcttaactattttgtcctgtctgcatcagagggtgctgggtcccttaacagaggagctgcctcagggactgggaaggcgggatggtaagagctttgagatcactctgcactcagatgcattgtcatatgaacagtttgtccaacatagaactaaaggaacgctgaactgacttataatgtttgtgtagctgttgtgtgttggtaagaatttttatcataaagattatacacaaaagctctagctttgagtggctttctacatcttaagaacaaatcataagtacctactataagggaactgtggctttgcttccaagcccttcgaacactgttgagttagtatcatttcacatacctaagtcttacagttcactcccttgnnnnnnnnnnnnnnnnnnnnnnnnnnnnnnnnnnnnnnnnnnnnnnnnnnnnnnnnnnnnnnnnnnnnnnnnnnnnnnnnnnnnnnnnnnnnnnnnnnnnnnnnnnnnnnnnnnnnnnnnnnnnnnnnnnnnnnnnnnnnnnnnnnnnnnnnnnnnnnnnnnnnnnnnnnnnnnnnnnnnnnnnnnnnnnnnnnnnnnnnnnnnnnnnnnnnnnnnnnnnnnnnnnnnnnnnnnnnnnnnnnnnnnnnnnnnnnnnnnnnnnnnnnnnnnnnnnnnnnnnnnnnnnnnnnnnnnnnnnnnnnnnnnnnnnnnnnnnnnnnnnnntttgtcaggtaaaacatctttcagatctcagaatgctgggaaccttaaaccttttggttttcaactaaaatgattggcaacagactgtgacatctgaggttgcatggcctgcaatcaccgtaattaaccacatgagttcccattttcccactggaggctcagtggtcttggggtgatgaaagtgacttccctaccaggaggtggttttccttttgagggtattgaaatacccctgggccctgtaaggctccacgcgtgatccttttaaaatgctttttaatataaagcttcaatattggaaatccaacaccacggtgtttaactgtgaggctggtgaggcgctacggcctggaccgagaaacctcgcatggtgtttaataggtagagcggggagtcgtgtggctacagcggagacctgggcagcctgaactgaagctcatttccagtattacttaactctgctgcccgctgtctcctttgatttcatgtctgtgcgtcatctctcttcgagattcccttttaggtcgacatttaagcagaattggctttgttcactgaggagggaggtgatgtgagatcactcctttgttcttttaataaaggtgtgtatgtagtctaaaaacatgcaaatgtaatttttcttaccattatccttttagtaatttgagaagcatgcagatgcttgaggtattaactgctggtggtttgtatttgacttttttggaaggttcatcaaaagacttttttgttgcttcctgagaattttaacccctttcctaccgggttctgcaggaaggcgggggaagctgagtgttagctccatggtgggcactgcgatgctgcaagtgtgattccccttagtcctcctcatctcctttcagaaaacagttctttagacacagtccttttgctctgaggaatggttttagtttggtggctctgctcggtctagaaagtgggaggttgagtctccactgtgaaagctctcccagtctcagctgtgactccagacttagatattggggagcaatatctgtttccaggcccagaagcagtttccccattcattccactgctgttggtttttaccgatatgattttgaccaagctgtcccacctgggcctcatctgtgtcattggggaattgatggcattacatgccatgatatctaagatttctcttatgagagaattcataatttaaattactttttgtgactggaaaaaaaccccagttggtaaagtgcttgtcacatgagcatgggaccctgagtccaagctccgacacctccgtgaaaagctgtatgtggtggtgcttgcctgtgaccccagtgtgtgggggggctccctggactcacgttaactctgccagaccagtgagccccctaaacaagacagacagctcctgagaaatgacacccaagattaatttccagcttgtgctggcacgcatgtgcatgcatatgtgcacacacacacatacacacacatacctgcatgtgcacacacattaaaagtaaagtacttttagttgctagtatagtatgatttttaaaaagtttctacaaaggcaaaattgttaataaagtctttggttgtgcctggggaggaggacatcctctctggaaataattgggatgctaattaggagtgaccccgcagtcacctaaaatggatgttattctactttttcatgaggtgtttggagagaacaataagtactgcctgtgatgcctttttgtgaagcactacagaaatgcgggattgcagatttaattttttttaaaaatatttatgtttattattttggatcatgtatgtgtaaccgtgtctgtaggtagctatgtgtgtatatgcgcagatgcccaaggaggccaaaggcattagctcctcctggagctgcagttagatgtggctgtgggccacctgatatgtgtgctgggagatgaatcagctcctctggcagagcagtgcacgcccttcagcactgagccgtctctccagcccctgatcacagacttttcacatgcacttttcctgcagtacaaaactaggacaacactgggatagtgcattcgagtgccggctacattctagaactccaagttaaatgagtagatactgtcttttgttttgtttttttaacaaggttctgtgatagcgtgggagagtgtccttacagagggctatgtcgggcccacttacaagctgtttcagtggagagttctttagtctctttgagcattagtttttgttttgtttttattttaacctgtaaaatggatactaaaggagagtctagtttagtatttgttggtaagtgaacgaagtgagtagcagtgagtagtatttgtttatagggcgatcactgagaagcgaggagccgtaggtagtaaagggcagggacttcgttcactgaagaagggtggtgggtgcattcctgccttgaaaagctacttacacagatactgaaaccataaacggaacgatatgaacataggattggtaattgaagttgaaggtgtccttaggagtcatgcaatagtaaaccatcatttagaccctctctcctctctcatcgctgggtaccccagagcctgtgttaaatctttgcacatgtgcaagctttttaaggtacttaaggaacactgtatgctaggcaggacatttgaattcttccattgcatcactttagttctgagaacttgaataatcatttataaccttataggtaggagtagaaatatgaatggtgagtttttagaatataattgtttatatctttttaaaagccagaagcttatatttatatgacacatgtgttttcccctcatgtactttcatgtaagttacatgacaaggttggtgtatgaacaatgaatacagtttgggacattcacttcactgtggaacctatgtcccctttgcctcatctcagatctcccaggcttctttgtgcaactttgccctcatcaatatctgaagcatgctcgtaaggaggtggggtggggtttcgcttcactttagagtgactgattgtcttagtcagggttcctgttcctgcacaaacatcatgaccaagaagcaagttggggaggaaagggtttattcagtacactgcttcattaccaaaggaagtcgggactggaactcaagcaggtcagaagcaggaactgatgcagaggccatggagggatgttctttactggcttgcttcccctggcttgttcagcctgctatcttatataaccaagactaccagcccagggatggcaccacccacaaggggacctccccacttgatcactaattgagaaaatgccttacagttgggtctcatggaggcatttccccaactgaagctcctttctctgtgataaccccagcctgtgtcaagttgacacaaagccagacagtatagtgatcttgtacagcacctggactctgttacagtagaacctctgactgatcacggagactcaagtattaatttctcgctttagaaggatgtgaaagaacgtaatggctattcaggcacactgagaactctccgtaagatgtcttaagctgccccagcccactactcactgggagatagctctgtgtatagttagtaggtgcagtttcaagccttattaatgtgtttatatttgcataagttaacataatttagtctgattactattttacttaccacatatttgtataagacttcctcagagctacattcgtgaggtaaatggttatattcttttcctctgttttcaaatttacagcaaaagaggatggaagcattgccgtcgcccttggttacactgcacatttggtctccatgatctccttcttcctacaagtacccctcaggtatcccataattcacaaggggtccagatcaacaatcaaagataacatcaacgacaagctgacagaaaaggagcgagagtaagtgtcttttgtttgtgtaatataagctgattggaaacatggtgaaacgctgagtatgctggaaagatgaagtgtcgtctaatggaggacttgtgcagtgcacctcctaacatggcaagactgtcagaaacaaactaaccatgcagcagggggtatggcctatcgtgaagtgcaaggcctgtgtaccgaggctttagtcttgatcctcagccctgtaaataaactttccatagcctacagcccagaagaaaccataaagaaagtatacaacttaacctgaatgtgcgtgagaatggagcatggcaaagtttgtggaacataactgtatctgggctcgtgatatttataccctaagtacacacatcagaaaaggtattagaaagtaacttatctaagactcaaagtgatgcagctgaaaaaaacggtcagcagaagcttggaaaatcaatggaaggaaattgtgaaggtcggagtaggggtcagccggggtgttgcacagtggggtggcaggcagaaggcctgatctttgaaacaacagaccagtgcacaaggccctgtaagggagaatttagaaagaaaagcaagaagacctaataacagatcaaggaataaaaaaaaggagaagccccacaaatgcgcatacaggtgtcagagtgaagagaccatgtggacaactttaagctaatactttgaaacttctagccaagtgccttaatttctagaaagacactactttcctacataaataattggcatttagaaaacaccagagtaaggctggtgtgtgacttgtaatctcagcagcctcagcacctgggaggtggggtcaggaccaaaaaaagggaaggtgtggggagcaggaggaagatcaggcaccaggggccccacaggaatgggaagatggagtatgctagatgaattactcgcaactctggcttcacattaaagtcatcttgagagccttaaaaactgagttttaacccctagattcccgagcctctctctccacagagatcctgactccatcagtggcgcttgggtgtgggtgatatttaaagcttcagtagtgattctgatgtatactgcggttgagaacctcggtcctagttaggaaatcttgttaccatggcatgaaagtttagacattgccacgtatacttagggagcttggaagctctttagcatcactgtctttaaagtgagctgtgcagagaggagggagcttagcagcttggtcagccctccctcagtatccatgggttccagctgtacttgtgaattctgcatccatgggctagccagcattcaattacaagtactggggggggggggggcgggacacgacagttgtgtctatattaaacatgcacagttatactctagacagtacagnnnnnnnnnnnnnnnnnnnngggtcagtcgatgcccttagctgctcggcatctctccaacccccagtatgtcagctattgagccattagtgaatagtgttgctatgaatatttacttacaggtgtcttgagtgcccattctgttctttggtgtgtatccctacccgtgcagttgctgggtcttgtggcagtcatcagatagtaggacttagaagcaacttaaaacataccatgaatgcgtgtaggctatgtgcacacaccgtgacgttgtaagggatttgagaatcatgggttctggcatccatgaaagcgggtggggatcagccttcctcaggtattacgggatgttccgtgtctggaggaagaaaggctttcagctaaggagcatgtgagtaagttagatgagtcccttttccagtgtggtaattgatttgagcccaagtatgcgtctcagtttaaagccataagaagctataatatatttgacaaagggaacatgaggtggttttctcttggatttctttttaaaaatcaattttaaatttagcacaaaattcaagatttaaagtgtctattcaattttgtgcagctagcatgcccaaagcaaagcctgcgctgcgcccattaaacggcttctccctcaccctgcccctcctcagtccctggcaaccatcaatctgtttctgtctctatgaattctcctattttggatattttatataagtggaaccatacaatatgtgaccttttcttcctggcttctttcggtttgcataatgctttcagtgtgcctgtgctgaagcagagctgaacctcattcatttttatggcccaataattccccagcaagtgtgtacagcaccactccttgtttcttcgttcatctcttgatggacgtctgcgttatttctacctgtgactcgcatgagtactgtcgctttgaatatttactcatggttgtttgagtgcccgttttcagttctctccttcacctctgtgaagttactgagtcacacagtgagtcggcttaactctgacaggaagccccagtgggcagcccttggcagccctgccatctgcattcccagatgtgaagtgtaccctctgtgggtttgctttgttattcctttactgatcggtgcttttttttttcagtttttggttttttttccccttatgcttaggggcagtttgtatatcttatttgatgaaatgtctcctcttatctatcgcccattttctaattgggtagtttatttttattgttaggttgtaaaagttatttatgtattctggaaagtagacccttatcagatcagtggtttgcaagcattttctctcactctatgagttgttacagtttaaataaaaaattaaagccaatgttatatgcctgggtgtgttgttagagcagaggggcttccagtcggccccattgtcagttcccatctgccaaggagttgctgaaagaaccaatcacacctgacttctggagccagggttcacctccatcttttcataggaccacctttgtctgtctaaactgactccaagtctagtctatgctattatagcagtgtgtgtgtgtgtgtgtgtgtgtgtgtgtgtgtgtgtgtgtgtgtgttcgtgcgtgagagcatgtgggcagacatgtgctggtggtgtgtaggagacttataaacaagactttttttttttcatttcatttcttcttcctagctccagagtctaggaagctccgagtcatggccggttccatcccaattgctgcatcttctagacaggagggagttgtgttctcatggggtgggagggatggaaggcgtgtaaaagtctaactcctcctttccattcatgacagcagagtccttatgaccccacccacccacccctcaagaagaggctccactgccaatgctattgagttggggttacatgtctggcatttccgtaccccagcattctgattgttcactcttcttcctgagtgcaacccctagtcatagtgttcagtgtcttctttcttgggggttaaggacacgcgtctgataatctgctcttaagcccatctgtccataattaggctgtgcttgtttacctatccctgtaatgttaggaggaagcaatgaagcgttccttcctagcctcctcggtgctcctggtgcgtaaagtgtctttaattctgataaatgtgagtggttttgtcatttagtgctaataattgtcacatctaaaacctactactcagtccagtgtcagaaggtttatccatacgcttcccttactgacttttatcattttctttgctgttgttttgtgtgttgttgttgctgctgctgctgctgttttgagacaggatttctctgtgtagccctggccatcctggaatgcaggatgtattctgtagatgaccgtccttgaatgcagagattcacctgcctctgcctccccagcgccaggatcaaagttgtgcgctgccactgccagctgtaactttaactttattctgaaaggcagctatttgttccattttggattattagtttttattatttatagtttgttgcaaaggctgttctttctcccttgaatggccttggcatccttgttgcaaaaaaaattaattggtcatggattatttcttaattccctttcagtggtctatatatatatgcttttaagccagaaccataataatgtttgcaattttgaagggaaggaactccatatttgttcctttgcagtactgttttggctattaggggtcctttgcaattccttaggaattggaagatcaggtttgccaactctgaatgattttgaaggtgattatgttgccatctaatgaccaagtattggcatcttactagtaattattagtaacagcttgtctttgtttaggtccttttccttggtagttttatacttttccatatacaagtcttgcacgccctcggttaaatttctgtatattttattgttgtcatcatttctctcagtgtttgaattttctgtatattggcccatgttatcttgagcagaaagtttgaattctctctggcctagatgcttttgctttgtcttggttttcttagctaattgttgctgctatacaacatccagcatagcactgagtcactggggagagggcatctgtctcctcatcctcagagaatgcgcccagccctctgccatggaggactctgctgcttcaggaggctctctgctgtgctcagacagttctttgttctcccagtgtctctgccgtgaaggggcagtgggtctcatcaagtgaacgatcaagaggcttcagggctctctgctctccctgtggtataagtcccacgtggcatagtctgtaatcctcttaacaggattcagagtgctgacttttgttgacagttcttacatctgtacatgtaaggctgtcattttctgtttgttaatgtgcatctgactttagggtcagggtagcgtgaccttctaaaataagaaaggaattgatccccactcacggtcaagccttcttggagagtttgagggagcctgttaaccctttctttaataattgtttgaattcaccagtgaagcatctggtctgggacttttgcttagagatgtctcgaggtctctgagatgtttcttcttgttctgctcctgtcccagtgtttctgcatctgtgccatcgctcagttatgtttctaggtgtcgacctatgccatccaggtcgtctggtttgctggtgcagttcactgcttgtactgttttctggtaattactcttcctgtcaggtctctgctgtcgctgccagcatctggtgtatctgggtatctgccttcaatgatttgccatagcttaacggtttgtcagtgtactcagactttttaaggaaatacccactagctttactgattccactggttttgtatactcgactttgtaaactgcagtctatataatatcctttatttgctaggtgttttattgttgttttttcttctttttatttatatatatatatatgtatatatatatatatataagtttatataatataaaattttattgagatattttaatgacagggttggcatttatacatttctatatctttttttgtatactgtgttttgtttcatttgtctcagtgtattttctgatttcccttatgatttttttcagtagcccattggttaagaacatgctatgtgactttatgtatttattttagaattttttggtttccctttcctaactgttttatcccattgtaaacggttatttctataagtccttaaattaatatttattttgtgagctattttggagactacctcacatgtactgaagaagaacatgccttacctccacgtatgtgtacgtgtgtgtgtacatgtgggtgtgtgggggtgtgcgcacacacgcacacaggcatgtcactcgctcagtgtatatgtggaggtcagcatgtatctgctgagtcttgttgcttacagtatcatggcagctgctgtgtgacaattagtcaccttgtatctggattctctggacattactggaacctttaacataaggatgtcttcatctttcctcaattctggctgtacttgcttcatgcgttttggactgctgcagtgtcctgcatatatcttagggtgtattaaccctctgtgggttagctcttttatattggtctttataatgacccatctccccacttagaacattgttttactcaaagaacattttatttttttctgcctttaattcaataacccttagttctctttaaattattatctgtctggtatttttcccgtttctaattacatttatttgtggctggggagtggagcaaatgccatgtcatgcatataaaggtcaggggacaatttaaaaacttattttaaaatctttatgtctgtgctccatgtatatgcagtagttgagggggccagaagagggcgtcagattccctgggactgaagttacagagagtttcaaactgtcctatgggtgctggggattgaactcaggtcctctggaagagcagccagtgctcttagcagccactgagccatctcttaagcccccaaaggacatttttaaaagtatcaatcctttgcttctatctcgggaggtgggggtcccagagatggaactcgggttgtcaggcttgtgagcatgcgtccttcctcactgaggcagcttgtcagcctcctctttgtcattttgaccctgttagagttttgggtttgtcttggtttggtttggtttggttttgaagaccctcactccagaaggtactagtcagagtatcatttgttcaggctcatcactcgctacactgaaagctggcggcagcctgggatgcagaactttgtgtcctctcatgttacatctgtatacattagttgccacgagtatattgagtcttcagcacagagacactcagatgcatctgattcccagaaacgtccccagtttctctcccaagtggtcgcgcagttggcttgcctcacagcttgaccagtggtaactgcgtctcagcactgcgtcctgataggacgttcaccctacaggtagcccctagacgagttgcaagatgccacagacacatttttgtaggataagatctgctttgctcccctaagaagcaagcacaagctcgtcgctgggagtgcaggctgctgtctccaggcacagagctgagctggaacgatcagatccagggcgctggagctctcttcccacttccctcctgacttgatggctggtgcaaacctttgactattttccagagttttgacaaagttgcttttgacgcttttgcttgatttctttctttctttctttctttttaacatttctggaggatcaggccctttgagtaatccctccactgtttgctctgacacatcattcagttagtgattaaaaatgtcacctgtaagagatgaaaggcctctgcgtgatattaaacaagagagacaaccatggccagacaagtgcttgagaaaagagcaccttaagattttaatttttctgcttacatttgtgtgtgtgtgtgtgtgttgtgtgtgtatgtgtgtgtacaagggcatgtctgttgtagtgttcacgtgtgggaggctatacctacacatatgcctgcatgccatgatacacgtgaaggtcagagaacagcttgggatttggttctgtcctgcagggccctggggcagcttctgggctctgggcttaacagcgggcagctggacctcccaagccgccacacagccctcgcctccctgaagcacgggcttcctctaccctcagccccccgtgtgccatgttttcaaaagtaaatgtccctccagatttttatcaagttgctaaataataatctgactttagatgtgagttctgtgggaaactatttgggaagctagaaggaggactacctcttagaatgctggtattcctctttagatcactgtataagttgtgagggtcagctggacggatgaggaactcagcagtctctgctgactgtgacagctttagtttgtcagaaggacatgaattctcttttctactgctttgccatttttctgaaccccattgtatctcattgactaaatgtagttttttgacgttttaatgtcagtgagggtgaagtcaccttatcattattagtatgctgtactatgcactcatcttagctttacctcagttaatggtgcgttttagaattgatgtctcagattttttgtgaactattaaacattaagactgattttatgaaattttagaaaatccttcaaatcctgtttggaacagcagagctgtagaaataaatgtattattctgctgttgattgactcagcctgtcggttgacggttattctatcccggaccctgagagagcagcttagacacggtttgctcctctactgagtgttcgcattggtatgaaccttcctggggcattaaatagaatcaggccttcatgggagatgggaaggaagagctgactgactcattggacagattatagttaatgtcccagaggcctgggattctctcagccactgctgtctggttgcctgcctgtgtaggctgtagcatgtgacatggctgagttcacgactcttcgtgggggttggaggaagggaaatcattctgtctggccagttagaagcatggctctggagcggtgccttgctcatcctgggctatgtccaactgcacgacataaagagaaactcggtctttgctgcaggtccctgtaagactggaccactgaacaggaagggtttgtcataaaagtccagctgtgccaggcagtggtggtgcatgcctttaatcccagcacttgggaggcagaggcaggcagattcctgagtttgagaccagcctggtctacaaagtgagttccaggacagccagagctatacagagaaaccctgtctcaaaaaacaaaacaaaacaaaaagtccagctgtagtgtgtgtgtctgacttcccttgctgaagactaacatgcagatttccaaagtggttttgaaagaaaatgtattgttgattgcttgcttcactgctttcactgtctagaggatgacagacacacttgggacagagactgggatgtccttggctgggctgggccccataggccagaatcgaggcttttcaagccctcaaagatatttgatggattttccccccactttttaaggatttttttcccctttgctttattttcagatggagaaatggggtgatataactggcaggtacttttgaaacttcctggcctgtctacagaaggactttacagatctctaaaagatgggcagctggggttgtcctggtgggcttgttggaatctggaaaatgtgattctgttcttcacatttcctcaattttttttcttgtacctaagtttattccttttagaggactgcgaccaaaggcccaggaattccctctttatctgaccgagtctgatttttggggggaaattaaacttctaatagcaattgtgatttagaatttgatttagaaattgtgatatgtctaaactcagatggtattgagccaaggttatagtcgttctgtggccctggttctcgtggaggcggagagatgttttagttcatgagctaactctgtgccccagtgtgtaaaggggccaccacacgggaccctgagtcttgagtcttttccttttcttgtagatcccaaggaatgtctggggatccatgaaggttcctttctcctttagtggcagagtagctgagaatgtctttgttcctctgttccctcagcctgctgcttagctgccagtactgacttgaatgaatgaatgaatgaatgaatgaatgaatggaatttggttttctaatgtcatgttgttgagcagctagagttgcttgactttgcatgtgtggtgagtgcctgggacttcactgagcgtcacagtgaaagcggagaggaagccccagagctctcgtgtggagtgttgagcgctgtaactctctcctcatttctgtcgtccaccccggcattgttatctgtcagcagcatcttaaaagatccctaggttcctttctgtaacaactctcagcgtctgttcatgcgtcgactttgtttctttccatgataaagtattcagacagaggcgacttcatggaggaagggttgatctcagctcacaacttggggcagtccacctcagcggggaaatcaaggcagtagaaactgaagcagccagtcacactgtatctaggatcaggaaacaagtccaaaatgtgtcatatcatagctgcctccactgggaagaacttaagacaagtgtgctcagactgcatggccccagccggcctgctgagcgccttctggttcatccccaggctgctctgagtcacagcctgggtttcagtaaagccaagctcttgttcttccagacacctcatgttacctttggctttgttactcattgtccatcctggcctatctgcctttaataccttccctagccatgtccagaatcaaaggcatagctgcacataagtacgcacacccttctctctggaaggcactccttagccccaccagcctgcattctctgccttttgttgtccaggaagcagctctcgttactcatctctgagttgaagcactttgctgtatgtgcatcgagtattaacaactcccaggtcagttgtgcaagtgtgtcttaatcgttgttgtttgaggcgtgggggtcttaccatataccccaggctcatcacaaatgtgcctgcttccatcttttttttgtactgctatgcctggccttacttgttttgttttacctttgtctgaagacttttcaatgtaggaactacatttttctaggttcttaaactatgtccacttcatgctgcgatccttgtattaacatttaaaaagtcgggttggtttagttaagagaatgaaaggatgttaagttttgcaaatgctattaagtaacctgaccctccacactgcggtctccacagtcttaactctagatgctctggccaggacaatggttatttcacggaacccctcgggagcacagcaagctcttcacctcgatgctggttgtaatctgggctgcagcagctctgctgagccagctgggagtgagagcaagggaggttttaaaatgaggaatccccgtggaattgcaggcaggagagatcaacacaataaaaatgcagaaggtggttgctgggtgagacaggaaatgaacaccttgtgcagctctggcgttgcgctgagagggaaatgtggagaatgagtcagaaggatggcgcggccgtttcattctgacacttggaaggatattgtgtgtgtcgctttaatgaagtgagcttcagcagcgctgacgttattatctgcatgaggaagtcttctccagtgttttgtcatctcagttttctgcatccaactaaattaaaaatcagtaatgtaatgggacagtgggacaagaaggaaaaccagatgacgatgacacgtggccccagcctgaactcctgctctctggtttgcaatatattcaaatcagggtagaagttcaggaattcccagaagggagacggggtgaagggataatgtatttagtgactggtgggctgtggtctaagtgaaatcgtgttacattattagaatgtatgacatcatgtttgtcacaggtggccccaaaatagcagtgaggtatgccatgggctggctttgcagtctttcacattacacagacagcgtaggtgctgtggactctggcaggattgttcgagactttgttgatgttttattgaaagacacactattgtttccattcgttctgaggcacaggatggttttggttagcagagtagggaggtgaggacactaagaagccagtgtctgctgcagatgccctgtgaggtaggctccgaaggcctacaggtgtgtccctctggctgctcactcaggtgccacagttttactttccctcaagcaactgagaaaacaaaacaacacaaacaaacagacaaacaaacaaaaagtgcacagtcctaagcagcgtgcaagattttagagatggcctgtctcgctgagatccattttgtctaggatgtgtctgtgctgagtgttccctgcctgtgagcctctgagcagacatctcagtttagcagatcagctgcaccccatagcagcgcttgggtcttcaggtggccattctcggtcagaaggggctgacgaccagcataaagctaggctgaaagaccaagcagtagcgtgctggtgacaaacattcctaggcttgtgagccaggatgcgtgtggcagactagagaagcccaggcaaaagctggctaccacaaagggcaggtctcctgcacagaaagaagagctgctgcccggtttgcattgcccagcatgcagttcggtgcctgtcctgtaagtgatgcatttggggttgcttgctatcctcttttaggtgtagatgaaaaagagatacacttataatttaatcttgaagcaaaaattcaaatttccttcaaagagagcttgagtagttaataaatttatttaaaccactattaatatatatttattctggatcacattggttataataaacataacttaatttaaacatacagttgctcctacctgtacctaccagagagagctatatttgaattgtggtggtggtagttctgatttttttcttgttttgagataaggttgtgccatgtagtccaggctgccttcaagcttgccatgtaacccaggctgctcccaacccccaagtgctaggacattcaccttgctcatgctggttttaaaggatgactactgtaatttcgtgagaacccacacttcctcctcactctgagacattctctgaatgcttgctttagccacttagctgcagcttactcatctgagaaaccgaagctgtggcctctgagaagagcatccttgcagagcggtctgtccagggccacagtattccgccatgtcagtgcactcagtcaccccacagggtagttacagtcctgctcctgctcggagaacttgttggtcctgtttcattacagtaaacatgagattcaggtttttaaaattaaaaactccttggcttcacattcagaaaggtttcttaagtaaaccacagaaatagcccatactataagtttgatttcatttacaacaaaaagcagcttgcttataaacaaaagaaaacaatgaaaaagcaagccacaggtcagcagaaaatataatagagcctgcaaactaaccaaaatgatgatgatggtggtggtagtggtggtagtggtggtggtggtggtggtggtggtggtagtgtcatcatctgtctgtctgtctgtttgcctgcctgcctgcttgggggtggtatgtatagaccacagcacaagtatggaggtcagtggacaacttgagacccaggtcctcctcttccttgcaggtaccccaggctggccggcccacaagcttcctgggattctctgtctctacctcccatcacatcccggtaggagcactgggattgcagatggcactgcccctgacttctcatgggttctggccattccagctcaggtcctcacttgaaagccaaatgctttgctcactaagccatcctcttggctccagaacattttttctcgtatatttgtgtataagtaataagagcaaacaacataatagaatgtggatggtatggtgtttacggtgttacagcagaataaaccttcagtgtccaataatacaagaaaaataaccacactaggaaccatgaaaatgcaaatcaaagccaggagagggccagcaaggtggcatttgccaccaaccagatccaaccatatgaattggtccctagcactcccatgatgagaacccactccacaagttcactgcggcacatgtgtaccccccacagacagacagacagacagacactgttttatgtcctggaaactggcaaaattcagaatgtctgtcgaaagccaaattttgtgagcatggagaggagagagattagtcctttgataatgaagtttgtatttagttcatctatttcagagagcaatttaacaatactgtactggctagttttgtgtcaacttgacacagctggagttatcacagagaaaggagcttcagttgaggaaatccctccatgagatccaactgtaagtcattttctcaattagtgatcaaggggaaaaggccccttgtgggtgggaccatctctgggttggcagtcttgggttctataagagagcaggctgagcaagccagaggaagcaagccagtaaggaacatccctccatggcctctgcatcagctcctgcttcctgacctgcttgagttccagtcctgacttccttggtgatgaacagcagtatggaaatgtaagccgtatataaaccctttcctccccaactgcttcttcgtcatgacgtttgtgtaggaatagaaaccctgactaagacaaatacaaatatatctacacaagttctatcattgaacactcctgctgctacaaagcatatacattgtataaacaaacactaagtgcctgtatgatagtggtatttaagctgattgccttttggtcatctctgctcttccacagagacttgctcacagtgttgtggctgatgtttgtactaacctcttcaggatttctatttctttgcaacattgtcttctctactttttaaaagcttccatgaggctagactccatgtttcttaggcctatcttctcctccctttgactgtgagcacagccttcatgtgggtggctagttttgctcataactcatgcattttcatatgccttttagcttctggattggttttaaatttatagtagcgggtctccatattttcttttgagctgagactggtgttaataatgcctagaatgttgagtgctactcatattaataagaaccttttaaaaagacttagaaaaagaattaagtcttcccatgatgcttgttagtaactcccattactataaatgatggctcccacgttcatgatgtggagagtctagtgatgaaatattagaagtgttaactgtacttagttataggacctcactgttgtaagatgattaaacacaccaataagcgactgaagcattttattattttaatttgtagaaacgtaagtttggtaagctaatgagaagtggcagaactcttggagtttgattgacacctatatttaaacttttttaaatgtgtggatgacacatcaattcattcaggcaacttctcttgcaaaatattccacaggtggtatatttatttttgagtggatactgcaggattttgtctagcctaacacatttggtactaaaagaaacccttttagaagccatctcctagtactgagcctgatgaatgatatccatgtgaaagatgcaagaagtgttttcttattttgtggcttctgcataaactgtaaagagagagaaatccatccataagttggttaagaagaacttggtaaatagcctgttattttttctcagagatttgagggggcgttggtcctttctgagaggacagaggctgcatctcaccaagtgcaggaatcgggtgcggccacatgggccaagatggcaccctggcccattgccaggccccgtgaaacccacatgtttactgccttgcccgaacatgcgcagtgaaactgcatgcataagctgccttccaagttagattgtgccttgtgatccggatctgtcagcctatctgtgaccgacctgagctcatggcctggagcatgtgtgattctgattggatgaggtggtgtggagctagatgaggtcagttgccgctactgtataaatacagcccttgccctaagtgaaaggagccccaagtaaaggaagaagctgcggaagaaggactgcgtgaacccgtcttggtgtccatgtcgttcttgactctgcgggtcggagacagcggcaaccaagagaaactttccatcccaaattgtacctctttgtagacagcaatgggagcgaaaattatgatcataaagaagagtctaaatcataagctgcccgggatgtcactcagtggtagagcacttgcaaagtcagtgtaaggttcctgtgggtccccacagtgggtgcgagagcaccagcctctcaggcactgactccaaagggggcagtcctttcggagaaccgaggggaaacctacaggccacactgagatgaggcgggcccagccacctctgtaagattagagctgggtctgtgccttcctatcagagcagtgctaacgaccccgaccctctgcctttctgcttgtagtggggaagaaagctgcatccccgactctgagtgctgtgctgtggtggtttgaataggtatggccccataaactcatgtgtttaaatgcttgttcatagggagtggcactgttaggaggtgtggcctggctggaggaagtgtgtcactgtgggagcagggttagaaagtctcctattactcaaactactggcagtgtggcacatagtctccttctgctgcctgcagctcaactatcagctccttcaggacgatgtctgccagcacgctgccatgcttcccaccatgataataatggactgaacctctggaacagagccagctgcaatgaaatttttttctttctaacagttgctctggccatggtatcttcacagcagtgaaatcctaacacgcactgtatatcaatcactgcaaaataccaggatggttctcaactgggaggttcctcacccaggggagcagcatgcttctaaccgagggcaagggtgcacactggcgccatctagaggacagagaccaggcttgctgccgctattctaaggaccagggcaggctctctgctgtccacaaaccaccaattatctgctcctgagtgtcagtggtgtcgtgagaaacgttgtcggggagtcaggagagagagagagagagagagagagagagagggagagggagagggagagggagagggagagggagagggagagggannnnnnnnnnnnnnnnnnnnagagagagagagagagagagcatgcaatgggtcagatcaaagagaaaaccaaagaccaaggtctgtgggacaagagctgcaaagccggagaatccatgcactaaagaaacaaagataatcgaaaggatatggaggattctcagaaggaggagatagcatccataaaactcagatcaaaggttatgagcaaatggagagctgtgggtggatgactcaaaaaggcggccctagaaaggagcaattactgtaaaactcaagcaagctaatgggcgggccaaatagccgcacccactcgtgtgctgtgagccactatgatttgttaatgccgtttctaatatcgtcctctaaaactgcttaaatttgaagtcgtccactgcggggtgctgagcatctattttcctaatacattatcgatgtgacctgccagcaaccaagagcagctgtggcctgtgaggctggggtgtgtgattagcaaagccagagctgcagcaagggaggtttagtgaactgcaggtcacagcacaagtgctgaagcggaggtagaggtatcggagagaaagaccgtagccgacggcaggcaagataaatggctgggtgtggcggcacatgcctgtaatcccaccactctggaggcagaggcaggaggattaccacaagttgtaggtcaggttggtcttcatagaaaactccaggctagctaggaacagaacaataatgatatatgcattagtacagccctaggaagtctggccagcagttacatcaaagtgtatcaggaatatggtgctcaaaactagcagggcatctacatgtaatctgaaatgtataggagagaactctgctttctgtgtatgagttaatgaatgaaaatgtcagcactgagccgggcgtggtggcgcacgcctttaatcctagcacttgggaggcagaggcaggtggatttctgagttcgaggccagcctggtctacagagtgagttccaggacagccagagctatacagagaaaccctgtctcaaaaaaacaaaaaaagaaaagaaaatgtcagcactgaagtaggaaaggggggagagggaggacaaacagtaaaggccatgaaggctcagtcagaaggtactaagttaatcagattttagtagcgacagaatcaatatgaatgtgtagtataaagggtttgttatagaaacagccttgtgcagtagtgggaagagccggaggagtagaacgtcaaaagggggagtccgaagaccagagaaacgcccctaaccagccatgatgaaaatctggtgcaggtggtcagttcaggacaggatttggaaagtgaggtacatctgtccagctgctgagtggatccccaaattataggtggagaccacagaaatctgctgccgtcacatctgctaatggggcaggagctgctatttggccagccggagagagcagtatgcagaatgggagtagagagagaagatagaatctccaggcagcctgtctctcctaccgggtctaatcaccatgcccttcagaatgcaatggctctactttccctccagcccctggaccttctgcagctaacttttggtcaactagcctgggtccatctgaacattggtattctggaatgtttacagctagccaagttgacccagtacatgtgaataggctagtattctatcctagggctgacagttaacagcagtaataaccactcagggaagttataatttccctgtgcttcaggggttctgatctaaatttttacatacgtgtatatgtgttcatcaattatgatgctcatcatgaacttgttctgtaagttaatagtaactacagtttggcaggatctaataaaacaggagacacagtgtatttctaagtatatcctctagagagaaatgcatgtaatgatatttaatgtgtcattatttattttggtgaaaaatagaacaaataaaacaagccgagcagtgaactactaagcgggagttccgagggaggtactcaatggtctcagtaacagctgctctcagagcatacagatggagacgtaaaccgcagagggagagcagcaccgcagagggagagcagcactcggctgcttagtcccacagaagcccttgtcttaagctgtctcttgtgagactatgccggggcctaacaaacacagaagtggatgctcacagtcagctattggatggatcacagggcccccaatggaggagctagagaaagtacccaaggagctcaagggatctgcaaccctataggtggaaaaacattatgaactaaccagtaccccggagctcttgactctatctgcatatgtatcaaaagatggcctagtcggccatcactggaaagagaggcccattggacacgcaaactgtatatgccccagtacaggggaacaccagggccaaaaaaatgggaatgggtgggtagggaagtgggggggagggtatgggggactttttgggatagcattggaaatgtaattgaggaaaatatgtaataaaaaatattaaaaaaaaaaagacgtgacatccacgttctagcatttcccatgtgaaatcagaaccaaattacctagaactggctgtgaggtacaggagagggcagtgagaatgtcatatgagggtgcaaggaccctccccagacctgaccctgagggtcaccttcgagtcagttctgatagtggtcttgctcagtggacaatgctcaacaacaaagacctacatgtctgaaaagtacacacacacacacacaagcacactacccatgcagtgggttcataattactttaacagataagtctaggctgtagaaataattttccctcattaattttcaaggcctcacgggtgtcaatgctgggtgatgctttccaatggtgtggctactctggggtcacctgtgctgtcagtaagcccagaaaactcgctggctccccaagttggactttggtagagtcgtcctttggtctgtccttgtcctataaggaggtgctagacctttgctcccttaacaaacctaaaaagaagaaagctatctcctcacctctcctaggaagctgctggaaggcggaatctgttagcacacaggcataaggtgggtaagagggagccatcatcaagagatagaacccccggaagggtcagaggatagagggacacaacacctcagctcccttggaccagtggagccagggaatggaggacttggagaaaaaggaaccaaagaaccacggaaggccttcatcccagcaagagaagagttacatcactttcagatctggaaagaaattagacacagacaaacttagcagtgaaagaagaaaacaataaacctaggtagctgcctatgaactcaggaaagccaactttaagaaaaaggactgcacggattatatatcggattatagattgtgtgtcttggatcaaagtaatctcttctgatctctttgtagtggtaatagtgtaggatcgtttgttgatgtaagccaagctgtggtggtaactgtcctaagagtgaaggcaaaaggacatgtgggtgttggggaagaagaggggtgaaatataatagagctagagtctcgttttttccccatggattgtcaggtcatttttaaacctcacaatcaaacaggccaagaagggtattaatcacaacgagagtacaactcagggcgggacttaacgggttaagagtaattggttctggcatctaggaactggggatagagttcctgtattttagctagtaaacatgtaagtggattttgatttaaccatcaagcttgtaaaaacacttcagactcttaaagccacatacatgcatcatttttgtacaagtaagcattaattgtttaaagtgtgatttcattcgtttgttggtagatgaattggaactgttggatgagcatttactcagtactgggccccaggcagctgaggtagcatgcgagtgtcaagcaaagcctcattcctgctgccccagggtgtgcgtgcgcttcgcagtgcaagagaggcttggatctgtaaaggcgtcaggacagacacttgcagcaggcctcagacaaggaggaccggaatctgagatgccctgccagccgcggccagaattaagtcctggggggggggggcaggaaagaagtctgggggagctgcgggaggcggggctgactcctgctctgctagacatttctattagtcactttttcctggggattttctcctgccctcgcacccagacactcttaattttgttattgactttaccatgctgggttaggttgttgtgcactctcccctggctccctgccttccaaactttgggtctaatttagagagggatgagggaagggagaagaaaaacttagttatgcctggcccaatgtaaactactccactctctgccgaccgcacaggcagtgagatatagctgttatccttttttcgaagtactgagataaagtagtcatattcaatttaaacatagtttttagaattctcaagagtagtgttggacacatctagtttttcaaagaaatgtaataatttcatattccagagaattcatccctctattatttgtgagaaatgcttctcaaggcagttgtgcagagtgtgtgtgtgtgtgtgtgtgtgtgtgtgtgtgtgtgtgtgtgtgtgtgtgtgtgtgtgtgtgtgtgttcgaatgtaggggtttgcaccctggatttgttttcttttatattgttgggcccgaaagaggaaagactggcttagaacaaactagcagagctaaaccatatgttttctaccaaattagaaacaggtgaaggttgttaaaatccagcaatcgcttaccaaagctttagcttggagtttgtattaaaggcaggtggttatatgtacaataaaaggccgtccccagcacaccggcttattgatacatatgtgattgatctttctggataaaacaaggcggagttaataaatcactgcacatagctataaagatgtttgggcttgaaagcctctcctgtaagagcaaatgtgggccctgaaggagatttatgaagcagagatccttttagctttacttaacagctaacatctgactgacccagggggaccatgggaatttattgccgggccattcaaatatttgagctgttgtgtgatgtagaacaggtaaagattagcccaataacaaatatgaggctgtaaaataaaatgagatttcgatggcgtgtaaggacctgtcagaggtcaggtccaaatgactggtcagactggggaaccaacccttgctgctaattaaaagggattacacagggctggatgttacaccggttgctgtcagctcagcatctttggagtttcctccactgaaggccatactttctcctgtgactgagaaactctgaattgcctttctgttctccgaaactgggcaagatgatgaactgaagtgatttttttcaatttcataattgaaatacatctttctcaaatacattgtgaatgtatgggttcctagacagcatatgcacttggaaaaattgtcagctaacttatgtgcataaacttgagctttgacatccagaaagcaggcatttagcctctgtgatacatgacctaaaattagccttcaaagcttaagtagttaacagatttatggacagttattgaaaacttaatgtagtggagttctgtgaacttatctccaaatcttttattcccttttatttatgtaagtctggaaagtaatgatgtgtgagtattgttcctgggactttagtagctgtatttagaactttaatgaggccattgttattggtgtcgacaattgctgcctttttgatttagccctaaactcaaaatgttgtcatgaaagttaggtcggttagagtgccagtttctcagatatcagtggctttggtgaccagtgtgtgtgtgaacatctccacaattgttatgaaaatcctaaataagattgtcactagagggaaacacaaagccacatgcagaggtttgggagttaggtgtggcctgatgtgcctgcccctctctccatccatacattctctctccgtcctgtccacaaatatgtcccaacatggagctcaggaaactgggttacagtcctgggaagactgtagctcacagtttccaatcctgtagaagagtcaaggagcccgtgggtacagcacactagaatatgaaaggtgcagggtaggaatgcactgggctttgtgcagtaacagggagcaaggtgagcaggaccccccgtggaccaccatcaaatgtgggcgcttctggggactgaagagctagtgtgtgctcaatgtgctccctgcagtgctctcagcatcgtgcctgtgtgtgtgcaggtgtgtgtgcatgtatgtgtgtgtagaggagtattaatgaaggatgaaagtatttccaaaccttaaactatttctggcccttggaattttaattcacaaggctgcagtcacttagacatttttatcagtcggtgtttgcctgttttgttcattctattatctgtttaaatggatgtatttaacacccactaagaacttcagcttaaccagccatgtattaaagagattatattctcactgattgaggcgacaagacatttgtgtgaacaaataaagtgtacgctaaaatgtgtcaggtacataaaaatgccttgtgatttcaggagcaataaaaagagtaaaatatgagctgtctccttgaggcacctacagatagaagggagggaggtggggagaaaagcctgtcctagacaaggtagtgatcctgagtgcagactctcctggaaggtgtgcagagcccagagtctgttgctgggctctcatggatttgtgagcttgggagtttggatgctggctccgagcggagggcccttgtgcaggtccaagcagataacgaagctaagattggattgtttcctcccagcccagggccttaattcattatgccccagcctctctggttttctcctctccccccttaaagtaggtattggataaataatgttcatacaggggttaagcccccgttgtgttaccagtgccgtgtaaggaattggctcgcagtgagttgcattaggaggctgagctgtttaaacaaagctgcactgcagaccacatcggaggggctcttagacaccaaaaacactgaatggcttttcttctgggtttctgctccagatggaaatgtcttctggcattgctgagtgtttatgtaccttgcaggctttaattgtccagtttcttttttatttttttagcatttacagatttttgtgggaacaggtgccgctggagccaggcgatgcaaggtggccgttaatgttgtggaatgtgactttgatttacttggcaggaattttattttacaaaacttactattaaaaaagacaggttttccatcctttaattatgctgtgttcactgaactttgcctatttttcacgttacagaagggacacctctataaggaaactgatagtgagttggttaacagtttccacagcctgccgctttgaccaagggttctctgggagcagggtacttttaacctcatggaatcctctggaacttagtttccctgaaattcattccctttttagtgtagcgccagcatcggcagaggggctcctgttgtatgccttctcaccattccatctcctctttatcattttggggtgacatcttgttacctctcacaccagatttcgtctctttggttcataatggtctttcattatagattttctctcttccttcgaaggaggtagaaaggggaagatgctcgctgatgtcccctggtcctttttgtctctctgctgtccttaggtcagactgtgacctcctagtctcaagggttatgactgacatgtctgtgccttcatctgcctgtccccgccgcgcagcccctctcctgactctgctgactgcctttccattgcgtgagaacagcgtgcttctcctgactgggcactctgtttttagttcctgcctcttgggggtctcagctagtcacactgtccctgaatccccctttcctctctgaggtcgtgtttcttgcctccagaatgctttatgaattacagatttgctggcgtgattaagcaagcagtgactgggctccgtcgggccttgagctttccgtctgtttgcccaactgtgtctctcccaaccggcaccatacatggcacacagtatgtcctagtttgctttctgatgctgtggtaaaagcaaagggaacttggagggaacgtgtctatttagcttacggcatcactgggctgaagcagagaccatggaggaatgctgcttgcttcctgacaacttgtttctcttacttgttgacagttgacaggaaaacttaccagcacacagtaattattgactgagtactgttcccacagaggtggttctcttccatccttccttcattagtgaggctgttcaccatcatctaagatagactcttctgggcctcccctatgacagaggaccttggaacagccttctgtgtctcactgccccttccttcccttgtcaagcttgtcatctccattgtctcctctccagccactcccaggctcacagcagactgtcccactgcactgagactcttcccacactaccggagctacccagcagtgagctcatggaactaaatctagcaggctgttaacttcctcattgcttgggctctgagcagtgttgactgttgacagcctctttcttgaggtcgcactttccctgagcttcttgcttgtccccatagtttagagccagccttttgaaactttttcattttccaagcgttgattgacatcctcagggtctgaagctctctatgcctgctcatacctgtggtttgggtttccacctaatgtctagaattgctattttcccctcaatttctcttctaaatgtatttgagatatgtgtgtatgtttttatatattatataattttataattattaaggggagggggtcctgtgctgtaatattgctatgtaacccaggctgtgttgaaccccaagtcctcctgcttccacttcctcagtcctggggagtatggggtatgctctgacccagctatatctttgccatcataacaacccatcacaaaattccttcagttcttcccactagaactgaaatcctagtttagaattatctagaactcagaacatatcttcctttctactcctggacccctaatcatttctagcctggaacattgtaacacatgcaaaaataggtcttaatcccttttaccatactgtggctgaaatgcaagttcaagagctgatgtacaaatgaacttgcaagaactgacagcatgcacaagttcaaaccagacaaaatcccagtgcagggagcttttgtgttgttttggttttgtgctgcttttggttttaagagggaaaaagaatataaagttgttggttagggagggggatctaggagtagttgaaaagaagaagagtatcaccaaatattttatatgaaaaaaaaacaatttaaaaattaaaaactaaaaaatctacaccccagtttagggctatagctcatttgtaacatgcagggagtgtcagattagattcctagaaccataaactaggcgcatacctgtattcccagcactcaggaggtagaagccacaggatcagaaattcaaggccatcctcttggggaatccaggtctagcctggagtacaatgagatcctgtctaaaaacaaacaacccaaaaacccaaccccatcacacccaggcattacaaatgaattccctggggctggagagatggctcagtggttaagagcattgactactcttccagagatcctgagttcaattcctagcaaccacatggtggctcacaaccatctgtgataagatctgatgccctcttctggtgtgtctgaagacagctacagtgtactcacatacattaaatagatagatagatagatagatagatagatagatagatagatagatagatagatcttttttaaaaagaggatgaggaagaagaggaggaagaggcagaaggggtttcctgtggcttacagaagaacctgttccctcggctcgcagacctgtccagccacccccataaacccgctggctgtctatttcattgtcctcttagccatctttgagtctgcctatcacacatataaaatctatagcaactcatgttgacttcatcctcaacctaggagagatgaccactctacagccaccacgcaggttcaaaccagaggcctctcaggatgtgctgcagtgggagtggccctccatgttttctttccctttcccctataactctttctcagtgagatggctcagtgggtaagagcacccgattgcttttccaaaggtccggagttcaaatcccagcaaccacatggtggctcaaaaccatctgttagaagatctgactccctcttctggagtgtctgaagacagctacagtgtacttacatataataaataaataataataaaaaaaaaaaaaacaaaaaaaacctctttctcttggagcatctggttgttgtttttaacttgttgactttgaagagagatttactgaccattagacatggggagaagaattatcaaacattcattatcaacattatcaaaaagctgatttcattcattttcacaggaattagaataaggcacaagtatgtgctgggttttgtaagagagctccattctctgaatgaaggagtcaagtaatggactcactcacaccctagagtttgggaacaacactgttcacaggacaccacagggacagagaagaaaagccatcacctcatgcctctgggataagataactctcagttcccaacatggagaatttgacatgtttatgggacatttaggtaaaaatgtccagcacatgatcacaaatataactatgaaatatggaagaaaggctctaatatacagttaacaagtgataatcatggtctaagtggcttttagtgctttcatttttcaacaacatttattgaatctctcagtgatagaaaagcctaactactagaaatataatacacaacatagataaaaatctgtatcttcccagagcaaaccttctggttgaaggggatggactcaaatgagaaccagatgatagataaagtgaactaactgaaggccattgttttctgttgaattaacttttactagggaagactttaagcacatatacaaaagcagagaagatggtatgacatatccttaagcccagctataattagatacactcattaatcttttttatctatattcatattctctcatctcagtgaattatgtctaaataaacctttggtattataacttttattcataaatgcttcaacatgtttctctaaaagataagtctctaatacggtgttatgccatcatcacacataaaaaacaggtttcttagtgttaccgagtaaccactagttcatacttctctagttgctccatgaccttttgtatgcttgctttctccaagtccaaatccaagagtgtccttatatttcctttaattgctaatatctcttgtctttaaagtatttccatgttgccataaatctctgatttgtattgatcttatatttgaacaatagtccttgcatatgagccatgatgctaacttatgactgtcagtggcatgcacatgaggtttccttctgggaaatgacacatttagtgggctcattttcagaaatatggttgagggttacttatagaagcgtaggtgaccccaaagcagctgcaccactggaaagtgtcaccccagcatgaatgacttcccccacatctcatacttaaattaaaattacatgcagatgactgggaggtgcaggaggacgtggccagaatgtcagatggagtccagtggcttgcttctcttctcctatgaaggagtgttattgggcatttgttaatttcttactgacaggagtgaaacctaaagtttgggaacccattgtctgtcatacttaacttttttcttgtcacttgcctctgcttaaagactgtgttaccgcatgtacatttatcccacaattctttttatgaaaaggcctgactatacagaaaagctgaaagaatgtttaaatggacaccagcacagctgtggttggcactctgctaggtctccttgttcctaacctttgctcatctgtcagctgatgcattttgattccacagtgctccccctcagtaccccaccttgtgtaaatggttagctgtggagccagggactttacatttgggggggacttggggtttggtttggtttcttttggggtaaaacttggatactgtgatatgcatatatattaagtgaaccatgtctgaggtccttagatataaatatctgtgcaatccaattcctattcagatacagaacattaaatctccccagaagcatctctgcctcccataaatcactgtctttcccaggcccccgggcagccattattcacacacactgcaacctgaacctttttgtgtagggctctgttcagttggtatgtttgtcgcttcatttggctgttgtgtgtaatggtaccacttatcctttggtgtattctttgtgtgaataggcctgtttatacatgctcttaatggtgactgctgttcccaatttttcaccaccatgaagaaggttgccgggcccatttcggtatacagtttttctgtgcaaaggtttcccatttgcttggttgtagttgtaaaattcatctttagaatgtgacattgtgtgctgtgtctagctttataacaggcctttctccacgctgtttgtattaattacagtgtatggcttcaggtactcctcatcttaagtctactttcatctgaaatttctcttctttattcttcctgccatttttttctgctgaaactaagagtccatcttccccattagagcccacatattctgaattttacaggttgcattcttttgttatcatttaacatattttcccctgagccccctgtaagactggggtaagatttttccgtggtgtgctctcctggcgttattgatgctttctgttgtatcacatcatatccagttgtgcttttgtgtgtggcgtcaaagctgacgagtaagcctggctgctgtgatctgcccattgctccagttttaggttgcatggccttaggaaggcctctctaaatgtgactttagccagtggacagaatatgacaatatctgctctggggagatagaggaaaaaactctgagagagatgaaataagaatttaaaactaccaaggtaggaaacacgtttggcatgttgaagggacagagggaaggtcagagtgggttgggcctgctcagtgctgaatgacaggaagtgtgtaatcctggggacgagggagcagactggtcctgggctccaagggctgggctgtgcagggtacatgttatgtcagggtatggcacaatttttcacggatctaagaaagaagagtgggtctataatgaggtctgatttttttaaagggtggtttgactgtggtgaacagggtcagaggagccctttgttcaaccccctactcttcatggtgttaactcagcccagagtgtggatatatatgactttctctgccaccttaagctaattagcaagcttaaaataagattatcgtttgtttgaaggatagtaaatggtccttcgaatgaaaatgcaaaccaagaaggaatggagggtcagaaagatgctcagtgggtcaaggtgccttccaccaggtccgcccactgggtccgttccccagagcacacacacaggtgaaagggagagctaactgcactgagtcatcctatgcccttacatttgggctgtggcgcaaatatgtatgcacacaagtgagtacgtacacacacactcacatgagcacatacagtgattacatacatacatacacagcgagtgaacaagtgcgcgcacacacacacactcatgcagtggaaacttctcgtttctttggaaagttagttatgtcaaatgatgttttgctgaggcacataggtgaaaggatgtcttgctgaagcaaacacatgaaagaatgttttcttgaaacagacacaggtgaaagaatgttttgatatagcaaacatgtgaaaggacccaggttgaagaaatataaataggatcccacagacagtgggagacaagcattgaacattagtttggtttgctccgcctcgctattctttgctaacaatacgcatgtattgattcaccttacatagtgctgttgagctcagcttgtggtaatgttgccattgagaggaactcgcccaggatctgctcctgaggttcctgcaaggttcctgtggcagcttgccactttagcgttcttgcctcaggccataagtgttcgtgcctggtgtctgcctgcccaaaggactggtctgtagttgctggtttggtcctggtgtcagcctgccaaaaggattggactgtagttgccagttcgtgtgtggtgtctgccggcctagagactggtctgcagctgctgagttgtatttggtgtttgctaggggactgaactctgagaaagaagatcaagcttgcctccaaagaactattgctaaagaggtccacttcctccatatcctaataacttttctcttccactacctctgctgggtggtgggctagtttgcaaaaactttatgcctacacactcaaatgagtacatgcacacacacaaaatacatgtaaaacaatgaaatgtgacaataaattaaaataacaaatgacaagtggaagtggaaatacggatctaaaatgtttctaaaagagtatgttatgggctggttaataaatgtgaccttgtgacgtagaaacccgcgctgagatccttcccagtccaagtgaaaggcgacacccatgcccctgcctctgcctccccacgaactcttctggcctcacctcagtgaggtgctgcagagctctggagcctcagccctctggttaatcttggaaaagtaaacaatctgtccttattgtcaagtgtttaccctgtccgtgtcctggagctgcacagtgtggatctgtggtctccaatttaatgtgcatcaatgtagctttaatgtctggtctctaagtgctggggaaagcctggggtgtgctgctggcagtttctctttcctttccccctagaggattcggtgtaattggttagtctttgctttatgttttgatgagtagtggtagtggcaggggcatttttgcttggtagtggtggtatagtagctgttgtagctattgttgaatgtgtggagtccgtgtagctttaagatttagcaaagccagccagggactgctgacttgtaccagagggtcaggcgtcctagcctaagcaccacaaaactaaagttaggatccctggtttatgaggacttgtttggaaaaataaatcattaaaactatctttataaaagcgagctttgaggctggagcggtgtcttggcgattctcagcaccatgtggcagctcacaaccatctgtaactccattcccaaggactgcaacaccttcttctgggctctgtgtccagcaaacatgcatgttgttacatagtcatacaggcaaaacacccaaacatagaaaataaaaagttatttttaaagtgagcttcatattcttgggctgattctccaattttactttaattttctttttccttttgtttttttctgagatgccagttactctccatgtcagtgggctgccagcttcctccaggtagtccattcttaaaagttggattacaacaggaaagactgtctagtctgccaagctccttcttcacttacacagtccaggctggtaaccagggagtggtgccattcaccgtgggcagggctttctacctccacacaatgaagggaaccctatagcagtggttctcaaccttccaaatgctttgaccctttcaaacagttcctcacattgtggtgactccaacgatataattattttcattgctacttcataactgaaattttgttactattatgaatcgtaatgtaaatatctgtgttttctgatggtctacggcaacacctatgaaagagcctttgagccctaaaggaggaagcccacaggttaagaactgctgcccttgtaggcttgcccagaagcccacagcccagtgtctctacagtagggtcagtctcactctaagcccaggagaacagtcgtgatgaaaatctaatctaggcagaaagaagacaacctagttccacatgaattaaaggaaaaatatgtcctcagaacatattaatgttgtcatgctttctacaaacacagtggacagacgtgatccttacacatacagtagaagtgaagccgttcctgccgtagctcaacccctaccttccatcaaagaacctaacctggatgtgagtctgagaaaagacctagaaattgtcaccagtctagagttctttgtttacaaaaaagaaaaattgctggggttgaaagagaagtaagtgcttataattttttttttagtaagaaggaaaattaaaaaatatctcccttcatgtattatgtctttgtggttttgtttgttttgtttttaagaaaaagggtcagcctggcatggtggagcatgactttaatctcagcacttgggaggcagaggcaggcagatttctgagtttgaggccagcctggtctacaaagtgagttccaggacagccagggctgcacagagaaaccctgtctcaaaaaaccaaaaaagaaagtaagaaagaaagaaagaaagaaagaaagaaagaaagaaagaaagaaagaaagaaagaaagaaagaaagaaagaaagaaagagaaaaagaaaaagaaaaggggtctttctaagtagcttaagttctcgtggaacccaagaccctcctgcttcatcttccaagtacaaggcttagagacaccttcactcctggctctgtggctggtgctttatgtgtgtatgaacttatgcaggagcaaagggctctccatgagaccaaatactcagatttcttttcaggtaccctgcatggcagcactcaataggtctacattccagccctagccagtgcctatccagataccccttaagcactgtagttttgaaatgctttccggttttccaaaggaaaatgaaaccattgtgcattcaggtgcacacatgctgttcacaggacctcggctcagggtgggggttgggaagaatgttgtagctcatacagctggtgggaagccagggtttcctcccgtggtggtttctagggtttttgtcaattaccacaaacttgatggcttaaaacaactctcatggacaactgaagtccaaaatcaaggtgacagtagggccacacacttttctttcccgttgctaagctcctagacatttcctggctgtagctgggtaaggtcacatgacctctcctctgccttccccttataagcacacctgctggatttaagacccacctggataatcaaagatgatctcatccctagatcttttaatattttgtgaccccttttccaagtaaggtcacattcacaggttctgggaattaggatttggacctactttttggcaggccaccattccaccctctgtcctttacatggtccccacctctgactggccacctgtacccaagatttttaggattgtgagtagctgtagtgagaccaagcatgcatacctgtcactccctgcttccagaagccatgcagaacagatccagtgctgtgtgtgtaaaagtgctgacctccctccaagatgaacacccctgtttcctccatccttgccctcagttggctgatgttctcctgagcagtcatcctgggtgtgcctccctgaaggacacagagcaagggagaatactgcatttatccatgaagaccgagaaatgaggtcatgtctctcccactaactaaacggtgacccaggcatcagtgtctttgaaataatagtgacactgttgcacagtctagtcatccccaggtttagcctctctgctaatcccaccaggatcacattagcactgggagccctgtcacaaatctgccctcgatgaaatggctctgcataatgagccccaaatcattttcacacatgatctgtttctttaattcaaaaaatacttgttgagtgtccattagaaaaggcaaaagaagaacaaaatcaaacctgtttctgagctgggcacagtacggctcatacctataatcttaattctcaggaggctaaagccaggaggattgtctcaattttgaggcaagcctgagctacatagtaagttttagatcagttgttcagccttgtccaaaaacaaaacaatcaaaagacccagtgtttattctgagagctagccactactaagggagacattagtatgctgagctgtgtactaaaagagacacggactaaccaaatatcacccagtgagtgcaaaattacaaactgaggtgactgagaaaggaagtgggacaggttggttaggatgatgtaaccgctcagcgtgatgagaccgggcatagaagaccaaggaaggctccagtattaaaggccaccttctccaccggtctgcaggccttggatggacctcttccatgcacactgtgttcattgcttactgcttctgtaatcttcactgtgcacagtaggtgtaattctttctttttttttaaagatttatttactttatttatatgagcacactgtagctgtcagacacaccagaagagggcattggatcccattataaatggttgtgagccattatgtggttgctaggatttgaactcaggacctctggaagagcagtcagtgctcttaacctctgagccatctctccagcctgtaggtgcaatcctaatagaacttggaaatgtattttaagttgagaaataacaagattggctatttagttgtgtgcagtgttaataattcatattgaatgtattaacggaaaatatgtttcatatttatttgtttcgtagtaccctttccttcctgttttttgtttctttggtttgtttgtttgtttgtttgtttgttttgggtttttttttttttttagacaagctttgctgtagcccatgccaatcttgaacttgcagacctcctagcgctggggttccagcacactggctgtactactctccagtaataagtccttttgtgcttttaagaatgtttttctgtctgtatgtgagtagctgagttcttatctgtctttgattcccatctcacgtcctgatggccatgggattttttctctttgcagtgggtcccacctctccagctagcttaggaggtctataaacccgcatgcctctgcaacaggagatgaatgtgaaagttataaacaaagtgttcaacttgaagtgacccattaagaatgtggaaggagaacgagacgtgaactctgtcctagtccctggtctgttttagcgctgccctgttccaacctttgtctctaatcactctctggttttgttttaatgttacacagataccttgtggctctttccacagagtcccagagcagtcataataaagtcaaatgttgtgaaatccagttttcacaaatgtagaggtttggttttcaacatgggctgatctcaatttactcttatggtgtatggagtttctgaatttataacttgaaagtggagatgacgctgggttgggagaactgttcagagtctatgtgtggtggcttatagaaaaccctgcagcaggcagagctttgggactcctgcagattcctccaaagagcctcattgttatgtctacaaatatgtagtttcccgcaccccagtccatatgagtgtgaatggttcctggcactgtgaaacaaccaccaccaccaccaccacccccctcccccggtgttgcgttgtgtgtcctacctttgtttgcagtagttatccctctctactggcgatacaccacgcagcatagtttatgctttattgtcccagttaaatacaaagttctgtgttcttgatgggtgtctaagacgtttggtttcctttagtaaattttcagttcatgaccttgctccctccccaatgcctataaattttacagcacatcagatttacctattgaatactatgaaactgatagctcttgagaatgtaatagaaagcttttaaattgtacttccttttttattatgcttgaaaactctacaccctctggactttctttattaaaatgcatttttttcttcagtcatttgtgacaatcaaaacggttagtaattattctacaccattcatttcactgtggttatgttattcttgagagtagttctactttacagagccaagctagatgtcatttgttttataaccctaggttgtggttgatattttttcttttaattagtgtatattcatgggacattatggtaagcttcagaaatacagtttctttcaaatatatcattagctttgaccaaatccactcactctctctacctttcctccccttggtcatccctcctcacccctcctgtcacactctccttcctccccttggtcatccctcctcactcctcctgtcacactctccttcctccccttagtcatccctcctcactcctcctgtcacactctccttcctccccttggtcatccctcctcactcctcctgtcacactctccttcctccccttagtcatccctcctcacccctcctgtcacactctccttcctccccttggtcatccctcctcactcctgtcacactctccttcctccccttagtcatccctcctcactcctcctgtcacactctccttcctccccttggtcatccctcctcacccctcctgtcacactctccttcctccccttggtcatccctcctcacccctcctgtcacactctccttcctccccttagtcatcgatcctcactcctgtcacactctccttcctccccttggtcatccctcctcactcctcctgtccactctccttcctccccttggtcaaccctcctcactcctcctgtcacactctccttcctccccttagtcaaccctcctcactccctgtcacactctcctgcctccccttggactcttttctgctttcatgccattcttcatggatatacacacagatgttttgatatagccataaaaatgtctaggactcacagtgaaaagggaatgggatatttgtctttctgtatctgtttctatatttcatttaatgtagtaatttccagtcctaatcattctcctgcaagtgctataattttgttgttctttatgagtggctaacgttccattgtgtgtgtacacggtattttctgtatccgctcctctgttggcacctagtccaattgcatcttgtggctgctgtggtagtgctgcagtaggcatggatacggaggcacttctggggtgtatacccagaatggtaggcgtgtatttcgttctttgcggccctctatacttagttccttcatggctagagcattttacattcctatcagcaatgtgaaaaatgggctaataaacaggtagtctccaaagatgatttacagatggccgacaaacatctagaacagtgcctaacactgttcgccctcagagtattataaattcagagcacctgagactccccctctccaagtagcatggccgtcactaagagcaacctgctggtgactgatcttgctatagagaaatctgtttcaggttattgtactgatgcttgatcttgacagccagaaaaacaaaacaaaacaaacaaacaaaaaaacgcaacacctgtaaatgtgtgctgacttcttcctatgcatgagggaagagagggaccttgacctcgcaagagaggtctattccctaacataccagttcattttagaaatcccaagctcaggccatgttgcatcagtgaggcaggcaggtcgcaaggtgaggttattctggagagctttgtgtcacaaatatatcttcatgcaggcttcatatccaaatagctgagcttgcaaagggatagattttagatgaattttagctcaaatttggcattttgaccggccatcttaagagcaacagtcttatatattgcttttaagtctaatttttccccttaactttcttccccattttgttctagaagttgaagtgtcaagtccaaggcattagaaagaatttggaggatctttgccataggctggcaagattcaggaaacagcaactccactcgttggagccgtaggtcctggtgtgtggtccatacagtttctctatgggaagacaacagctgttgtctcttatgcagatattggtagattggagcaaccatatccaagtctttggttaagtctaatcatgaaatatttgtgccgtgtctaagaaagtctgcttctgtcaacagtgcggaggtcattttaccctgtcattgagaaattctcatctttgtttacctttcttaggtttccactgtatccaaagggaggggagaagctgcagtttgactatggtgtctaccttctgaacaagaacatagcacaggtaagtggctctttgttccccttactcgattgttaccttctttctccagaatcagttactgcagccaaccctttacccatttatatgagctgtgcagtttgttggccatagtcgtcttctgtgacattaaaatgaacttggagaagcagtggacatgctttagaatccatctctgcctctaaccatccttttctgagtttttctggtaggcgtgggcttgagtgtgtggtctgaataaatctcttggctcttcagcttgattgataatggctttcttctggggactcattttgcattattgtttatggaataaaagtttaatgcctttggcaagtccataatggtctcctcacctcattatccagggcccaagggaaaggccaagcgtttgttcctcccagcccgtcttggatgcttgtggctctttcagcatcccatcagttagcatctcatatggacagtgtttcccatggaccgtaggaagagagcagatgcctggctttgtgctttcccgacagcagcccatagcattgctttagtgcagttggctctgcttcaagccttggacagtccatggatttttcagctgcaggggaaggctttggtgctgttctttcctttggagatccgtccaatcgcagtatcacatggtggagcagccacaatttgctgtttaaagacattgtcagatgtatcctctgccttttgattttatggaagtagtaggtgtgtggtgtgttgcttttacgagcctcagttgtcttttctccatatgaaactaaaggtccgtcagacctggaattatccctccatatggggttatctttactttcttcccctcagacctcagtttaatgttggtttttgttttgctttgttttgttttgaagtgtggtttttataaaaattgtcatcattttctaaaattggatcgtatttctagtttgtcatactgaattaaccacttgtttcctaaccgaagctacaaggttcaggaccacaccagtgcagcctcgcttccgtgctagggaggggagctgccacacacacagactctgcccatgactcccctccccctgtgcccttcttcccacaactgatgctatccctccctccatttttggcagataagtatttttgtcaaagaagcaggactttaatgtcaaggccagctcacacacctcggtcacagttgtgtcaatccctggaaaagactggccttttcccgaaaaaatccagacgaagaccacattaagaaagacgaagtgaataagtgaatgagtgaatttgccagcatgtcagggctatcctgggcagggagggcacagctgaactaggagtgaaaatggctttgtttagagctactttctagtctgagtttggaggttcttttcccctgtcccattggctgtatcttgctctgtgcatattggaattggatttggaagtttccagggacaactagccctgctgcggtgcccggatctcctacttactgcctgtcagctgcaaactgaagaatgcatgcacataaacatgtcatgttcccaacagagatggaaaagatggtataaagagatgctgagagtagcccatctgcaaggccaagcgcaggctgcctatgtgtagtgggaaactcgggtcaatgctctgcatcggctcacagatggggcgtgtcagagcacttctcaatagcccctgacttaaccaaccgaaggccacggtgtgctgagctgatgttctcatctgcataggaagtagcctgcccgtagaagttgtatgtgcccaactatgtattctttgcaggagcgggcgatcgcttatttactctgcccataggaaacaagtagctagctctctggtgtccttttctgtttcttcaaaacacacttccatagatttgaaagcttgttcaggaagccactttggagcacataaaagaaatttgtagcaaatctgtaaccccaagaagctttgggaaggtttctttgtgttttgaccttactagcaccgctcttccatgttcctttggtaagagcattattaataactatcgttcataagccggccttacagcaacaagatgtgtgcagctttggacggattatctgcatgtactaatgcgtgctgtcaaggagaaatttgtcttctcagtgagtctcgtttctaccccatctctagagatgtgaataaggcacgccattgcggcagccccgcctccgtgatttacaagccacgttagtggaggtagatgaaagtgctggcatgtgttaacgtgccagagaaagggagtgaagtcatttagtaccgcgccgtaacttggtcgaggatttgaatagtcaataggacctttcatcacaaccagaagtagtagtaaaatcacttttctggtggaggaaatgacagaacttagtaatatttgttacttcagggtttgggatcaatccagcccgtgctttgaaagcacaggcttaggaagacaggccttcaagcagaactccgaaagtgtcgtgagaagagcagagagctggccaacccgtttgccctctgaatgccactgcagtctgaggggctgcgggtgctgagccagccatgagagtgaattagtccggcacagtgcttgtcagcagcagagctgtccatccagaggcagcccctcagcaggtgacagcctccacagccgggcagcaggcaaaactgcagaaatgggcctgtcagactgaggcacaaaaatcctgcagtgcagctcatgtctgtaatcccaacaccagggagacggaaacaggaggatcgctgtcagctcaagactagtttgaactacaaagtaagccagcttgagctagtggcaagtctcaaaatcaaacaataacaacaaaaatccaagatttctaaacacagtataattagcactgatttttaaagtgaggttgtctgtggcttggataagctcagctgatagaaaacatgcctaggactcaatgtctagtactactaagaaataaggattcccactttattagacttctagttgaatggggaaaggcatacagtaaataaaagcattttagattaaagtaagtaaagtgctaaagattaattgtgataatgcaaaataactgggggaggggctatgtacctgtgttagctaaagttgctaaataagcctttctgaggaagttattgttgagctaaggcatgggagatgattagaaatccagctgttcagggataaggatacagacagttgtgtaaggcagggacaaagaagaaggtgcgtgtggaaggagcattgtaagcagacagagggaaacgaacagcacatcacagggccttaggtccagcctaattctgaattccagtggaagctagggatgactggacttgttcactcccgtcacttgctgcctcttgagtgtgcccacatacttctttttctctttctcttccatttctctgccacttacttgctcctcttagaggtgccctgggtctctgagtatctggggtggtctcaggagcgctgttccccatccgtgcattgtggagccgggcaggggtcctctcgggcatggtctacccccaccaggcccacgtggcacccaactagtggtcatctcaggctagttccctgttcaggccccatgtggtagtcatcttaggctcactgtcctccagaccttcccagaggctcactccctcacaggcccctcagtcccagacagggttctgctagtgtccggcttgtcccaggatggagccacgagcaccagtacagcctcagactactgaactgctgctaactgcccacctaagccccctggcaccagacttgtggtcagcccaggctcgctttcttcaggaaacgttagactactcagacattcacaggtcaaaaccctgagcacagatgtaatctccctcctctctgccgcccactggcacacatgacacagcagccacacctacagtgctttagcgacagggtcatcttttttttttttttaacatgcttgttttaatttagttgtcagtattaacttttatttctactgacaagtaatagatttctgttgtttctttaaattttatttttatgtgtttgtacaagcatgccatgtgtcttcagatctggatgagcaacgaactcagaccccttagagctgagctgcctaatacgggtgctgggaactgaacccaggacctcatgagcagcaaaggctgtcaacccctgagtcagatctctagcacctctttaatcttttaatgaattaataaagtccattttaattctcatttccagtatggcaaatattaacttatatgtgacccacataaattggaaatcttaactgattttcagcgtataaaggacctttgagactgaaatatttgaattgctgtcctagacagtgtagctatctatacttcctacaaaagttcataccccaactaacaagatctgtctgtcagcccctagatgtcaatatttgtatgagaccaggcctgccggcgcgagctccgagaatgcagcccagtgcagggaaaaggtcaacagcgctgtgaactcaccgctatctttttggcttctcttaacccagacccccttctctcctccccagaagctgaggggctgagggcccgatgctttgtgggtacactttacaaatagcaatgatgccctacgtgcagttggctgctaggactttggtatgatttcagtcctatagcccattgcacacctgcatgctttccagaccaagcattacagatacagaactgcctgtgtgctaatttctgtagcttcccaaacctgtcacattgacaaaaagaatccagattaagtatccccactagcttggtgactagtccttttttttttttttaaatgtaggccattctgtgaattccacatagacttttacttgtgtaccaaggcttaagtaaaacaacagttaaaagctaagggccactgctcactccagcagcccatgttctaaagcccagggttccttcctgctctgcccctgcatattattttaaggcttcacagaaagtgaaaataccgtctccttttaaacaagtcatgacctatgaggacatgcacagggcccggtcattctcctggtgtccagagtccatgctcccccaacatgcagttcaatatatatgacacggggagagcatgcgtttcgttttgcaattcctaggagtacacgttgcaaagactgtattttcttcactagtactgggggttgaacacggggcctcacccatgcttgctgagcaccgctgtgagctgcaaccccagcgttccaaggagactttcagagtcaaaaatgtcccccatgctgccaacaaaaatttggcaacaatgtagtgaaagttcatatttaaaattcttaaaaagactttgctaagatgtaattgacacgccttataactcacccacttaaactatatatgcagtagctttgtatgttgatgtagccaaccgttcatatgcacgtggaggccggagtcggtgctgggtgttctccattgctctcccccttggtctctcactggtcccggaacagctcactgtttctttacactggctggtcagcaagccccaaggatcttctagctctgcctttcccaaacactgagatcacacacacacacacacacacacacacacacacacacacacacacacacacgtttattatagtattgtttctgtgaacatcttatataagtttaaatgacacgtactttcattatcctcaagaatatatctagcagaattgctgaaccatataattgtgtttgatcttttcttttcctttcctttccctttctttcttttcttctttttctttgattttttttatcctgtattcaagatcaagcccagatcctaatacatgctaagtaagcacccaactactgagttatgtctccctatgttgaatgttttgaataatcgtcagacatttttgatgtctataccatttatattcctgccaccactgtaccaggtttctaatttctctgcgtgtctgccaacacttgtgattttctgtcctttttggattttcaagccagggtctgtctgtgtagccttggctggaattcaccctggagaccagtctttttgagtacagccttcccactagctgtggggtgacgatcacactgtgatttggtttgagtttttctgctggctaaggtgtccagcatcgtttcagaagcatacccattgtctgtatttcttctctggagatgtgcctgtgcagacctttgcttgtttttaatttgggttgttttattgaattggaagagaactcggtatactgtagataaaagtcccctgtaagataaattattagtaagtaatcattcagtttgttttcataataactattgtttggttgactacaaaagctctataagtgttggtggtgttctgctcacttgaccactggataagctggacctctgcggacagagctctttgcgctcaatcacagagctattaggtgagcagagccatggagagcctgcccatcctgcattgagaccaacgactatgcttgctacttttcttcctagctgactgccacagacatattacaaagccaggtgctagaggtgtacaccttcgaggccaacactcagaggcagagacctttcctgttttcccgtggttaggagctaaggttctagcatcctgctcggcttagcatctgtaacatctctttctctaccctctctcacactagccttactctgtgaagttggcttttctaagcactagcagcagtgagtgacatccgctggggggtggatgggggnnnnnnnnnnnnnnnnnnnnctgcagctatgcaaagaatgcatctcaactgagaggctagtgcttggttcagagataggaatcctaactgtattctttgtgattgattgaaccttatgaaatgaattatgaaccatatgaaaaatgaatttggtctgattttagttggcatcaaactgaccagcatagctttcacataagctatttgaagaaataaactgcaaaaaaaaaatgatatatctgaattctggtactcattaaagaagaacattttaaattttatagccttgagtttccaatgataataaaattagtatccttattaatgtaaatttagcaagtaaacagccaaaaaatttagattaaagttaactaattcagaggccgcatagctgaatggttaagcacttagtagtccactcttaccatcccagcccccagaaaggtgagacaggagaacagagatgtcagggcaagcctgggctctgttgccagactccacttaaggtaggaaaagtgggaaagccttccaagcagtgctgtgcacatgtgtagcctgcaactcacagagtaacagcttaacgttggtaactgccgggcctctggcactcggcctcggcgtctgatccagagtgcctaccttttaaaaatggagacttggctcatatctgtatagatcagactggcctccagctccggggcttcctggctccgcaccctggatgctcagagtacacagctaaaagagatacaattaaaataaatagtttcagaatgtgcagcagttgtcctttctgctttttttccccatttatgtatattgtgaatgcagtttctgttgataagtagagctatgcaaaggttgtcctgcggtatgcatgtaacattattcacttaacagtttctttattggtagacatttaggtcatttcaaatattactttattctcccactgaaatatttgcatatgtgctagaataaatatctaggctaggcatagtagctcacacctgtaatgccaacacttgggaatctaagacaggatgatctttctaagttcaaggccagcctgggttataagttcttgtcttaggaggaagaagaggaggaggaggaagaagaaagaaaataatgaataatacttttttaaaagatgatagcaaggctattcagagtccccaaaactgttgtgctgagttaatccctatgccttgtaacttacatgtaactagtaacttacatgtaactagtaacttacatgtgggatctgctgaagctttgacttacgccagcctgtgtttaccctcttcctctcctgcagctcagttcagcatcctagttgcctgcagcatgtcagccacctccaacagaaggctgaagtcactccactcacacttcctagagatgtctctaggagtctccttaaaaatttttagcagtacgttttctgttcactattaataaactataatatttttaacttgtgagaaattaagtcaggctgtttaggactgaacctaaaatttaatgtgaaggaggctgaggcaagagagttatgaacttgaggctagcctgggctacataatgaatgatggcatacactaaagcaaaagctacaaaatgcctcattctacctatgtagatgaaaacatgggcagaaacagaaatgggctctgacgggatcaacacggcagactaagctttatgtcacactccacgtaaacgtcagaaataactgggcttgagcacaccctgaataaccgcatttgtaaaattagctttaatttctttgactgaaaactgaggcccactgacttttttttttttttttttttttttgacattctaaaatggtagtgacagggaactggagcacagggttccttctgcagggctcaccactgtgtggcttccagcatcaggggacaggcatgccaagacatgcagaagaccacccacttcaaagagctttcccttactctctaggattcattagttcatagcaatgtaaaagataaatgtatttttcctgccttctgcagtatagcactgtaccctgggctggcttgacttggagcagtctgtggctaggaacacaaatgtaaggggacctgtgtttattcctggtcagtgttgtgactctgactggacctcatttaaggaaattctctccaggcctcgagtcccatgtttttatgtgacagggctcatagcctccgttgtgccgtggagtggttttgacgtttggtttttcaaacttctctccagttctctatctttatcccattgtgctcagttttacagggacagtcctgtcgcattcccagggtgccttgcaagacagcctagggtctccagctccagatgtgctctcatctcacagttaactctaactgacctgcccatgctatgtgtctcttcctcatggtgacaccgatgagtctcagtgcctctaagcccaggattgtgcccaacaagaggactgagataaatactcttcatttcctctgacagcactgttctgctatacctcctccctggtttgggagcacatacatgattttaaacacacgcatatgcacacacaggagcacacacacccacgtacagacacaaaataaaaataggttattctttaaatttttaaatgtatatgaatatgttgcctgcatgtatacctgtataccacaagcatacactgttcatgaatgccagaagaaggtgtcagaagccctagagaattcgagtaaaagacatttgtgagtggccatatagatgctgggaattgaacctacgttgttggggtaaacagccattgttcttaactgccaagacatctctccatgatggtataggaaaaggatcatttagaaaaataatccaggtggctgatgtcattgctagcacagagtaagtctggcgtgttctagcaagtctgtaatcccagcatttgaggtggaggcaggagaatcacaagttcaggtttctccttagctaacagagcaagtttgagtccaacctgggatacacgaaatcctgtctcaaacaggataataataataatttggctctgtccagggaagttgaacatctgtatatgagagtgtttatagcaacagtattcatattagccaaagactaaagacaggctgcaatccattagcaatgtgtccattgctaatcatgggtgtttacatatggaatactgtgccaccacagagccatggcagtgactaggacattgaatgccaagatgcatagcacatgggatggcggaaagagatcgctgcaagtgtgcaattcacaccagacaagggtcagcagtgctgttaggaatgaactatacatcaagctgaggctggattaccagtgaggaagggaaagaattagcacaaagggggctcctggggatcctgtgggacccagcttcttctctctgtagcctgagtcgtgtctgcacagtgtttgccttatcattctgatcctttaaactgtacatcgtatgtcatgtgctcgtctgtgtaacagcagtgaaagggtatacgtagcaccctcggctgagtactggtctggtctgaagatgccattggctatgatgaaaggcatcgttttattgtcatgtaccccagaagaaaaagaactttgaagtagagcagcaatagctcatatgtaggcagagtaggcttttatatgtatattctatatacctaatcaccatatagtatttctgtgtcattagtgtggaagcaagcttgggctaattttgggtagaaaagaaatttttaaacaatgactgaagcaaatctatgtggagtgtttctgatgttctatattatagagggatacgctggaaacagcatctgtgaacatcttaagaatatgtgataaagcaagctgtccacagacgagctgactgggttttagacagatgtctttccagcattcctacaaatgtgtgggattttccaaaaccctagtggtaaatgaatttgtgggcatttgctgctcacaggtcaatcctctgtgctcagcactgaaatcaaagctaattagaggagagtgagagagcctgcctctatgccagtcacacactaattgcggtggtcactctatccaaagatgactgaactctgaccgccaagctaaccacaagaaggaaattactttgtatagctaagccaaacaattttttttttggatttcatttgtaatgtcacttagaattcttctggaaggcttgtgaagccttgctttcttttaatatgctctcataatgacaaggtcccctgagaatgaagtcatccaactggaatgtgcctgtgtcttaactctgataaacatcacttcatggtattttggagattaaaagagactaaaacatgtaaatgttactttcagattattccgaaacccgtggcccagcaatcagaatagcttagccccagccagtgctgagcagtgggcattccacattggcaggacagccttaggtcactgctctgtcttgtgtgtggacttggagcttgtgatgtcctggaatgtaattgcttcatctctgaggcacatttatgtgtccctctgccccttgtcctaattcatcatctgctttatagtaattccacccagacaaggccgtcaggccccgctggaggatgtgaggtgctgtgagtggatgcatgctctaatcagtgacgttagtttatatctccttattaagatacccattacattcataccaggagagataacacgcacactaatgcactttctgtcgtccatcggagctttgttatttatttccataaaggcggcattaataaccaagtgtaagaggctaagaggatgtagggcttttagtcacggtctaagatatttagtgagatgtagccgcgagaagcagggacatcgtattatgttgtcgttttattctttaccccgtcctaaagcacagccattatgatatacctcattttgtttattttaaaagttaattcatatcttttgtgtaatcattttccaaacaaaatgtattgtcctagtttccctatactttatatcttgcttttctgattttaaaccaaaacatagaatatattcaaaggttcgtgtacttggacacggaagccagaaagtactcgttgaatgtactagtctagttctgggtattggcagatacaaaagtttcttcttacgaaaaatagtgcagaggttgcagagatggctcagtggttagaacacttgttcttgcagaggactcagtttcagttcccagcaccaacatgacagctcagagctatctgtaagtccagttccaagggatccaacagccgcttctggcctctgtgaacactgtgtacatatgtgctacatagacacccatgcaggcaaacacttagatacataaaataaaaagtaataaattatcttttaaaaaggaaaacgagaagaaagacaacctagcggctaggaagttagtagttacaaatgctccctgctcttgcagagggcttgagtttggttcctggcacccacatcagtgaggctcacaaatgcctgtaattccagctccggggatacatagacgattacattctccctcgtgcatcagctctaccaccgtatctgctcaggcaatgtctttgggtttttattatcagctcagtggtgactcatttgagggatccatcaaggaccacgctctgtgccacgcacacctggctacctgtctagttcacctttggctttgcgtttattgcttttcagagctatgcatgcagctcattgtaccaggaagccacagctctgcaaacctgctagctcgtgcccttctctccctcccagcacattacacattacctcaagctttgactccttgtccctgtgtgttatcccaggtgcaggagaactgggctggagagccttttgaatttgccctttgtatcaggcctccctactgtgaagtgcttcccagactcactctagggaaattctccatttggagttctcttcctaggtcattacacaggtcaatactggcattcactctcactgacggttgggtcggaacagattccaggagtggagtacatattaaaacagtttgttagaggagagtgggaagggtggggaaagcctaatgcatataggatgtctatagaaggaaggtagagggcaagccaggaagaattggggctttcatcagccctgagaaagacccatcctacctcacaggaagtcctcaagctcagctgcccactggaggacgtccatgtaccacaggccttatttagcatctctgccaaaccgtcattggctgaggtgctggagcactggacggatccagagctttagctggaccatcagccagttgcacactgtgtaatcggaggtgtgagggatgcacaccacagcttccatgctcatggtgaccgttaaagcactgcaaaagccctctgaacctcagttcagaatggtaacacagccagcggggttatcttaaatacaaagtaggatgtagaccagtaagatattaaatgaagtaaataaatgtgtaaatcactagaacatggccataataaatgaccagtctgtgctagcccgtggttagttttagatagctttttttttttgtctgaacaaggccaaacccagttccttgttagtggtaaaaaagcaggggaatacttgagcattagacatcaccggcattgggagtggaaatgtcgacattatcccccaacgctgctctctctttgttattgttgccctggacatcaccaagatgagggacatcagtattcccttggtcagtctggatttttcgggtgagtctttcttacaccattgaagcaggagtggttctgaggcggccagtgtgatctgaagggcggcgtgccatctgcagctggataagaaacttactccacatgtaaatcggccctgtcagtaaacagtgctcggctcgggagctgcttttttttcacttatagagggcattttcggtgaaggaagcaatatgcttgttggtacttcatcatgagttccttgtttgctgcgagtgctctctaagagcggttggtgctccagtctaggttgttacacacaagcagagccggattgtaaagttacgaaccagcttgtggggttcctgactggtgttctgcctgcctgcatgttgaaggcctccattcagtgcatgggacagtcatgttactggtaaggacactggtatccttgtcatccttcagcaccagggcctgtgatcctatctcaaagtcagcattctgtcacagttttcaagtccatttccgggtccgttcttttggtggtccattcatcagcatctctggagctctggctgcacgccagagacgtgtgcctggtgatgaccgtgcacccttccgttctgcctagccacatccactctgcacaggcattgcagcagactccaagagtgtagcctggcttaagtaatacaaaagaaacatggcgcctgcttatggatgtatgctgaagattgtggcccgttactgctactgtctaagacattttgaaccgtgagtgccctccttagatccacaagcctacattttttttagttcttttcactacatattccagaaatactggatatcaatccataacagtgcccctctctacagtggatgctggaatttcccatggttcttcacttctgtgactttcttccctggaatggccttgggcagggagccgtgaatccaggaggctgctcagggccccttcccttgtacagggatttgaggtactggctatattttgtttttaattgtcagcatcctttcctgtttgaaattgattcagtggagatttgcagtgttttttctgtgtgttcccagatctatgctagcttgttaacatgatgtagtagaccaggaatatccagttttgctttcatactcttaaaaactaaagtgcatgtttcataaagctaaagggtcccaagagccagttaatataaagcaatatttttccaaggtcagaagtgatttaaatatgaaagatcatattttatcataagcataacaggcttaacaaaatctagacagacaaattgctagtttagaaatgatctgaacttacccatccccccaccccccaggaaagaaaaaaggaaagcagaaacccacaaggcttggaatatggcaccaggcgaggtctcacggatccccaggctgtggctctgcagcgtgatgggaaaggctttgttttcattgtcacgctgcgtgctctgtcctctgagtcctcggcatcgctgtttatagcaagaacctgtgtcccagaggggcggcccggtttctcagcccttctcattgatgtaatctgacttgttttggttcctttccttgggcctaacatttctcgaggccctaacataaattattgccttgcggatccctcggcgtcagcttcgctcagggatgtgctgcctctgcagttcctgcattgtcacgtgtgagagatttactttcctcagagagtcctaagggttctccgtgtgcacacactctctcacacacaccccggcacgtatgcttgtggctgtgcctggtacacaggaataccagtgagaaagtcaaacagaggcttggtgaattcctctgtgagcttcctgggcaggtttcagctgacagggttgctaaggctgatgtgctcactcagtaatgtgcttttcaaaaaagtctgattttgcttcttctcctcagggattgtgacttatcagaaccctgcctgcttcatgtcctctgtgaaagcgcattgattcttactgaccagttggtattgcagaaaccaatgtaagcaacgaaggttctgtcatagataatagatgtgaagcctgagtgtcaagcatggccctttggtcctgtggcccctgtaattggtggaattccccccacattacagatgaactccttaacgctcaggagaatgaaacagcttgccaggaggcccgggatagtttctctaaagattttcctgtgtattatttgatttgatcctgacagcactcataaagagtggcaggggtaatcttcctgttttcccatttcagagttgggtagatatggtggctactacagtaggcacgtttccatctaggactatcctccaagccgaaatagaacttaacatttgtatgacccagttgtgacattggtcacaccatggcagtgccactatggttgtacacttgctgttttgtttgttggtttggtttggtttttttgtaagagattcttcaatgtgtgctaggtagactccccctcagatattctcctgcagactacgtgcctttttatagggagaggcagcaagcagccctgcacatctgttcacgtctgttcctggcttagagctgagaaccagagccaggtggcatggtgtacacctctaagcccagcacttgggagacaaagcaagctccaggacatccagggctacacagaggaacctgtctctgtagatggaaaagcagtgtagacctacctctctccctgaccttgttgaaaacacatcagtcaatcaaataggttaatattcttatagttctactgttgttttgtatgtgcctcttgctaaactagtaacttctttaagggcctgaactgagttatccatgaacctgacgtagtatgtagcatgtaacagggagtcaggaagcttagtcatggaaaatgactgagccagggcctttcttaccaggactaaacactaaaaactcaacctgaaaggaatagcctgccaagagaagggtggcctgcctgtgtctgatgaaagactgtttattcctacaaacgttcttggcttggcgtgtgtctagaagataatacagagctttgagaaatgagccgagagcaagggagaatgagataataattaagatggggttctcgctcacttgtggggctcactacagggtggtttagccagctcttcagttagagaacagctggtgtcttcctaggtaggcctttgctcttaggttgacagggatcctcataagattgcttgtgtgatggaagtagagtgggagagaaagctggagtgatctgcgcaggtgatgtgcaagtctctcaatgatctcggtgccactgtaggacctttgtctccagctgtgccttatgtttgctgctccaaggaagaaaacgctagtgcatgtgtcaggacaggggtgtgagcgcagttctgaggacatagctgtatgactgttttcagccagtcttctgttgttaatcccattgggctgccattccaagaagtactgggaagacagggagggcgtccgtggctacagggcttcttgtgcgaacatgagacccagagtttgaatgccaagaatccacacaaaagagaccaggcacagcagcaggcatgagtctgtaagccagtgtgtggagagaagacagaggcagagacagatccctgggtcagtagccagcaaatctagcctgatcagtagctccaggttcagtgagagaccctttctcaaaaacaataaatcagatggagagcgactaaggaagacagtcatcattgatcctggctgctgcttgtacgtgtgaatacacgtgcatgaccatgtacacacgcacacacacaaatgagtatatccacaaagtacctagagccactaactcctggggattcttgagggtagctcacattgccttcagcttggctttcaaatccagtgttttcggttctgctaagttagttactgcttgcaacattttgatgctattttatctctcctatctgactttgttatttgcatgtaatactatctatgtgactctatatttgtgcatatcatctcttcttggcaactctgctggtggtgttataaatggctcttgtcagatcaaccaactgcagattaaacagtagaaattatgaatgaaagtaaaaggcatcagagaatagccagaagtgggcagttactagaaagtaaaactttgaatgagacatggtgagggcctgatttgagaggttttagccggggcacaagcccctgtctgtagttggtgggccattgaaattctcctggacatttctggtctctcaatctcagagaacagatctctggagatcacagcctgggaaagcgaagggagacagatcaaggtgagaactagggaagggagcctcagatgctgtgtacggcctctgcccaaatccctactgactcatgaattacaatccagtcctgaagaagccccacatcccccaccagtgcttgcactttgaggttagccaagttaatggcctgctaaacaaaagtaagaagccagtgatttcgcattgtctaggatgtaacccaaaactatttgatgaataacaaaacaggaaattgtgaaccattttcaagaaaaagcattgaagaacatcctgaagatgacctaacttggaattggtggacatggattttgaaatagcttctacagttatgataaaggatgtaaaagaacactctttctttggcttgtggatttggtttgattttgtcttgggagtttgggtttcttttttctcctcctcctcctcctccccccccctcctcctcctcttcctcttcttcctcctcctcctccttttttaaatagaatcccttgcccaggctgttctcaagcttgcagcaatcctcctgcctcatcttcccaagtgctggactgcaggtataggctcaacaaagcatctattttagtgaagataaatgtaattggtcctccttatgcgtaggttccatattgactgattcagagactcaggtccgaggcatatgcattgagcatggccttttctccctcttcatcttcacactgctcacattgccttgggtactatacgtaataagcaatgatttaaatgcagtgtacctggagatgcacataggttcgatgcagaggatctgctgcttcataaaggaagcctgagcccccacagcttggctggggcaggaagtcctagaagcagtccttcacggacagggaacagcgggctaggaggtgtccacagaaacagaaaactataaaggaaaaatacagaagggaggagcaccggaggggacagtttctgttattgttgtttgagattgtgtttctctgtgtagccctggctgtcttcgctctgtagaccaggctggcctcaaacgccgcctgcctctccctccccagtgctgttattaaaggtgtgcaccaacaacaatgacaattttgaaaatagaaatcaagcctctgggtaggtttagcagtaaaatagagattgaaaaatgaatctttaaaaaaattaaaaggggctggagagatggctgagtggttaagagcactgattgctctttcgaaggccctgacttcaaatcccagcaaccacatggtggctcacaaccatccgtaatgagatctgacgccctcttctggtgcatctgaagtcagctacagtgtacttagatattataataaataaatctttaaaaaaaattaaaagactgaaagttaggttattagagcccaggcctgtgggacaagttctgaaagggctgccctcaggaactacccaagggaaggagatgagaaatgcagtgtattccgggtactgtgggacattgtgtgtaactagaaggggagaaacagaatggaacagaagcacaagttacagagaagtggtcagagctggctgtggtagcagagaaacccccagctactcaggggctggagcaggaagtctgcaagttcaaagccagcctggggacaaaggaagttccaggccaagctagccagcttagtgaggtagctcatggtagaaagttctgggttcaattctcagttctactcaagaaaaaaagtgtgtgtgtgtgtgtgtgtctgtgacacacacacacggacacatacacacacagtttcacaccctataagatatcaagagtgtcagagacaagtgactagaatcaagcagctagagggaacaactagaaaaaagaacacaatctatgcagaagaaaaaatatttaaaataaggctgtcctgtcctttgaaataatgaaagcatgaaatactgaaactttctctaaaaatgcacagaaaagaacacgtgaccagtgacgtttggtacggtttcaggaggctgcagatgtcctgaggtagtcatgttagcccaaagtctccttgaaagctctgaaatgaggagaaaaatgatattttaaagttacatgaaattatagtaaatttttaattttttctctttgttttaaccaagttaccaaattcagccttactttattgtactcagcagcaaaaagagatccaagctagtgagtgactgtcccaagtcactgaccaattctctctgccggccctgtggtactgtactgcagaaagccctggaagcagtccttgcattttctcctaaaaccctaatggatgagaaatgtactaccttctgagacagtctgttctggaagctgagcaaagtattcttcatgaaccagatttcgtccctctatgatgtttgccatagtttctgggagtaacaacattatacattcacagcttgaagtaggtaagccagggtctgaatgtcctcttagctgtttattagacattgtaaaccttattgtaaacctttccaaccttcagtcctgccatcccaaagcaaacagaagaaaaccttgatgctttcatgagctgtaagttagatgcagtataaagagcatcgcaaagcacttggcatgtggaaagctggttgttaatgtgtgggtcattcccactggttcagtcggaaaagccatctatctccatgtaaggtttgaactgctgtctcatccagtgtcttagcttgagctgtcctgagacaagcatcaaagcctgagcagtttaacctgcggcctgtttctcatgatgtagaagctgggtattaggtgagggcccttctggtttgcaggcggccctctcattgtgtcttagctgccgggaacagtgtggaagaaaacattttctctcttcttctcccaccctgaggaaccaacactcatgacctaattcctcctcaagccccaactccagatgccaccatcccattgtagagcagggtcccaagagcatatagcaaccatatatgcccatagcaaccagagatggaggggattgggaggccctttgaggctgaaggagtagaatagcatagacatacagtgaagggttgaaggcagaggcttattccaggactggcagtgttgcttggtgcttggcgtagtcagggactcaggacgggacgtgaatgagtgaggctggacaagtgctgccactactcactgttttcacagacaaaacacagcgtgtctggggaatcaaggaccccgtctctgttgaccttattttatcatggcttcataaatacttacctgatacagagtaaaactgtaatagaagttattgataagctccgaagtatatgttaaatctatcattattctacttaatttaaaacatgagtaaagaatatgtccaagggaaggagatagccatcttcatatttggaaggttgtccaagaggagtgaaattaaacctggatgaggctctgggttaacgtttagaaatcagaaagggaaaatgtttagcttaccagagaagtaatatttttaacaggtagaactgcctggcagtgggctgggacgcctgggatgaattaagtctctgagtccctcaccgagtccctcgctgagtccctcatgctacacctagatgactgtagacaaagccataggaaataagtctgtggagctataaaatcaaagagccaacgagggcaaggctctccctgcaagagagctgagcctcaccaggccctgccattgccataggacctgtgctccaggctgtgcctgtgggagactgctccacaggcctatttcaaggcaggccctcagagtccattgcaggcttccagtggcctctcctgtcctgtagagaacgctggaactgtctccgtctgagtgaagcctcagcggctgtcctcaaggacatcagaacagagcctatgtatgtccaggcagggcaggccagtgccttacacacgctccctgccccaggcggccagagaactgtcccgttactcttgagtgcaaacctgtggcctccttccatgggagaactgattcctggcagcccacaaaagcaagaaagtgatggagaaagaggggatatctttttttttgtctatgtctctaccccattctttttccttccttgtataaacttcaccatccgttgagactttctttgtcatattctgcagtgtggtgtcactgccatctgacacagagtttccttcttcagaaccctcagaatttggagccctgtttaaggccagctgttctctagcaggctgcttggctctgctcctgttcacaccagagccttgcacttcccggctcctctcgtacttctggacatcgacacacacaagcaagtccctgtccggagcactattcctatctcctaccaaactccaggttgcactacttggcccaggcagggtcagtccttcccaaaccttcctgtccccagagatttagttagagggcaggtcgactctctgtacttaaataccggcctcctttgggatgtttttaatattctatgtttctgatttttaagtagtgtttcctttatattaagattacattccaagcaggagctacgtttccttgtgtatctttgtaacagagccatggcctaggacataaaggtgttcaatatctgttgactgaatgtatacacagttcttgctgcatctcatgtctgtacctccacaagacagaagatagaaaagaaaagatagacaagtgtcactagcagagctgggtgggtgggtagttcaaaccccctttgattcgtgtccaatcgacctgtactagtgaacttgggttccaagtgtaagcctgactcttagctcctgcagtggctcctcctccccaccactgccaatgcccttttggttttctgtccgttttctaatgccctcacctcagttgaccccataagtgagtcttgtctttttaagctttccttatttgattaggacccgcaaataggaatgcagagcgttgtataaaagaagttagaaagaaagttcctgattgagtgaggcagcatagtatggtgtagtgcagtacagtgcagtgcaatgcagtgcagtgtcgtgtagtgtagtagcatattgtatcatatagtatagtatagtatagtatagtatagtatagtatagtatagtatagtatatagtactaatagctagtgttggggccacagtcacgctcttaggactctgttgagggaggggaagaggattaacacctggggccgggggggggggcacctgccactcagcatannnnnnnnnnnnnnnnnnnnnnnnnnnnnnnnnnnnnnnnnnnnnnnnnnnnnnnnnnnnnnnnnnnnnnnnnnnnnnnnnnnnnnnnnnnnnnnnnnnnnnnnnnnnnnnnnnnnnnnnnnnnnnnnnnnnnnnnnnnnnnnnnnnnnnnnnnnnnnnnnnnnnnnnnnnnnnnnnnnnnnnnnnnnnnnnnnnnnnnnnnnnnnnnnnnnnnnnnnnnnnnnnnnnnnnnnnnnnnnnnnnnnnnnnnnnnnnnnnggctctctggcttttaaacccctcctgtgcatttcaggggaaccgggttttttgttttttgttttttaaagaaaaagtctgcctcaacctggcagcctgcctcagcctctcaagtgctggggttagagccaccagccgaattggcttctaattatattattgttgagttagaaatttggggagttagctaggaaattaatgtcaaagtggtaatttgaatgtagaagatcacattatttagtaactttggcatggccctcagaaccactaatagatataatgagcagctttgtatcatagttttccaaaaattaatagtaccagagagtgatattaaaagaaaaattaagctctcacctgccaacccatttcaatgaaattttaacacatccaaggaaaatttgtaaatttttttcacaccccctagtcaggttatctagaatgcctgcttaggggatgaacacatgatataaaccttatttatcaagaggaaaatgcattcatgctttttttttatatgaaaatgagctagaataattccttgcccagtctcctgcctagacacacagctcaccctcatcctggctcacccgcctggctccacttcagtccacgtccacagacccgtcctctttcctgtggtttgctgcacagttcagctcgactgtcagtcaggcaatagcgtagtctaccccttaacaaaagtcttcctccgggatctcatcacagctgggagaggggaaagtgcatctcacccgggtacttcacaattcaggctctgcgcaggggtgtgtgtgtgtgtgtgtgtgtgtgtgtgtgtgtgtgtgtgtgtgtgcatgtgcaggtatgtgtgcaggcatgtgtcagaggacaagttaaagggattgggtttctccttccatcatgtgtagatgccatggaagtgtttctctttctgtcttcctagccaagagcagggtgtaagtatccacttcttgtggtcttcagcatccttcaacgagacactgaagttcccttaatataaagcctgccttcctgattgcttatctctagatagttcatctttgtttaaagtgatttaaaatggtgctgcatcgtagtctaactcatgcttggtttgtttagttgttgttgttgggggtgggggtgtgtnnnnnnnnnnnnnnnnnnnnnnnnnnnnnnnnnnnnnnnnnnnnnnnnnnnnnnnnnnnnnnnnnnnnnnnnnnnnnnnnnnnnnnnnnnnnnnnnnnnnnnnnnnnnnnnnnnnnnnnnnnnnnnnnnnnnnnnnnnnnnnnnnnnnnnnnnnnnnnnnnnnnnnnnnnnnnnnnnnnnnnnnnnnnnnnnnnnnnnnnnnnnnnnnnnnntttagatttttagattcatattcatgtatctgtaaaagaaaaaaaaaagattgctttgcctgtcttctagtttttatttctcttaacttttgcctcttacctaataattcaggcctacttagtatgagctgattatagtgagtgtgtctgtcttacactgacttttccctctttctttctttctttctttctttctttctttctttctttctttctttctttcttcctccctccctccctccctccccctatctctctctctctctctctctttctttctttctttctttctttctttctttctttctttctttctttctttctttccttaacaatctgtgtattccaggctgacctcacatttactatgtagctgaggatggcactgaattctgatctcctgtctctacatcccagtgttgtcagagctgaactgtgtgactctttttttttttaattatttttttattggttattttatttatttacatttcaaatattatccccaatcccagtttctcctccacaaaccccctctccccaaactgtgtgactcttatgctcagaagtttaagagagtacatgttgtgcccctccccaccccccagaactggattctgtgctgtgtggtcgctgccgcggatctgtcctgcactgggtccatcgtgcatgtgctttcagttatcccatctgcagcctccaaactttcaaacatctgaatctagttctcaccctaacaaaagatggagattctagagaaccacaatcagtgaagaacaaccaccctgtcaccccgagtgaggtgaagcaaggaggctgactgtccagtgtttctagcctttcccccttggtgctccaccagagcgtgtgaccacaacccagtgggcttccctggggccaaccactctcagagttggttcctggtgcgtggcagagtcatagggagaagcgtcttggacatgctggatagatacagtgctcacagatgctctcactggtcctcctgaatctgtcagcaactgctcaggcctggcctcgtgacggtaaaggacagctgtaatcttgcctacctgtattgcttttcttttgcttcatatcaaaagtttcataagcttagcagcctaagtagctcccgtttgtatctcacggactgtgtcaggagtctggataggttctgcaggcttctctgctcagggcctttcagggccaaaatcaaggtggtaggctggcttggtcttaccggaatgctgccggaaattatccacttgtaacttgtttaggctgttggcagagttacctttcagctgtaggtctaagggtcccattttcttgctggctgtcagccgggccaccttttctcctatagaccatccatgattctactcacaggactcttccatcttctggccaaaaatgtcccatcaggcccttctcttgcttcctgcttctctgactttctcttttgctgccaaccaagggaacggacggggctgggggtagggaggatgcttctgaaagtttgtggttagattagacccagaggtatctctattagctataaacataaagtaaccctggagaggagaggcgacagggatgagttttcaattttgcaggctactgtccacttcaaattcagataaggaaggtgggccatcctttccttacggatttactcagttgaccctcctttaataggtaaccctttccagggagtatttatggctgccatttggtgatcctcttagaaccttgcatgcagcgtgttgagtactgctgtgctctcctgggtatatgccctgctgagccatgaattaaaggatctctgctctctcctgatggggaacctttaaggaaaatggggctttgtaggacatcactgagggcgagtccttgaaagagactatgggacacttgtgtgttcctcttgtgtctttgggcttcttgactgatgggccacacttccaccctgatgtgctgcctcaccagaggcccaaaggggaggggcctgggtggggtgcacttgatcacagaccagaacctccaaaccattagccaaaacagctatttactcagcatgttaattgcctcaggagtgtcatcatagtgagaggaagctggctacagaaatatttgtccagtgagctgctttctgcttaatgagttgtcagatcaaacaatgactcacattattccacaacaactcacaacagtgtcactctttgctgtttggagtgtttgtgaagctctgtttatttatgatcaaccagagactaaacagtaggcacgtgtgaagtcagtgaacttcctcaaaacaacttaaaagtagctacattataataaaattaacatttttagaggaaaaaatccattaatgagagaaaagtgcattccagagaaccctcacttttaaagcactcgattgccaggttctctaaagaaactggagggacctcagaactgcatagaacaataaagaaactatgggaaagtcatttataatgtaaaatgttggaagactggatgtatatagtacaacttaaccgcagccgagtagagatatcaatgttggaaacagaagtcatagacagagtccatttctttgataggaactgggtctcctgtaaatgctgcagcccaggaactgatcctcactcgtcaaccagcacacggcagccgatcctcactcaccagccagcacacggcagctaggcagtgctgtgggcccactctcagagttgaatacacgtgccagcttctcttatttgcacccttaccttttaaccgttcttgtgcatagagctgaattcacactatctgtcttgtgtgacagttttgaagattagtgaaaatgtacaagctgcatggcacacagatcatagggtggaaatgaaccatccaggcgtcctcactcaaggttaaggctcagagtggcaggggctcacaaacctggggtgcaaattccaatgctacaggagtctttcttgttgcatttggttggttggttggttggttatttgtttcaagacaggttttctctgtgtagccttggcaatactggaacttaatttgtacacaaggctgaccttgaactcatagacattcatctgcgtcggcctcccaagtactgtgcttaaaggtgtatgttaccgttgccccttcagattctgcgatttaactttatctctaaatttcaaattatttccaaatttccctaccacatatatgggtgctcatgtgcatatatgtatgcaaatatttctgccttggtgaacatcaccataaacagactgttagatgattattgaattaactgctattaatgatcagatatattatttgtggagagtatatttagaaaatgtcctttgttccttatatactcaaatttatagtgacagtttttttttcttattattttgtgtgtgtgtgtgtgtgtgtgtgtgtgtgtgtgtgtgtatgcaaatacaagactgagatcaatgtctggggttgtagttgggtgtgtagccatacagtagaatagtagcctaaactactcccacatacaacaatctgtgtagatctcatgaatgagtggaggcagacctgctgtgggacagctccctccctcgtgtgagaaacaggtgggaaggcattttcagtgccttagcttcaccgctctcgagggcagctgatgtatgccttggagagtgtctgaagcccttagtgctggatgcttagactagatgctgaggcttcagaactccgggcggcaggcctagctatgtaaagtgtttacattacagcccatctatcgtggaaaagactggcatgtgtttatagatgggcttgggaaagtatttaggtcattcttgcaaccaggaggcccataatcaagtttttatgcttttccctggagatgtatgttgccaagactcactctgagacgcagcgtgcctgcccatgctagactctcaaagcagcccatccgcatctttgaatgagttgtagttccttctagaaaggcgggtttggacatggcagggcccttttcagagctcatgatctagctcttttcaagttagtgggaccccaatatttggtcttgagttgaaatactagaaaacaatcttatagagatttttaactacataagccttctgaagttacgtctttgatgcatatgtacatttttaatttcttgctttcagtttctgcaaaccagttctctttgtagtcagcttcactgtaatcccatcacgaagtgttgatcttttagtaacctttattgaagccacatattaatccacattccctcacggtaacagacggtttgtatcagccatctcgtgcagctccgctcaaaccccatgtggagctaataaaccatgcaataactagccgcgtgtgcacgcgcgtgcacatgtgtgtgtgtgtgtgtgtgtgtgtgtgtgtgtgtgtgtgtgtgtgtttgttgtctaaagtgaatttctcttctgccaaaacctaaatgacaaaatgattcctaaaccccagagtctttcttgacctagaaaagttgtgtttaaaaattaaaactcagactgagtgcttggatatgaaaactgaattctctgcttagtagggggacaatcactgagcagagctctcagaaatacactcacactcattttcaaattccatctctgaagttgcagagggcggtacctgctaatgtagctgcactccctccccacgctgtgtaaaccggttcatcccaagcccttaggagctccaacatggaggtcagcctgtctcacttggtaaatctcacagccactggagaggcctcgggatgtgatggcacactgtaattttatacaaaaaagggagggtggggaaggaactaggccctgggatttggcagagctgtagatggtgctgcggtctgcatgtgctcggctttagctgtctttccgtctgttccatgactgtacagccagctccctcctccaggctgttcttttgtgcccagacagtgctgtttgttagttcatccagggaaaccgcacctcacttgtccgttcccatctcggtgtgatctgcatgctcttttcctcccagtcacctacaactaccaaagtgcagaaagacttaattgcttccatgacatcctagaccaatcagaggaagctgaacttcaggctaattgaaaccaaaattctactcactgccctgcctctgggtggtggcccaggaagacttgttacaaaaggtgtttatttcagaacctaatttgaggcagttagacccaaagtgatattctatttgctggttccttgtccttcccctccccagtagggagaggcagaagtagctagatatagggaagtggtactgcttgtagtcagtgactttggtgggctttgatggaaccgaggcaaggtcccaaagagaaaacagctcctggctcaaacttgtcttcctggctttaactgctgatcctcctgcccggacctccctggtgctctgaaagcagacctcagaagccctgttctctggaagtgagacacgtcatatttgtcaagattctctagagaaacagaactaatggtgtgtgtctctgtgtgtgtatgtgtattccatacatattctatatagtattatatattatataatatggaacttattagagtggcctacaggctgtagttcagctagttcagcaatggctccctcccaacagaaagtctaagaatcaaatagttgtttggtccatgagactgggtgtctcagctggtcttcagtatctgtcagaatccaagagatataggctgtgatgccagagaacggaatgaacaaggacaagcagacaaaaagcaagagcttccttcttccctgtcctctatgtgggctgccaccagaaggtgtggcccagatttaaggtgaaaaaacatggaatgctgaaattgggtatggtggcacatgcctataatcaaacatatgggagacaaaaacaggaaattggggatacaaggccagtctgggctacatagcaagtttcagggcagcctgggctacatgagactttgtttaaaaaaaaaaaagtattaatgtattgaagacaatgagaggaaagtatgtttgggcaaactctggaatttaatgaaagtgggtaagattgagtggaagaaatggcgaaccaggtggcgcactcctttaaccccagcactcaggaggcagaggcagggaatctcttgtgaatttgagctagcctggtctacagagtgactagccagggatacacagagaaactctgtcttggaaaaaaaaaaaaaggagtgcaagacaattggattctcctgtcccaggaccatgagtgctgctgaaggggttgaggggagtggcagtgggaaatgttagcagcagcatttaggaagatggcagtgggggagaaaaggcagaagcagttgatctggagaccaggcattggggttctttcactagcaaccaatggcacgttagactacttctttggtagtacttagtaataagcagagtttatatagaaacatatatgataggagcttttttttttttttccttgagaccaggtctcatgtatcccaggctgaccttaaactctgtatatagcccaagatggccctcaagttctggtcctcctgcatcaacctcctgagtgccaggattacagggctctgcttccatgcccagttcccgtggtgctggggaccaaacctaaggctgtgtgtatgcaaagtgatcagtcagccagccccacaatacagacatctctcctgtattctctgctgaaaactgcagacccgtgtggtgggcgacctcggagctgtaatcaagaggctccagtctgagcaaaggagatgctgtgttcctttgtgagccttgcttcttcctttatggaggctgtaaaggcggcagtccattgcctccctgccctgttgaattctgaagtgctagctcagcacagtagtgcaatgctacaaacacttaaggcctcggtggaggcttggcgttcccacattttcatttctttgcctaaaatcagacttaagagaattttttcactgtggtctctgaaaacaactcaacacccaccgtccattgtgaagcccgagaggcagctgactgtgtgttggcccagagacacacagtttcatgctattccgcataggtctttttttaatatttaatatttttcagtatgaatcacaggtgaaattttcatgccatgtgtaaacaatttcacttcttattgaaacaatgaatccaggaatgtcattttgggatatcagccattttgcttttatcaatgtatggaaaaaaatgcttttatattaatacaaagaatgatgtcatttaatatggagtagatcttataattcaaggctagcaaatctcaggaggtgatttaggtcaccaagctaggtttgaagggaagagaattttttcccctgacctcccgagtgctgttaccaattttctcttcagtcagtggagtggatacaatagaaggaacagcttgtggaaagcaggctctcgctggttctgtgtgcaccgatgagtcctggggaatttcccactggcttcagtccttgccagggcaccttctagttctaacagcatgtttctgccttcttatttgatggatgtattcactcagaacatcctagacgctcacttgtgttacaggagtctcctttagagtctcagttctagagagtaaactgttttaagtattactcagaaaatcaactgagtgctggatgatcatggattaaattaatcttttggtaaagttttacctaactcttaaattcactttttctttcttttatttttgtgctgctagcaataaaacctcaagagccccccccccctcgctcacgctcacacacaaaacacagtgagcgttgtagagaaacctagagtgcggctcccgtcaacagcgacactaatacctgtcatttgattttttttttgagggactggagagaaaatggttcagtgctcaggagtagcagtgctcttgcaaagaccagggtatgagtctcagcacccatgtagggtggctcctagggacccaaatcctctcccaactacacttatgcaaacatacacagaaataccactttacacaaaattaaaagtaagaggggtgggaaggtggttctctggttaagagtacttactgctcttgccaaggacccaggttcagtttccagcacccacatggtggctcacaaccccctctaactgcagttccaaaagttcctatacccttcttctggcttctgtgggcccaggccacgcatggcacacctatatatgtgcaggcaatatagtcatacacatacaataagaataaattaatctttttctgatttaaatagaagatttcctatgagttatgtctatggtgttagaaacacttaccaagatctgggagtggaaaagagtaggtgaaggcctaaggttggccatattgttttcaagttcaaggtgtaaggtgatggtaaagaagagccattaaatgctgtgcctcggctgtagttggtgtggcctttgtacacttaaatgtttgctcgttcaggagttcaccgtcctgagcattgcctagcatctgccaaaacatctttcaattccgttctttcgttgcagctgagataccagcatggcctggggactccagacttgaggcaaactcttcctaacctgaaaaacttcatggagcacggactgatggtcaggtggtgagtatctgcttgcctgactcccacagcacgggtgtgggtaacacgcctgccaagcttgccggacccccacattgctctgtgcctgcctgctgggctttctgctgccgtgagatagccaaagagataaaaaggcagccatctcaacgtgtaacgtaacctctgctctggctaaggcagcagagcaccctctgggtgagaggcaagtactaatggagccctagagtgtgctactgaggcaggtgaggccggtctgactcctagaagaacaagcaaagaacgggggccccaggaccagcagccagagttagagtctgagccccagggttgctactaaaatgtacctcgtgtttggtcaccacgagctgtcccgtgcaggcgggctgctgattacagccttagcattaagtgaatcacatgacttgaggaagtggaaagtctgtgctcgcgccattcagggatcccgaggcttgtgtcctggagcgtgggtggtgacttagcaaatcttgtaagtgggaatcagcctgagaaggtggtggctggcagtggccagtctctgagaagtcgctctggcttctgagcccagatgttcttgtataatgtgtggacttgaagtccggcctctctgaaacttgatttcctcatgttgacctctgcagttaatccttagcagtttgctgtgaggatgaggttcgaggtgggaagtctagtatcagcttcattctctcttgtgccgtgaagacggaccctggggataatgaaaaaatgacatctctggttgctctctggcatttatttctgtcccatatgaccctcagaatgacagattttagacatcttcctttacaaagatcccctcttaaccaagtcttagctcagaatgtcaaatcttgatattgactccagtgcccaaatgtggtcaaagaatcaaagtttaatgcaaaataataaccatacctgtgttgacaaaagtaactgcagatgtgtgtgtgtccccttccctgtaactctgagccaggctctctggagggtggtgtagtgctccagcccggccttccaggcatggaattcaggaggtaacccaactctagccactaacgatagcaggaacgaggcagctgcagccctgcctgccgcatcaccaagagtcgaccccatcctaagcaccaagcgaacccgcatcacttactgcgggagctctcttccctctgatagacagcaccacctctcccgagtacccatggtcttttccacacttcctgttctgtctcagactttaacttctctccagaggctcatgcctcctccttaattattctaagatgtaattgctgtacgtctggactcgtcttgaggatgtgcaataaacagcatccctcttcccccgtgacatttggaaccatttgagagcgaggatataagagacagactagtgtaatcaaaatgtcaggtttattactgataaagcctcttggaaaaagtggctttagatctgtaataaaaagggtttgcaaagacatcactcaaaattaaacttactcagaacattagcccagctctcctacagaggaggccctcagcacactgcagagagctgtcagctgactccctggcagggcccacggaatgctgagccaagatgtcagattctgcccctaaatcacccacagaaaagttctctagcgagagagtgcaagtggtgggacagagccccacgcggctcctgaggccgatgtgcttagccgtcccaacccgtatgccgttgccgctcgcagggctctgtaaaacaccaggcttattgatttggaattttgtttgagtcatttggttgcttgatgatattgagtcttaccaattataaagatggcatctcatgctgggtgtgatggcacgagcctgtgatcccagctcttgagaaatgagatggaggcaggtcaggattccactgtcattcaccatgagagtaaagcgaagcagtccttcctcgagtttcgtatatcccaggtggctctctcaaatgtgtgattgccaaatgtcacggcgtatgcctgtaacctcagcactgaggagtaaaggcagagagagaattggaagtcgaagatcttcctcagccaaaaagtgaggccggtttcatctacatgagaccttgtctcaaaaaaagaaaaagaatctcccgtgtctggttttggttttgtaagagcctcccactagaatgaggacccatgaggacctttcctcctcctgctctttggagcggttcttctgggatagggcgtgtcttaacagtctgacagaagtaagcagaagctcagtggagtttgctcatcgggggagcgctgctttgatgtctaatgatttcaggactggttgtgttctgtagtgtttatgtccttgctaaactcactnnnnnnnnnnnnnnnnnnnnnnnnnnnnnnnnnnnnnnnnnnnnnnnnnnnnnnnnnnnnnnnnnnnnnnnnnnnnnnnnnnnnnnnnnnnnnnnnnnnntatgtgtgtgtgtgtgtgtgtgtgtgtgtgtgtgtgtgtgtgtgtgtgtgtctgtgtgtctgtgtgagagacagagacacagagaaagacagagacacagaaagagcacagcaagttattgcagctgtagatagtagggccttctgagaggcttacagacaagctacgcaaaatactcactcacctcaagcccttctcctgcccttccccacttgcaacagtcttttcagcaactcgttctaagtaaggcacagagaaatgaaatgactgtgagtgccactgacctgtgaccctgcagcaataaaggggaatctcggtctcctggcactggcatagcaaaaccattaagccctgaacgtaatgtttacacggtgcccatccgtgccagccatcgaggtgcgttaacaggagcatgcagtaatggccactttctggtctctcatgaaaactgggccactgttttcaagacacagtactgggaaagtgagtgctcccaataattccaagtcaagaccaccgcaggaggccaggctccacaagcctaaacaaagctggagcaagctgtttcagcctcaagaaatccgagaatttccctaagcctctgtagactgggggtccctaccctaccccagcttgtgctccttagggcaaaggccaaacaaactcagctcctccttggagagactcttaatgtctcagctcccaggggagacttaacatcttgtgcagtggtttccactggcagacaggtcctatggaggtgctgctgtctggcctgctggagttgaggattgcaggctggcggagggaggatccatgggtgcatcgaattccttggggaaacatccaggttatatgacagcttattttgtttgattttgtaaagaaaggacagtgataaaggctcttttaatgaagtaacttttcttgtatattacaaaattcttaactaatattgtcaccctccacctgagcagttctaaagtggccctttgtcttcatgcacactgtggtgtgggggtggctctcactggtttttgacagctctttcccagatgacccctgctttcccatcctagtgtcaggaacccagctagagctgccaggtgatgccagtttgtcgagcagaatttcagcttagagccccatccccaaatgctctgcttaaagtcaccctgcctgttctgttaaagtcattcctttctcctgttctcttcccactacaaagtggcgtaagagtcaagtcaacggaaagagcacggactgtttgatgctaacgcctctgacctcagtctctgggcagaactgagggtgacaggacctggctgatggtggtgccattgagatttaaataaaggccctgcatgcctcacttagcagttagtgtgaatggataatgagtagcaggtcatagttatagaatctgtttttaaaaattattcattctttgttacaggtattttggttttttagcttacaaataggtattcatgtggttcttgtgtttgatgcagtggcttactctcttaaacactaatggtataaaatgttaactttaactaaacctttctgcagacccagagaaaagcactctacaatctgtttacctgcacatattggtagcttctacattcttattattaaaaatccatttacttaaaaacctttctgtatgtgtcctgagagagccgagggctcgatcgtggttcacagctcaaaactgaggcttacggttgacttgaccaaatcacatgacagccacagaggacagttcttgtcacatgcgtgctaatgtctcctctgtgccttccctgcctctacatccctctgatactgggcaccattgtcctgacacccgttaccttcctgagggcacccccaaagtcaaatccagagtcttgtagaatgatacatggcaaggctggcagtgttctgagggaagcttacccaggtacctcataagctttgtaaaacccatgagaactggaatgctggaatccggcctctgttcagtccctgctctgtagctaagaagcaggaagagaacccagggtgcagagcgtactcgcctgcagtctttgtcttccgtgaacacttgacaaaaacatgatttcaaagccctctgttgtgctttataaaggaaatttttattctaaattttactttttctgcccaatttaaagcataaattcaccattaccttcatgcaagagaatgtgatacagcagagaaagaacccagcttgggggtcaaaaggcatggatgtcagtttctgctgtatcacttaaatttcataaattattttttaaatatcaagttatttttattgatattaatagaaccagtcctgtttcccaagcatagatatgtagaacaaatgagatatatctgccaaaggggttataaaccaaaaagaactatataaaaccataaattgggctagagagatggctcaggagtgaagagggtttgccactcttccaaaagtcccaagcaaagctgccagcacctaaactgggcaactcacaggtgtcagttaactccagccaactccagggggggtccgatgccctcttctggcctctgtaggtactgcactcacttatgcacatatacacagaattaaatcttaaaaaacaatggagtaaaaaaaaaattttttttaacccaatggagtaaattttcatgcatttaacaactcaagtttctcctatgcatcttgtgcagtgcaagagatgaaggagattttaaaaacaaagttcatgctgtctgggcctagttcacattggtttagcttctagtctgaagtagctgtgacagattgaatgttttgaagggcatgccttgcaggacattctcacacagtaatctctcacagtagctgtgactcggtaggtaaggggctcttctcttcactggcagactctccagacccttgctgcacatgctctgcatcctccctgctcctcatcctccctgctcctcatcctccctgctcctcatcctccctgctcctcatcctccctgctcccacatgctacagtcttcttttcctttacaaagaaagagaatcgagctcaacagctttaagtagaaatagtaggaaaaggtccttacccaagaactctggaacttagggtgggcatttgtttgttgtttgatacaggtctggtgtagccaaagccggccttaaactcttggccccccgcctcccactcaagggctgggatgacaggttggcacacataggctcagctgtttcagtaaacgtctgtctacagtaagcaacagtgcattcaaaatcaccactacgcaacagcagtcagagcttggaagtcctcccatcttacagacatcttccctcatcctttcccttagtcatgcctgtgccagattcagagcaggggctctggcaggtgacctccaagggacttaaaaccacagctagctgatgatagtctttaaatttagatcaagtgacattgtctttgaagtctcaagagtactacttaagtgtcacacggcctgcttttgagagtatggctcttgggctggcatcctaatacaaagggtggagccctgtggaaaggtaatgagagaggaagttttactggagttctttactcttgagatagccttgatgggccatctccctacccctggactggaacacacaaagcatatgggcatctgtgggactttaaaagaccttgggggggggggttggggagacaggctccttccataactcattccagagtttaaacaccctcacttcaggaaattcttccctatatttaactcacagcccccctcctgcggttaacacccatttccgctttcttctgtcttcagtcaggatggagaacagctgtccagcatcctctgtgcgcagacctctgccagtgacagttttttgttcactggggctgccttctcctccgcctgcaagtctgatccagattgaagatgttttctttgcatgtttatgtctaatttctgtttgctcctcctgattataaagtaatatctactcaataaaatgtagacggtatgaaaagtagccaccaaatactgagatgggaacactgtcaggacagccagttgtcaaggcccctgtgtctgtgtcaggcctgagtaaccagcatgagcagcaaaggcaagcagcagttttctggcagctgcattttatcaggcgaaaggaaacaggtaagttcatttttaataacatatttgatttaactcaagtaagatgcaaattatctagctaagataataccaacatatactcactactttaaaattatttttttaagatttctttatttacatggctgtatgcatacttatgtgcaccacatgtcctggttcctgcagagaggccagaagagggcaatgggtcccctgcaactggagttgaggtgttctaagcggccatgtaaatactaggaaccaaacccagtcctctgaaagggcaacaagtgctcttaaccactgagtctttgctctagacccttacaatgactaatacaatattttagcttcctttacatctagcatgtcttaggattgccatatctcaaatcggaacagccgtattgaaagccccaggtacacggtactgtatgcaccgtgagctccatacagagataaatcgcaaagtggaaagttgaagctcaagcagaatgccagggaccccacgtacgctttgctttatatataaggcctggatacacacaggttgcatgttattcagtcttaaacgcccttccttctctagctttctgtcctccagagagagagagagagggaggnnnnnnnnnnnnnnnnnnnntctttgctaacccaaccccaaaatgaccactgaatcattaatccctgggtttaagctcagcttagaatacagctcctagcttgtgagcttgtgggtttctgctgagagccttctctgtgctgctgtacagcagctctccagtgagagagtacctgaggtatgtatccgtgcagccaaccagaggttaccaggccaggaacccctccatcactctcctgacaccccaggagtccagacttacactttcccaacttacaaatggagaagtcaagggcccgagggacaaactcactcacagatgacacatccgtcagaccactgagatgtgaacagagccagtgtggagtccagctttaatcctcatctaaaacagcctctcacgctgtgtttagaataacgtgtgctcgacacacaggaccctccacctgctgctccagcaaggagatcctgatattactgcctgctgttttcatccagcccacgggctgcaccctggccttatcgtagactctccatcttcaacttcattataaatctagagttgggcagggtctggagctcagtagtagaacatttatttgccttccacacacaatccccactagagccaaaggaaaaagatgacaaaccagggttctgcttctagaggtgcagacttaggcccccttccgcctcaccttgttcttagcgcttctgctgagcctcttgcttctgcacagcacactctgcccatgcttgcttctgtatctctgttgccggggccgtaagcctatggtgtgcccgtattctctgttcagcacgtggagcttctcagccagccaccaggcctcctccttccctgcccgcattcagcttggcagaccctgcaagtctcccctctcccctccactgcacagcctgcagtctctgcagccactctgggcccttcctgctttcccagatccatcactgtgtgctgggggtgtgggagtggggatccttgcctaaaacgcgttgtgctgaacggctgttactgtaaaaaaatatgtgagaaaaatcagcttacaaaaaaagagaaggtctggactggagagatggctcacaagctaagagtacttgctgttcttccagaggacctgggttctagttccagcactcccaggtacagatggtggctcacaaccacctataaacccagccctagtagatctggtgccctcttctggtctgcagctagtgaaaatttctatcgaccctgaagaccttgacctttttcagtttatttctctatcatggactcttatcctgtgttcacacctacatggtacatgtctgaggtagtcattttacatttgtgtcttgggttctgtggtgcatgtctgaccctaccactagctataagccccataagagcagaagtgtggctttatccagttgctgtcagatcccaagtctagtgcctggcctgtgtgtagtagatactcagtgaatactcaaggttgaataaatgtgttggctcatcatcctgctactaagtatgtgctgtgcccttcagtagttcagcggaccccaaaggacccctagagtgctcagtctgctatggagcagtgattaactggggaccaattgtaactcaggggatcctgcccaaggccgcagcacccctctctgtggtggcagagtgatctggttttcttttagagcaacaggcagctgagtcctgtggtttagatcatgtcaggttttattagaaacttgatggtagctcagcgttagcatatctttcaaaaccttcatttcacagtttctgtcattggcctctggagtctcacgcttcctttagctcctttccaaggctggttttaaattttgagagcattctcaggccagggctttaatttccctgccgggctccttctgaggctgggttctgtgagattgttgttcccctggcttccctggcaaatggcagagggttctcctctcccagatttcagcataaacagtttactattcccaggtctcgagtgctgtgcagactcggcacgggacctccagctgtcattcctggacctctttccatgctcttggaggatgttacttacacaccacgtaaatgacatcaagatgggctatgtctattcctgcagaccattttatagtcccctgaatgtctgatgcctgactgaaatttcagtatattaatttgtcctgatgtcctaacgtgaaagttgatgggtgatggagctgacttgacccatcccaggacctccccatggcccatggacaatctctgtattcccatcccaggaggtcagctttgaggaggggctcgggcaagatgctctccaccaccgtccctaacctgcgcagggcctactcccttaaactggctcccgttgcccaggccaggatgcttgatggccgaccaccccatcacatcctggggaactgattaccttggctgcttattttgtcctctgcctgtgagctctgtcgtccccagatccatctttccatcactgctcggttgagactatctaaaggctccatgttcggctctgcctttttatagtttgcttattttcgtcagactttggcagaaatcctcctaaacagagcccaggggaaggtggccactgacacacatttcagcctgtgctttgggcctaagattgtttctatttttattttgtttggagtttttgttagcatccagggcaaagattaagcacttgcacttatctggttatggtgagaggcccttagatccctcgcctgtgggcaggagacccctgcttaaccctgttaaccccactctctctcctgggagataagatctagctgttaaatttggcttccacagaggccccgacttccacttgatcaaagagtgggaggggagaaagataaatcccacccttggctacgttttgaaaagagaatagccgtctaatgtatggaggttgttttgttttgttttaaactaactttatgtcataatttcttcgctgccaaaaagatgtaatcctacctcagcctcgccttggcgacctgcttttggcgccgggcacagccctgtcactactctgcattattttagcagtaatcttttagaaggtgagaaacgattattgctttttagcacagttgacatgatattggcgcagagcagggcctacagcttcaaacctgatggccggaccccaacctaaacaccgccagatagagcgagaggctgcggctgctgcaggggcgggggttgagaagagtgaatgttatctaaaagtttccctttcccctcccccacccctagcccccagccccctttctttctaagcatccctgttcctgagttgtagctgtagattttggctggaatcctgagaatcaggatttagggttttgaccagctgtgatctgataatgttcctcagaggaaacattgcagaagggaaaacgtatctgagctgtagtttcccccatgaagcaacggggagagcccctgctgtagacagataaaacattcctcctccatggatctgaaagagaatgggaggagtcatttgaaaatacagccagcccagcttcacgaactctcttgatgtagtaacttttcatgggttttctttgttccatttttctctcgccctccatattttatatggcttcgtggctaaattaacttctgaattgtaattggtgtgagaacccctcacagcatacagggctctaggaaggaaagaccagggtgctacccactcactggcctcccatcaaggggaatccgaacaagtggagccactttgctgacagcaggggccttaaagttctgggagccaagacagaggtgggaggcagccatactactcattactgtaagctcagatctctacctgggaccctgtgaccttagtcaagttcctgacctccatgtggcaatttcttcttatgtaagcgggggtgctgtttgctgtgtgacattgtatagatatgtggtgttgtgtaaagctgctaatgggtgttagccttctgagcggtaacttggtgactacctgtttgttgtacgcagagtttttctttaactcctcgttttaatcctatttggttttggtttgctgggtgttttgcttgtttgttttgttttgttttgtttttaggttcactgtatagccctagctggcctggacctcactaatgacatcccaggccaacctccagctcatgaccagtcctcctgtgtcttttaagataacacagtgagctcccaaggatgtcaggaaagagcatggagtccctggagctgtagttacaggcacttgtgagtcttctagcatgggtgctcagaactaaaccctccattccgcttgaagaacaccaagcgttccagcccctgttggtggcggtagtatttcaaggcaaggtctcgagtaccccaggcaggccttgaactcagtaagtctgctgctgcggatgaccttaaactcctaatcctcctgcctctatctcccaagtgctgggcttacatgcctatgccacccaccatagccagccacgcactgccgtaactggtttacagcagggccagagacgagtagaagatgtcagatatcgagaatcacctcttaggctagatcttcccactggaggttttctctcctaaccacttctcttcagaggagcatctggcttcagtcacaaacagggcatgaagagaggaggtgggccaaggatggtagagtcaaactgggctctgccctgttacaggtgatggcaccacaggttcgcgtacaggctattaagtttctgcccatggtcttcttgacttaggtcagggaaatagaggtttcctttttacaaaaaaaaaatctctccatgagctaaatatatagagaaaaatgaggctttaggggttcagggacaattggaatgtagaccccaaaggattctgggaagttcttgtggtccctaagcagctggtagatcatctaaatagggcattttaagcatttctcctttattcaaagctttcttcacctcatacttcaagagggaaggcactgctggctcaccgcaggcaaatcctgtccattgattcagtacttttcccccaactctctcaccctcacaaccacactgatgccttgttttgttggtttctgttttgttttagttgggagtttgagaccgtgtctcaaatttgctgtgtcgcctagtccttcgacctccatctcccaagggctggattatagacatgtgccaccaccccctgcttagccaacgattttaagtatttagtcttaagcaaggtcagataatctattatacaaagggaaaaactgcccctggtcaagtaaccagtaaatggggaagttgtaaccccaaatagagggacggtcaaactgcgctgggagtggagtccaggcctctgaatatcttttcttcagagaacagtctttagatgaagctgtaagaggaccagggaaggtgactggcttggatagctgtggactcccacaatgagaaaggcagccaccaccttcatctaggaaaagccaaacctaaccaggatgtcctctttgacttttaaactccatgccacttggctccttccgatgttcctgagaagtcctttctgtccatcagctaggtttggtcactcagctgccccaaccggtgggctctttaacaggctctgcctttggtttttcccattaaactctgcccaataaatctgcaattaggatagctggtttgttggtttgttttaatagattctttctaattgtagcattaaaccccaggtacagtgtttctagtctgaacacatagcaagccagaagactcggtctctccgggcaagggactaaggagaggcggtgaactcattcggcttcccggagcctcagactcggcacctggggctcagaactcccagggccctgagcaggggctggggtcaggaaggactgccgtctgtccgtgtttcctcctgcatcctttctgacggtctggggaggtttgctttccctctccccgtgccttcctcccactggtgactcggcagattgaacccagggtttcacccatgtcccatgctaagcttgaatgccctcgtcactgagctatatccacatgcctcttgtgtgggtgtgggtgggtgggtaggtgggtgtgagcgtgtgtgttgtgagtttaagtgtagaaattctttttaatcagtttacataatgtacaattttcactctataagcaaattgtcgatagcatttaaaaattggtcacaatgagtaaacctgagtttcagactctttaatcagataaaatagtcatgaagtaaggctataatcagacaaaaagtaccttaaataaaacctgattatctgtatttttttagtcagttattagtatttctgattgctgccctttttacttatgtttacttattgggcaagttttctaagttgcccccctcacccccaccaaaccctgtggatcccaggatcaaactcagatcatcagcctaagatatgaacagccgtttgttttctaacagtaaaaagtttagaaacatcctaaaaatgagggaataattaaataaattacaacattccattcattaaagcagccttttaaaatgatatttacccagagattttaataacatatgacagcaggatacagaattatgtgggtttttttttaattaaacatacataaaattgaagtttaaaaggaaaacatccaaaattaatagtggttacttgatgggtaatagcttatggtagggttttttatatgtagtttatatttatgttgttttcctgcgagtataaattactgtgataattaaaaatgcatgcatcgttaatgtataattttaatgtcatcatgtcatgccgtagctactcagagctcagatgtcttaaaagtctggaatatcactaagattctgagtgtaaacacacccattctgagtgactgactttaatcttgcaaagttcccatctaaagcacaccatgtctgagacttccagtattcaatgcccagagctcacagaacaaagcctagtgccccaccacacccgtgcttacatgcatgccacacgcagtccttagggcaacagtttaaaagagcagggaaactggtcagtgtgagacctgggtcacaggagggacaaaagcagcccacaccctgcacccagagtcctcaaaaccctgcagctctccactcggtcagtgattgggttcataccagtagcccagtcagcaagaaatatcttctttgtacttcttttttaaattgtgtgaaagactttaatatttaaatctttcaaaagttttccatttcacataactcagaactaagagggagaagacagaagttggctaaaaaagtaagcgatgggatgtagccatccttgcagattctcagaataactgacagtgttttactctgtagctggtgccctgtgcggcccatccccttgcctcagcctcccacgtgctaggcctgcagacgcacttcatcacatctggctctgtcttaccatttatatgagaacatggtttttgataattttccagtttatgtcagacgctttcatttcctgagctgctccagtacctgagtgatgcagagaagaatgtcacagaagatgccagaaaacacccaagtctgcccgcacaggagagaggggtagacagccaggctttgagttagtgaggcccctctgtggcgtgcagctgtgttccactggtcttaggatgcacacggggttggtaaaactggaacataatggcagtatggactgtgggtgcagacggagtctaagacagctgtggttattagcctcgaacaacccactcaccagcctgccttcacccatggcagaggcatgggctctgggggctaaggatgtaacagaagggtgtgcagggaaattcttgctcccttccattgtagctgcagggaggggagtcacatcacttccctgttgtacagagtccaggagagctgaggagagttataaaaaccaatgagggccgtaggatgtgttcctaccctgcgcacagctgggtgtgtcagcatgcattccctgcacctacctttgtcaaccaaggagcaaagatgaaagtgaggggccagatgccagagctacacagagggtatcagggcccttacccttcaaaaccaaaagctgtgaagtgccagggttacacccagtgccctctccgaccactctgtcctgatcttgtccatcctgagtcaacaggctgagggctgctggtgctgtctgatgtgcttgcctggtcccctgcaggaccatccagaggaaactgaggctggccaaaaagatcacagtgggcttgacaacacagtaactgaaaacctagacggagaccagcaggctttgctcagttgggttctgctttttcttagccacaaacagccatttgctggtccacttgcccggtttgataaatatcccagggagcacttcttatgaagctcactgataccgtgctcgggtctggctgagtgagatgtgttaggccaatggagggacaccttgtaagtaacaaaagagcataatccagagaaggcctggcaggtgggcaggggtgagcagcaggcgagcagtgatctgactgcaggcttgtctgtgcacacaggagacattgttggcccctttttttgttttgttttgtttgttttgtttttgtcagagcacttaactgacattctgacattataatttgaaagtagtgctgctaaaataattagaaatcacctttggcgatattggaagcttggaggctccctctatcttctgcctctgtgtctcctctgacagacttagtagtagccagttgttctgtggtttcagtcctacctagtgacaagccccttaacctccttgcatgtgtgtgtcctcccctggaggacaagagtcagatggtcagccccggtgccatctgctgataaagctgtgttgatgctaatttcactcacacagcagcatctgtaactacagtcagcgctcctgcaggcttcgctggcgaccgtggctcatggtctgctgcgctactcccatcattgatggttatttattgtctcagattgactctgctttcttgacagtgcctttgtaaggcccggctgaaatgatatacataaagttactgaagaaactctaaagtgtgctgtggctggacagtgattatttttcctggctcaaagtaggcactacagaccaagtattataaaaacgtgtgtgaccagccttgtaaaagagaagccatttcctgtggtaatgttttattaaagaggaagaagggttcccttgatgctctctgtgtggttctctttcgctgggtgatgagtactgagtgttggaaaggccatccatcagcaagttaccatggcaactcatcttgcatgagcacttttcataggattgaaagtcacggtcagaatggaagccctcagggcctggcatcattcacagaaatggctgggcccatcgtacactaatgtgtagacccagtctaaccagagccttcagctcctccccaagtgacatgctttctgtccctcatcctaccttgggtactctcgtcttaaatatattgagtaaatttgttcctcctaaaaggaagtcaccaaagtgagctcctgcagacgttgtggtgttgcttgctttaaatgctatatcagtctaaggttggtagtaatctaactctgcacgggcatttggttttggtttttaatctcaaatctaaaatatattgtttccagtttctgttcccagaaggtaacctgagttccaaagcagacagttacttctcgcttttgtttgccttctagtgacagacatcacatctccaatgccatccctgtcccgaagagacaaagctccacgtttgggggtgcagatggaggcttctctgcgggtatcccatcaccagataaagtccatcgcaagcgggccagctcagagaacgagagactccagtacaaaaccccacctcccagctacaattcagcattgacacagcccggggtggccatgcccacctcgggagactctgagagaaaggtcgcccctctgtcctcctccctggacacctccctggacttctccaaagaaaacaagaaagcaggagtagacctgggcagcagtgtgagcggagaccacggaaactcggactccggccaagagcagggggaagccctgcctgggcacctggcagccgtgaatggcactgcactgcccagcgagcaggctggccctgccggcaccctgctgccaggctcgtgccacccggccccctcagctgagctctgctgtgcagtggagcaagcagaggaaatcatcgggctggaagccacaggcttcacctcgggtgaccagctggaggcgctcagctgcatcccggtggacagcgcagtggcagtggagtgtgacgagcaggtgctgggggagtttgaggagttctctcgcaggatctatgccctcagcgagaacgtgtccagcttccgccggcctcgcaggagttccgacaagtgaggcaggcaggcaggcaggcaggcaggcagaccgtaggaccagggagagccgctgccctccctggggccgagcttcacttcatctttgaataattccgacacaaatgatgtcagtggagcagattcctcgtaaaggctgactttgggaactgaggggactcagggtcattgggtaccagtggggccagttcgtgagattagctttccaggcctggcggttgtttctgggcaaaggtcgccctctgcttacagctcaagtcccgttataggcatttgtctgcggtttatttacacttctgtgttctcctcagagggaagatgggaatctgtgtaacagaaggagctcacctttagtttctcataagcatccgccctctccatcatttggaacactttgcaaaatggaatattcaaaaataactttccacccttgagaggcctgtacccatcctttagattgagaataagaaacagtgtgatggtctctgttccgggccctcggccctgagaaccatagtcagcctgcagaccccgctgttgccctgcttcctcaagatgggccatgcatcctgaaagatggggcaataaacccactagtccaaagccagcaggaatgatgttctgtctctgtctagtgtgccataccctcatgaaaaattgtcctgtggtggaccccaggggaccctaagaaacctcacgtttaccacagtcagatggcagccagatttctttgggggccaaagtttttatgtggtccaaaattgggcacacctctggcaatacacaccccagataaagaccccctagatataaatcctgttaacttattacttttccgtcagaaggaagccattatacatgacaaagcatagggagaggcaggatgcccagtgtgcagaccacgagacagttgagatagttgggttaagagactagacaaagcatagctgtgtgcaacgtcacgatgttcaattatgtttctaagtccattgtccctgcacattcagactccattcgctgttgcattatacattatgtacccacagacattgcctcagggttgcaagctcttaaaagaaaaatttatccacatatccatgtattgtaaagaagaataaaagttgaatttacttcacatgacctgatttcccccccagctttgtttggtgttttccctctaacccctcatctcttccgttacatcatgacaaggctagcctgagctaaagccacggctgtatctcagctgctgccgctgatctcatctgagtttacatactgtgacaaacaagatgtgcttcatagctatatgccccagctcattaggatgtagctccttagctcacaggtctcacagtcacgtccatattacatccaggcattcctggacccagctttctgttagctgctgtcttagtcagggcttctattcctacataaacatcatgaccaagaagcaagttggggaggaaagggtttattcagcttacatttccacattgctgtttgtcaccaaggaagtcaggactggaactcaagcaggtcaggaagcaggagctgatgcagaggccatggagagatgttccttactggcttgcttcccctggcttgctcagcctgcttccttatagaacccaagactaccagcccagagatggtcccacccacaaggggcctttcccccttgatcactaattgagaaaatgccttacagttggatctcatggaggcatttcctcaactgaagctccagctgtgtcaagttgacacaaaactagccagtacagccaccatattgctagatgaactaattcacaccactatttccatatagaaaatgcatagacttattacacagcagacagccctcctgcaaatgggtgcttttgcttggtctgaggaagtccatttgtgggggtgagggaggctgcttcacagggtgttagcagggtggaggacctcaccatcatgggtacagagatgctgtttaaccctggggagaggtggcgtctccaggtgtttgaaggtcagtctggtgcaggtgacaggagagtcccatgtgacctgtgactgccacctgaggctccatgcagatgtacacacgttctagtcccctgaccctgaccctgaccggcagcagagagctctgaggtcttaccttcactctgccttccggacttcctaagtgcgggttgtgaagttacttccacagcatgatacccttgcatgggtccccgtggctctgagctgaccggttctgcccgtactttaagcatgcccaggctaccagccatgaatgcacctaaatgctgctaagcttgcaaccagggttggcatcctttggtacttgatgtgacctgggtgaagcctaccacatcacatacctccagcagctacagagtatgtttcaccaagaccaaatcttcaaatgatcttatctcctaccaatctttttaattagtcttgtaaatcactaatagacagggataacagaatttgctgggaagatatggagaactagttgctgtcctttagagcccattacattttcatgtgtctgggacagttctaatggcctgcacagatcatacaatgaaagtctgattgtctttcctctctccatttccccttagccacattaaaaattgcagagatttttttttctccctcagaatattagtgttggaaggttgtacccagctatactctttagcatttctgatggtacccatttattcggacctcactggttatttagataagttttaaatcaccaccaataataactggcatgtgaagctggtctgttggcaattggaggaaaattcagcatctgtatttataaaataaaattgagtagtatttattttgagagttaaaagtatatgtgatttccctgttatacttgagtcctgtcttctcctgttttgagtttcctattgaagctgagttaattctacaaaccttgttcttcagcaatcaaccaggcactcatagatcatcaaatccactctgcactcgtgtgcggcgctgggctaagcaaagtgtatgcagatcgctaagccttaacccatgccgcgttctctaggagttacagctctgttagcaattccttaagacgctctgtgtgggcttggaggacctcaggcatcaggtgggtatgctgctcgcctcactgctgtgacagaagcaacttaattaagagagaagaggtttatttagactcacagtcatagcacatggtccttcatggcagataagtcatttcagtgggtacttgggggcagccagccacgtgcaatcaggaagcagaagagagtgacaagtgtcagtgctctgcccccttgcttctttgtagtcagtaaattggtgcttccggacatgttaaagtgggtcttcctacctcagttaatctagataatccctcccaggcgtggtccaaggctcgacccctgtgtgatttcctcccaggcgtggtccaaggcttgacccctgtgtgattccctcccagcgtggtccaaggcttgactcctgtgtgagattttgcagtattgaccattcccaggtagccactgggtggccgtagcacaagtccctgagaccggacacgacactagagctggctgaggctggtccagacgtgagtaacccagtggtgatttctttactctttctgcatgtggaaaaaagtagtccttgtggagctgtgtcctcggtgtgcgtgctcagtagagtgctgtgtgacatagagcagttgtctcttcagacccatggcagcccatcacctctccgcaactggaagctataaccctcaccacatcatcacacatttaaggatctttattttccttttggctttttgagacagggttttctctgtgtagccctggctgtcctggaactcattctatagaccaggctggcctcaaactcatcgagatccacctgcctctgcctcccaagtgctgggattaagggcatgtgccaccacagcctggttccatttctcaatctattaaaaaaaaaaaaaaaaaaaacccaaaacctagaaagaggcagcaagatggctccattcgagaggtccctaccaccaagcctgaccagttgagtctgatccccagaacactcatgataggaggagaaaaacaggttccaaaagttgtcctctgaccaccacactcatgccacggcatgcctgcgcacacttggacacacaagcctgtggggtttgttgttgttgttgtttttaattgtttttaaatgctggaaagaatctgcccttgccagccaccattgtgtcatgttcctttgtcctgtgggatgccacgttgctgtggtaataggaatgcctgagcctcatcaggaagtttcccactgtggcttgggcacagccacttcctccccagatctggttccgcatctgtgaaaatgggataatgtcccagccagcgctaacagggttagaaaagacaaacgactggagaaagggtgcccatgttattgtttgattttcaagacagagtcctatgtagccctgactaacctggaattcacactgtagaccaggctggccccaactcacaatgtagagcaggctggcctggaactcacagagatctggctgtctctgcttctgaaatccaccatcaaaggtgtggccaccactctcagtactcactttccaaccaagcaccactggaaggaattcaccattcaacagggactttggagaagtcactgagtgagagattcgggcaaacattgacgcaggcatctgcaaaatgcagctctgcacagatgtgctgaggggcctacctaccttgcctctggttcctggtgggacctctccagatgagtttctctgtccctcaagtcgcaaatgtccttcaggccagcctctgatactctttatctgccgaattggtagccagagctgaggattttcaaggtagacatttttttctttttcaccttgtagcatatctaaccacagttttgtaggtagaccactcagccttgtggattttaaatgaatgaacgatatgtctgcaatataaggccagcaaagccagcaacccagagaaacaatgagtagacacataggtaagaatgagagaggctgccgagcgagctgtggtgactcgtgcctttaatcccagcactcaggagacagaagcaggtgggtctctgtgatttcaaggccagcttggtctacaaagtgagatccgtgacagccagggctacacagagaaactctgttcagtggtagcaaaacagccattgaaatggttcaacaatggcttgcagtcaaagctgataaccagaatttaatccctgaaaccacacagggacgggcaggagagagcctgcaagttgtcctcgacctccatacacatgttgtgccatgtgtggtaacacataaacaatacatgtaataaaaaataattattgcaacagagaaggaaaagcactactggcacaggtggcagaaaggacgatcctgctgcacagcaggcagtgccagaggaagggtctcttcagagcttgcgagacaattccatagcccaacaaaggagtccttggctgtgtgacccaggaaggcacaagccttctccgagcccattcactcctgtagggcatcatccaggggttttttgagactgcaggaggcccctctggcaatagcagcaaatttgttctcttcagagcttgcctcctgctgtcttgttggccagaacatagtgggacaggagaggactctgtcctaccattttgcctgggttgtgaggaattggaggctgagccatctagtggcagcctgcctgaacaaggtttctagacactagaaccacccctccacagtctgcttagacgtacaacaattagtaatgacattttaaaatcaccttgggaatcggggagaggtggcttagtgggtaagtgctgacttaacgcacagcatgaggacctgggttcaatccccagcacctgtgtaaaaaagcccagtcctggggacacagatgggagctgggtggctgagctatctaggttacctggcaagttcaaagccagtgaaagacactacctcacaaaccaaggtgattggctggtgaggtggctcagcaggtcaaagggcttcacgggcctgattacccaagctcatcccctggatcccacagtgaaaggagagaattgactcctgaaagctgtcctctgcccctgcacacataggccttaatactcaagggacagcattcatgtacacacatcacacatcacacnnnnnnnnnnnnnnnnnnnnnnnnnnnnnnnnnnnnnnnnnnnnnnnnnnnnnnnnnnnnncacacatcacatatcaccacacatacatcacacatacatatcacacatacacacacatcacacatacacaccacacaaactcacaccactaaaaggaaagtggggaatgaaatcaagccgggctgcaagccaggtaagaggcaacaacaaagacattgctggggacatgtgttcatgcatgtgacagttcactgcacaccaagtccaggcacagaaagccacagccacaacttcagaaatctgaagccaggcatgtggctgaggcaggaaagtctcaaagccactcacgagtgaatgagttggggcaggggtgcaggagcgggcagaggatcccaggagcagaagacagcagcccaggtcaggacaggaagggtgtgcaaagagacaagcagggccctggcagggctgtgggtgaccaggaggcagaacacgacacagccttggagacctccaggagtcatttcagagagagggagccacgaggaagcacagacagacagtggtcagaagagacagagacagggagcacagccaacccctgtgacagggaaatggggagcacagtctaccctgtgtggcacagagatggggagcacagccaacccctgtgacacggagatggagagcatggtcaacctctgtgacagggaaatggggagcacagtctaccctatgtgacacagagatggggagcacagtcaacccctgtgacacagagatggggagcacagtcaaccctatgtgacatggagacagggagcacggccagcccctgtgatatggagacagggaacagtcaaaaatcccatgagaggcgtggttgtaaagagatggcaaaaagatggcaaaagagaatatgggagaggaatgagagatgggggggggtgtgtgaatgctacccaggagacaatgactgagagaaggttctagaacacaaggccatgagaggagtgaggccccatgaagtaacaggaagacagggagagttggagtgaatgcagctgtctctgcatagacctggtggccaagggcagaaagtctgggaggggcctgattggcgtagtactctgatggtgtctgagaactgcatggcaagagtaccccaagagtgtctgagtgctccatggcaagagcaccccaagagtgtctaagtgctccatggtgggagcactgcaagggtgtctgaggactgcatggttttgggggatgaaactgcagtttggggaggagattgcctgcctgagggccctccagcctcttctccaggctccccagctgacctcccacctccaccccacacccctcactgcacacaccttgacttgtcctcaacacagctgctccctccgagaactctggaggcaagaggaggaagaggaggcacgtccactttgctgtgtacgtcataaatcagctcactaaatagttgacttctcttaggagaaccaagtgaaaagattcagagaaggtgcacagagcagcctcttgatactctgcagcccgtgaggcatgagcaaatccaaataaggaccactgaggtacctcatgacaggccgggcagcacccagggaacgctcctggtcaatggttgtctcttagtgtgaccacacacttctgtgctgcgcagtgcctgagggtcaagccacacacacacacagctcttacataattaaaaagtgctggctaaggcgagctgtgagtggccaactccagagacaggcattctaaaagaatataaatgctttcgttctaacttattttgggttaaatatatcactgcaacttcttctgtttctttttgcctattaaacacatgactccagaggctggggaggcaacatggcgggatggttctgggcaagcatgaagacatggattcagacccccagcacccaagtcaaccctgggaccggagcagagtagagggttgcacatctgtaatcctcccagtgctgtggtgaggggagtcaggtggattccaaggactcactggcagccagtctagctccagtgagggagctggcagaaaatcaagaacataaaggacaccagatgccaacctctggcttttaactctcctgcacacaggcaactatatcctgtgcgcatgtgcatacacacacatacacacacacacacacacacacacacacacacacactgccaaaaatgttaaatctctggttgtgactcacacttgcagctcagatcactcaccattggccagcacatctctcagttgcaaggaatgcagagacagaagaccacatcagcacctggagcatgcagctaggaaatcccaggcccaacaggggtgcagacaaaccaccttattcccccataaacacagggcaaggagaaagcaacagaagaaaagaaccccaagaaagagacatttcagggggagattcagctcagtggagagtgcttgcctagcacgaacaaccccaaattctgaccccagcatcaaaacaagacaagatggagcgggcgggcagcaaaggagcccgtgtaaatccttttgtggatcttgtcggaatcctgtaaactaacaacatgtaaacactggctaaatattaaagacctgacatttttcaggtatgatgctataatagtatagagggctttattttttttaagtctctgttgcttggagttaccaaaatatttacagatgaagtgtttctatctgggtcaggtagacctgagccgatgttggtaaagcaggattggccatggtggtttactctcgtgccttccagccttcccctagactgaggctcttgttcacagaatgttcctgccatgtctctacttagaaagtcccttccctagaccacagcaacctcatggctgagtattgcggagagccctggggctaattatgtttgatgttaattctgttctcctgtgaggggctgcgaacaaggagtgaatcagcactctggtgatttcctataaacggtcttcccaccttaatttataaataaaggctagagccagtgattgggtggagaaagaagggaaggtggagctgaaggttttgggggagagagaggatgacagaggaggaggaagaaggaaaagtggagcagaagcacctggcctggagaaactgcaagttctaaggggcctcttttatggggaagatggtagtgtagtggtagatctgcccaatctaggcgcacagcatggattcatattaattgagttgtgttttcattgcctgggcttatttgggttagagatttaccacaacagctgagtcggctgtcaagttttcctctgcaaagtcctccccacaatactccctgtccatgctcatcaggccagatcatccctctgcctgtccatccatctgtccatccatgtccctccccagcctgtgtgtcctgccgctgcctccacccacattctctctctgtcagccagaatggcctgagctcccaggaggcaggcacctcatttaaaagcacaggtaggaaagcctaatggatcaggagaggtgtgctgaatccccaggttacagatgaggcccagggaaattggctttaaccaaattctcagaactcaagtgacacagccaggactttaaaccagaaactggggcgtctctcttcacagagatgcagccacagacccatccacccatcca

SEQ ID NO: 1967 - DNA, 2274 bp, Mus musculus
  misc_feature (1)...(2274): n = A, C, G or T/U
ctgcggtaatatggctcttccttagccagcggcggtggccagcgcgggtgcagagctgctggggctctcggtgcccggtttctaggctgtaggggctctgcgaatcacagctcgggaggcagcggccgatgcgggaggactgcccacctggccgctcggcggctcaggggtccagatgagctcctgnnnnnnnnnnnnnnnnnnnngcccggtgcccctgccacccccgggcccgtccgccgcgctgacgtccggtgcccccgcgcgggccctgcatgtggagctgccgtctcagcagcggcgtctccgacatctccggaacatcgctgctcggaacattgttaatagaaatggccatcagcttctggatacctacttcactcttcatttgtgtgataatgagaaaatctttaaagaattttataggagtgaagtgattaagaattccttgaatccgacgtggaggagtcttgactttggaataatgccggatcgtctggatacatctgtgtcctgctttgtggtgaagatttggggtggaaaggaagaggcctttcagctgttgatagagtggaaagtctacctggatgggctgaagtacttgggacagcagatccatgcccgcaaccagaatgaaatcatttttgggctgaatgatggctactacggtgctccctgtgaacacaagggtcatccaaacgcacagaagaacctccttcaggtggaccagaactgtgttcgcaattcttacgatgtcttctctttgctgcggcttcatagagcccagtgtgcaattaaacagactcaggtaactgttcagagacttggaaaggaaattgaagaaaaactaagactcacatcgacaagcaatgagctgaaaaaagaaagtgaatgtctgcgattgaaaattttggtgcttcgaaatgaactggaaagacagaagaaagcgctggggcgggaggtggccttcctgcataagcaacagatggctctacaggacaaaggaagtgcattttccactgagcatggcaagctccagctgcagaaggactccctgagtgagctgaggaaggagtgtactgccaaaagggaactctttctgaagactaatgctcagttgaccatccgctgcaggcagctactctcagagctgtcctacatttaccctattgatttgaatgagcacaaggattattttgtatgtggtgtcaagttgcctaattccgaggacttccaagcaaaagaggatggaagcattgccgtcgcccttggttacactgcacatttggtctccatgatctccttcttcctacaagtacccctcaggtatcccataattcacaaggggtccagatcaacaatcaaagataacatcaacgacaagctgacagaaaaggagcgagagtttccactgtatccaaagggaggggagaagctgcagtttgactatggtgtctaccttctgaacaagaacatagcacagctgagataccagcatggcctggggactccagacttgaggcaaactcttcctaacctgaaaaacttcatggagcacggactgatggtcaggtgtgacagacatcacatctccaatgccatccctgtcccgaagagacaaagctccacgtttgggggtgcagatggaggcttctctgcgggtatcccatcaccagataaagtccatcgcaagcgggccagctcagagaacgagagactccagtacaaaaccccacctcccagctacaattcagcattgacacagcccggggtggccatgcccacctcgggagactctgagagaaaggtcgcccctctgtcctcctccctggacacctccctggacttctccaaagaaaacaagaaagcaggagtagacctgggcagcagtgtgagcggagaccacggaaactcggactccggccaagagcagggggaagccctgcctgggcacctggcagccgtgaatggcactgcactgcccagcgagcaggctggccctgccggcaccctgctgccaggctcgtgccacccggccccctcagctgagctctgctgtgcagtggagcaagcagaggaaatcatcgggctggaagccacaggcttcacctcgggtgaccagctggaggcgctcagctgcatcccggtggacagcgcagtggcagtggagtgtgacgagcaggtgctgggggagtttgaggagttctctcgcaggatctatgccctcagcgagaacgtgtccagcttccgccggcctcgcaggagttccgacaa

SEQ ID NO: 1968 - protein, 722 aa, Mus musculus
  VARIANT (1)...(722): Xaa = Any Amino Acid
AVGALRITAREAAADAGGLPTWPLGGSGVQMSSXXXXXXXXPVPLPPPGPSAALTSGAPARALHVELPSQQRRLRHLRNIAARNIVNRNGHQLLDTYFTLHLCDNEKIFKEFYRSEVIKNSLNPTWRSLDFGIMPDRLDTSVSCFVVKIWGGKEEAFQLLIEWKVYLDGLKYLGQQIHARNQNEIIFQDGYYGAPCEHKGHPNAQKNLLQVDQNCVRNSYDVFSLLRLHRAQCAIKQTQVTVQRLGKEIEEKLRLTSTSNELKKESECLRLKILVLRNELERQKKALGREVAFLHKQQMALQDKGSAFSTEHGKLQLQKDSLSELRKECTAKRELFLKTNAQLTIRCRQLLSELSYIYPIDLNEHKDYFVCGVKLPNSEDFQAKEDGSIAVGYTAHLVSMISFFLQVPLRYPIIHKGSRSTIKDNINDKLTEKEREFPLYPKGGEKLQFDYGVYLLNKNIAQLRYQHGLGTPDLRQTLPNLKNFMEHGLMVRCDRHHNAIPVPKRQSSTFGGADGGFSAGIPSPDKVHRKRASSENERLQYKTPPPSYNSALTQPGVAMPTSGDSKVAPLSSSLDTSLDFSKENKKAGVDLGSSVSGDHGNSDSGQEQGEALPGHLAAVNGTALPSEQAGPAGTLLPGSCHPAPSAELCCAVEQAEEIIGLEATGFTSGDQLEALSCIPVDSAVAVECDEQVLGEFEEFSRRIYALSENVSSFRRPRRSSDX

SEQ ID NO: 1969 - DNA, 347831 bp, Homo sapiens
gaatctggaaggggcattgaaggattctctcctcgagccttctaagagagcacagcctttgattttggacttctggactccagaactgtgagagaataaatttctgttttaagccacccagtttgtgtcttaaactaatacagtgactttaatatatttataccacctgatagagaagttggaccagaggatgacaacctctagtcttctcacaaatcaaatatttcacttttgtttccatggggtggactgcaagtttggaagacactcttccctagtacttctgagagggtggaatattttcccatttaaagagttataatgggattatgaggaggagaaaagtggagacttccccgaccccctgcttccaccaccatttttacagcaaacgcatgcttcatatatttatttcaaacttctttttcatattcctgtttcccttccttgcaaactctttttcaaaatattttttaccactttccgtttagggagttttgtttcatatattttcatctaattttttaaatcatacatacacattttatttcttatgttttttatgtatcattaaatcacactaacatacatcttaaaaagtttcttctctgaagtatcaaatgatttttgagatttatatttacttttgatgaaaactaatatgtcaaagtatttttcttctattaaacatgaacagtatatcttttcattcaatgtatatgatataaaaatatattccaagaaagtatgacttcgctatataaatgtattgaaaatatatgcagtaacactatttcattagaggcagtaaaatgtaggattaacaacactggagttagactgctttagaatcccagctcgaaactcagaacatgtgactgccttcactttctaatctcatagcactgttgtgtcgatacacaaaaactgcttgtaacaatgcctggcacaatccaagcactcaataaattattgttttttaaaatctaagctttagggagttgagcctgatctctctctcctgctacagaactccactgtggtagcccctcttgaataaagtctgccctactgttttttttggtttttttttttttgagacagagtttcgctctcgttgcccatgctggagtgcaatggtgtgatcttggctcagcacaacttccacctcccgggttcaagtgattctcctgcttcagcctcccgagtagctaggattacaggcacacgccactacacctggctaattttgtatttttagcagagacagggtttctccatgttggtcaggctggtctcgaactcccaacctcaggcaatctgcctgcctcggcctcccaaagtgctgggattacaggcgtgagccaccgcacctggcccctactgttcttaaataaacaaatgaatctaagctttatgagcaaaatattaggataaaagtaaaataaataattttcattttgtttccgtgaaatagattacaatgaacattacacgatttttaaatatttttttagaaacaatctcataaaaattttcaagtacaatataaataatttttttcctaaattatttgagagtatgttgtggacataactcatcactctcaacaaacaagaatgttattttttttctttttttgagagagggtcttgtgctgtcacccaggctacagtgcaatggcacgatcatagctcactgcagcctccagctcctgggctcaagtgatcctcccagctcagtctcccaagtagctgggattacaggcatgtgccaccacgcctggccaattgttttttatttttcatggagacgacgtctctctctttttttttttttttttttgagacagagtctcgctctgctgcccaggctggagtgcagtggtgcaatctcggctcactgcaagctctgcctcctgtgttcacaccattctcctgcctcagcctcctgagtagctgggactacaggcacccgccaccgtgcccagctaattttttgtatttttagtagagatggggtttcaccatggtctcgatctcctgaccttgtgatccacccgcctcggcctcccaaagtgctgggattacaggcgtgagccagcacgcccggcccgacgtctctctctttctagcgggtcttgaactcctgagctcaagcaatcctcctgccttggcctcccaaagtgctgagattacaggcgtaagctaccatgcatggccaagaatgttatcctatataactacaatgaaaccatgaagaccaagaaattaacgtaaaaacattactacgatctaatcctcaggccctattcaaatttcaccatttgtcttaatagtgtccattctggcaaaaggatcaagttcagagtcacatgttatttcgatcttcttttatctgaaacagatactcagtctttccttgaccatcatgactgacaatcttgaagatgatgagctgggtactcttagaatgccattcagttttgttttgcctattgtttccttatgattggttcaggttatttatctttggcagaaatatcacagatgtgatgatgggctcttctcatcacatcctgtcaggaagcagataatttgaatttgtcatattactgatgatggtcatgttgatcactcttttttttttttttttttttgagacagagtctcgctctatcgcccaggctggagtgcagtggcgcaatctcggctcactgcaaactccgcctcccaggttcacaccattctcctgcctcagccaccagagtagagtagctgggactacaggctcccgccaccacgcctggctaatatttttgtatttttagtagagacggggtttcaccgtgttagccagaatggacacgatctcctgacctcgtgatccgcccgccttggcctcccaaagtgctgggattacaggcgtgagccaccgcgcctggcctcattgatcacttttaagatggtgacttgccacacttttccactgtaaagttactctttttttggtagtttgagactttacaaatatctcctttcttactaaacatttattataaagacttatggaacctattttattcaatgggttataagccattctaacatttattctgatgctcaaactgccccagttttggacagtgagagccccttcgaactggcttctgtgtccctttgatgtcatttgtcccatcatttttctgaggacttccttactttctggcacaactggatgccccagaatcatcttttgctttttttctggcctaatcctggaatcagccacttctccaaagagtcttgattcctcctagtggaggacggtatctacaaaccaagatctggccagttttaatttacggataacagggttcatcctagttcttttccttctcatatttataaccaactagtcctaaatagtgtattctaatgaatgcagaagctatgatgtgggtgacaaagtcctgccctgaggacctgggttcacaccatcaatttgccctaagaaccatgtgacgggtcattttaatttctgatcctttttttaggcatccgtaaaactgagacaataatacccacttgagccaggctcggtggcttatacctgtaatctcagaactttgggaggctgaggtgggtggagcacctgaggtgaggagtttgagaccagcctggccaacatggtaaaaccccatctctacaaaaattacctgagcatggtggctaacacctgtagtcccagcttcttgggaaggagaattgcttgaacttgggaggtggaggttgcagtgagccgagatcgtgccactgcactccagcctgggtgaaagagtgagactctgtctcaaaaaataaaataaaacaaataaataatacctacttcacaggatcctgtggggattgaccagagtaataatgtatgtaaaacacttagcaaatgttagttccctctaggtcctagggaaacctgcagactcatagaggggaattgatttgtctaaaatcatgcaatgaataagctaaaggttcagactggtctccagatgcttacccctggcatggagtctttcagcaacactgctttgcatccagggtgtaccttctcagaaactctgtgatgctatgcctgcctggggagtggctcaccagtcaaagaatcagcctaacagggaaatcagacgtcccttgagtgcctttattaccaggaactcagcacatttttgtcctaactgtcctcaaactcaatgaagaaatgtcacaatttatcatcaccattttcactgctttgcccacccccgaatctactcaacacagcagccagagtgacatttctgaagcataaatgagagcatgtaactcccctgcttaaaccccttaatagttgtccatgagcctcaaagaaatccaaactccactgtggcctacaatgcctggcaggacctggccctgccagcatctccagcctcattctatgccgtcagggctggattaggacttcagaagctctaagcaccaaaggatagtgctgcttctactatataaaattacaaataagggccaggtgcagtgacgcacacctgtaatctcagcatttgggaaggccaaggcagacagatcacttgagcccaggagttcgagaccaacctgggtaacatagcaaaagccatctctacaaacaatacaaaaattagccaggtgtggcaatgcgctgtagtctcagctatttgggaggatcgactgagcctgggaggaggttgaggctgcagtgaatcatgatcacaccactgtactcaagactgggtgacagagcaagaccctgtctcaaaaataaataaataaataagtaaataaaattaccagtaagaacaacactaaactgttaaagaaactgaaggtggtctttggtttggttttggttttgaaataccaatttctttcgaaagtgttctcctcttcctccttggcaccagctggccttctctttgagttgctgcaatgctccatatagtccttcatgggctgttcctcctgttcctttatccaacagcttcccctgccctcactagcctcctttgtccagttaactcctactcatctttcagacctcactgcaaacatcagttcccaaggaaagttttctctggacaactctcggtatatcagctccctgggttagatgtgcttatttcccatacgtgttaccctcactggcctgcacattcacaagctcctgtgttcacactggcacctttacagtcagtggcagtgggaaaaccactggaactgaggaaagagcattggtcttggggacaaaaggcccaactctttgtcttagctttgctacaaactttgtgtgaccttagcaagctcatttcccctctctgggggctgtgtctagtcgggaggaatggaggcccccatgtgatccaaacattcacttactcaagtatttgtccattcattcattgacttcattcattcagccatttgctcaatgacgctatggagcctgtcttctgtgttgggatgctggggactcagagaaatcaaaagcagaggttcacagcagagtgggagggacaaatgtagactgctcaatatatgactaggcacacagttacacatactgaagagaggtcagacagctgctgtaggagcccagaggaagtagcagttcgttcagacctgggaagccttttttgagaaaatgaccttgccgagttgggaaaggagaagggaaaatgctgtctaggcacctgcctttcagggttcttgggtatgtgcagtttctttggggaatggcctttttcttttacaattctcacctgctttctgcaagcgtctcactcttctagtcctgccccttcaaagctacccctcccccaaggctgcctgagccatctttctaagtgctttctgttgcccacgatgaaactcatgttcttcggcctggtagtcaggttcttctcacccggccctagcttcctcttccaatctttttgcctgttgctctcccatgcagcctttgtttcagccatgttagactctgctgctgtcacttcctctacccctgtgcctttgctcatgctgttcctcctgcatagaatactctcctctcctaggaagccttcctggacaacacgtgacagttagcacctttctcttagtgcttccactgtactttatacatcatctcgattattgtacttaccactttgtaccaaatgagctgcgatctcctttcagttagggattctatgtgcatcattttctgaaacgtagtgcccaggctggacacctggcaaaggtctgatgggtgtttgactagacaggtaagtgaatggaagaaagagggctctgttgaaaggaaggggatagatttaactcaatacagtttgagacactgaaagacccatctgccctatcttgctcttgtttacccaatgcatcaggcccatgaggtgggaggaggaagtggaggcaaatggattggggtaggcttagctttttggccctggaaactgaatgtttgatttaaatacccaacatggtactaattagctgttaaaacactagctattcccgagccaaacagatctaaacacctattgttcatctactaaactcccaatcatcctttataactttggtgaagcctgctctgaccttgcccaccagctcctgaagagttggtcactcttaccacttgaccttggaccccttctatcattgcatatacattgcatttggccaccttataatctatgttctctaaacttggatatatgtttctctgggggatatatagcactatgtaaatattataataatttaattctgtgatttaaaatatttttatgttgaaacaatcagccatattatgaaataggatcccaataataaaagagtttttagggccgggcgcggtggctcatgcctgtaatcccagcactttgggaggctgaggtgggtggatcatttgaggtcaggagttcaagaccaccctgaccaacatggtgaaatcctgtctctactaaaaatacaaaaaaacttagctgggtgtggtggtgcatgcctgtagtcccagctacttgggaggctgaggcaggagaatcacttgaacctgggaggcagaggtagcagtgagctgagatcgcaccactgcactccagcctgagtcacagagagagactctgtctcaaaaacaagaaagaaaagtttttagaatgaaataggacatatgaaaataatgacagctagtatttattaaaaatgtactatctcccagacagtgtgttaaatgctttacatcatcttgaatactttgcaagcagcaggcttttgagttcttcccaatgcccctagggatgagagtcctagttctcctaatgttttcggcatttgggaaaagtgggagaagggttgtttacttgagctctgcatttccagaacccagtagctagcctgtgcaaaggtgaacctcagtaaaggcttgtggaaagaatagatcctgctctctgctggaatgtcctttcctccctctctcctgacttggtgaactcttattggcccttcaataccctgtttcaatgtcacctccactgtgaaatctgactctcaactattttctctggctcccactgcctttgggcttccctcagacccagcagtgagtaactggatgatcactcttcgtttgtttttgatatggggtctcagtctgttgcccaagctggagtacagtggcatgatcttgactcactgcagcctcaacctccccaggctcaggtaatcctcccacctcagcctcctcagtagctgggactataggtgaaaacgacatgctgggctaatttttgtatttttgtagagacaaggttttgccatgttgcccaggctggtcccaaattcttgggctcaagcaagaattgtgataatgtgttatggcagcctcagaaaactaatacagcttagaaacagaaatgtgttttctgtgaaattcccccagatcttggcaccacatgagttcaatcagataatatttgggatttcccagtgactcctttctcaacaaacacctgatcaagcgactcctttctcaacaaacacctgaccacacgccccaggctccagccatgaggaaccactcagtgtgtcagaacaggagacagtgtgacatctttgtgatccagctctgagaaaagatccaaggtgtttttcaggcttctgaacaccctggaaagatagtatgcttacattttgtttaaaaaatttaaaatgcaactactatatgccaggtcctgtgtgggcactttacatatgttgatttactttaatccctacagcaatcctattactattttaaagctgagagaggggaagtgacttgccttgggatacatagctcaaaggtggtagagccaagattccaaagtgcctgattcctattgtgtctgactctaaaacactatgttctttctgctatgttcatccaggtggtggaaaaattcagtctaggagtaaaaaaaggaagatcaacatcctgcagaatgactcatgctattcattatagaagcaattgctggagatgctatcattgtggatcacggaagtcttcatggaagaggtggcatttgagctgggccttcactgcaaaaaaaaaaaaaaaaaatttcctgattctctgtcaggcactggggatccagagatgaatcagacaaagtccttttgcttgaagaattcacagtattttgtgtgtgtgtgggaaggagggtggctgcttacatgtgttaaaagacaatgtggccaggcctggtggctcatgcctgtaatcccaacactttgggagcccgagactggaggatcgcttgagcctgggagtttgagactagtctgggaaatatggccagaaccccatctttacaaaaaaattttaaaattagctgggcctggtggcatgtgcctgtattcccagctacttaggagggtgaggtgggaggatcacttgagcccaggaggtcgaggctgcaatgagccgtgattttgccactgcactccagcccgggcgaaagaatgaggcactgttaaaaaaaattaatagaataatccagacccacggtagggtcaaaattcctaactcaaggtcccagagaggctcagagaagccttttggaagaagggactcctgccccagctaagactgatggataagtagcaaaggctttctggggacacagcacaaacagcccacctgaagcggtgaatcggcgtcctgggtgcctggcacaccttgtagctcagcttactagctagtggagtgcgaaggggcgtgtacttgtcggttggagctggtcatgaaagagctcgtgggactgcccgacggttctcaggtcccagtgcatcctgcgtggtggctctctgctgaaccataaagcattccttttcaatccctgcacgctcacgccgggaaaagactgcacaaggggcctgccaaggcagacaagcgatcgccacccagctggcttccgagggtccccgccctccaccggaggcctgttaccacggcaaccagtgagggcggaagtggctcagaagaccggttctccctaatcaggtgactctcccgcctcctgcacgtgacaccggagcccagaagcgcgctctacctaatcaagaccccacccctctttccctttactgacaattgacagcgacctcttgcaatggcccttccgcctccaccaggagactctgcccgttggtagtaaaagaaccaattagactgggaaaaaaagaagcaacgccccaggtttcaccccggcttgacagacgcaattgaggccatccttgagtccctccgcccccaagtccagtaatgccagcgatggacagaccttctacccaatagcacgccccttttctgccgttgggtcccgcccccttgagggctaagccaatgagcgctccgggtctcagcggggtggaggggttgcactgcggtaatatggctcttccttagccagcggcggcaacggcggcagcggcggcagcggcggcggctactgtctgggctgagcagtagtgcctctcgggtggcgggtttctaggctgcaggggcttggtaggtggtggcaagggggcggcggcggatgccggaagagtgcccgccccgccgcttggcggcccctggatcgagatgagcgcctccgcgtcggtcgggggccccgtcccccagccacccccgggcccggccgctgctctgcctcccggttctgccgcgcgggccctgcatgtggagctgccgtctcagcaggtaagcccgcgcggctcgcagcactcgggagggacccgggcaggcccgcgtggagagcttgctggctccgggctgaccccgcgagccgggacacccagagcagggacccggagggctcgcgggactgaggaagactgtcaggaggtttgtgcggggaggggtccagtgatggccgaacctccgggagatcccggagtcctaggagaatcccgttacaggagatgggcttgttaagggacaagcagccagccagctcaagtccctggggccccggcccgaggccgcctcccccaacgcagggagccggggattgccccgcgcagaccctctccctcgttccgcccaggaagggacccggggaaccccctgtgtcccacgggccatagtgaaagcacttttcctttctttccccacctggccatccccgcttacggagaaaccagtttgtactcttcgtgcaagagccctggaggagactttagggtgtctaccatttgctttaatctcccctgattattaagtattcggcctctttagagaaatgtattcaagacttgggggtttccttcctaattctccgagtcccaaggaacgcatcttaataattaggaggactttttccttcttcattcccttcagtgagtctctgtggaaggaggatttgatgtatatattcatgtgttcctccatcctttaggaagggctttgaggacttcttggctctgcgttgtaggaagataagaagggggaaacactgactttggagatgtgacaaaactctttgtttcactcacatatctgtagagtacttccctccttatatcggttgccttccttctgtcccccaaggggagattttgcaggaatcttagcattaaagagacctaaagaatacctttcaccctctccctttattcctcctgccaagaagaggatctagagaaactgtcatttactgagaacttaccgtgttggatttgtgcaaagggctcagtggccattagttcactgaattttcacaactctgtgagatagctgtttttattacccccatttggcagttgaggaaactgaggcttgtccagagccttccagttagtaagtggtggggctgggttgcagaatccagtgtctgactctgcagccatgcacgtgcttgagacttgggcagccttcctccaccacctttacacaggacagagtgagttctttcatacacccctccaactttccatcagctaccagtgggacttaggaaggattcagaaagaggaagggagaggttgtaggggagagagtggttgaaaagtgaaatggatttgagtgcagtaaaggaggcgggggctaaagggaagagaagagttggagataataaccactgtggttgcctttgaataggcaggcagaagagcttacagtagcaacggctttttgtgtgactactaccgaagaggattgaaaagataccatgtgccctggttttgtgatgctgttggcagggaatttctgaatagtgggagtttgagggtagtgggggtttggattgtgttgtgagatacagggagagggtagaagtctggctagggagggagacacgtctctggagtgagcattaatgtgagtttttgtatgtgtgggaggtagagtgtgagagtggttactgggagagggaatagggagcaccgttagaaacaccctggagaagtcctaaggagttcaggggccaagaaggttttagtttgggggagcttcgagagtgtgtgggattaggaaagagaaagcatcatttacttcatggagcctattctctgataacagttcacagtttaacactgggaaaactaatgcaaacaaactgttgatggaataatttcagcctcatttgttagtgtttgtgaaatttttggattggtgccgagggatatatagtggcttaagtgtacagctgaatgctatatgagtgccgagtatgctatttacatctttctgggggtgtcaaccttgaattcttggaaggcagcctatataacaaagcacttttacttttgcagttgacatcaatttatcttttggggtcaaaatgctcagatttttagtgtataaataatatcaataaaattttgttgaagttttatctgtatatagtaaagtacacagattatcagtattcagtggatgaattgtcaccaagggaacagttatgtaagtactacccagattaagagatacaaaattttggctgggcgcagtggctcacacctgtaatcctagcacttttggaggctgaggtggggggatcacttgaggccagaagttcaagaccagcctggccaacatgctgaaaccctgtctctactaaaagtacaaaaaaaagaaaaaaaaaaaaaaagccagatgtggtggcgcacatttgtaatcccagctacttgggaggctgaggcaagagaattgcttgaacctgggaggcgcaggttgcagtaagccgagattgcgccactgcactccagcctgggtgacagagtgagactctatctaaaaacaaacaaacaaacaaacaaacaaaaaaccccccaaaaaccccaaaattattaacatcctggaagtcctcctatgttctcttccatctctgtttttcctttttctctaaaggaaccacttttctgatttctaatgtaaaagatcagtttttgcctgttcttgagctttatataaatggagttgtgcaaaatgtatttttttgtgtctggtttcttttactcagtattgtttgtgagagtcatggagtatctgtgtatgtctaatgttttttttttaagtattactttgttgcctttttttgcttttacaaaatttcaaatatttagataaattggaatgtcagttgttaactttcctttaaataatactttcaaaaccatacattttaatacatcccgtactagttggcaaggtatcaatttttttttttttttgagatggagtctagctctgttgcccaggctggagtgcagtggcgcgatcttggcttattgcaacctctgcctcctgggttcaagcgattctcctgcctcaccctcccaaatagctgggattacaagcacctgccaccacgcccagctaatttttgtatttttagtagagacggggtttcattgtgttggccaggctggtctggaacccctgtccttgtgatcctcccacctcggcctcccaaagtgctagaattacaagtgtgagccattgcgcccggctggtatcaatatttctaaacaaataaacaagcccggttggtttaggatttttatgatcaagttatctcaaaacatagattcagtggctcccaaccttcttctaagatggggtttgtcaaccttgggactgttgacattttggagtgaagatgggctgttacatgtttagccacatcccaagatatcagcagcacctccccagtcctgacaatcaaaaatgagttcagacatggccaaatgtttcttagggggcaaaattacccctagttgagaaccaccttactaaggtgtattttcattttaggatagagagtatccttgttattattgactcatttatttcaatcttcattaagtcctgttgattctagaagtggctgtaatgtttaaaaagttaacactgcaaacacctgaacttttccatgtatgagtactaactatagtccatatcagccccttgactgtgtcagatgggactactacttaattttgtctccttttgcttctatgtgatcttactttactgtaatttgagcaagaactagtgacacattttttttacactttttttttgttttgtttttgatttttgagacagttttactctggtcacccaggctggaatgcagtggtgcaatctcctctcactgcaacctgcccctcccgggttcaagcaatcctcccacctcagccttccgcatagctgggatcacaggctgtgccaccatgcccagctaatttttgtatttttggtagagatggggtttcaccatgttggcaggctggtcttgaactcctggcctcaggtgatccgcctgccttggcctcccaaagtgctgggactacaggtgtgaaccaccgtgcccggcccaaaaacaaactattttttagaaagttttatttctatttttggccgagcacggtggctcatgcctctaataccagcactttgggaggccgaggcaggctgatcacttgaggtcaggagtttgagatcagcctggccaacatggtgaaaccctgtctctactaaaaatagaaaaattagccaggtgtggtggcaggtgcctgtaatcccagctatttggaggctgaggcaggagaattgcttgaacctgggaggcagaggttgcagtgagctgagatggcgccattgtactccaacctgggcgacaagagcgaaactgtctaaaaaaaattatttcgttcttttatttttattttttttagagacaagatcttgctctgttgcccagcctggagtgcagttggctcactgaggcctcaacctcctgggatcaagtgattatcttgcctcagcctccctagtatctaggactacaggcatgtgccaccataccagttaatttttttaagtttttcatagagatggggtcttgctgtgttgcccaggctagtctcaaactcctggcctcaagatatcctcccgccttgacctcccaaagtgttgggattataggcataagccactacgcccagccagaaaattttatacttatagaaaaattgagaagatagtacagaaagttcccatatactctatacctagtttcacttattctttttttttttttttgagacggagtctcactctgtcacccaagctggagtggagtggtgcgatctccgctcaccgcaacctccgcctttcaggttcaagcgattctcctgcctcagcctcctgagtagctgggattacaggcatgcaccactgttcctggctaatttttgtatttttggtagagatgaggttttgccatgttggccaggctggtcttgaactcctgagctcaggtgatccacctgccttggcctcccaaagtgctgggattacaggcatgagccaccgcacccggcctcacttattcttaacatctgccttgacatatggtacatttgttagaattaatgaatcaatatttatatattattgactaaaaaagtccatagttcatttagattttcttagttctgaacaactgtggccaggcctggtgagtcatgcctgtaaccccagcactttgggagggtgaggcaggaggattgcttgaggcaggaggattgatgtcaaggctgcagtgagccctgattgcaccactgcactccagcctggaagactgtgattaaatgtgattaactatatgtacaacataaaatttgctgtttaaataatttttaagtatacaatatagtggcattaaaaacatacttaatgttatacaaccatcatcactgtatatttccagaatgtttacatcatcccaaacagaaaacaactccccattctcgcctcctaccagcccctggtaaattctgttctactttctgtctctatgaacttcactattctgggtacctcatataagtggcattatacagtatttgtccttttatgtttggcttatttcactttgcaatgttttcaaggttcatccatgttgcagggtatgttagaatttcattccttttttaaggcagatggtattccgttgtatgtatatactacattttgtttattcattcatctcttgatgggtcctttgtttgtttgctaatttgttttgagacggggtctcactctgttgcccaggctaaagtgcagtggcatgatcatggctcactgcagccttgacttcctggggtcaagtgatcctcccacctcagcacccccgcaagtagctgagactacaatggcatgtgcctccacgcccagctaatttgaaaatttttcgtagaaatgagtctcactctggtctcaaactcttgggctcaagagatcctcctgccttggccaaccaaagcagtgttgagattacagcatgagccaccacacccagccaacccttagtttttacctgatgtccttcttccgtgccaggatcctgtctggataccacattgtatttagttgtcctgtctcttgcctcctcttagctgtggcagttcctcagactttccttgtttttgatggccttgacagttttgagtattggtcaggtgttttgtaggatgccactcttctggaattagtctgatgttttttcttatgattagactagggtggtggtgttttgggagcaagacttaagaggtaaagtgccattttcatatattacgtacatattattaacatgatttatcactgttttttttttttttttttttgagacagagtttcgctcttgttgcccaggctggagtgcaatggcacaatgtcagctcactgcaacctctacctctcaggttcaagcaattcttctgcctcaacctcctgagtagctgggattacaggcacccgccaccatgcccagctaattcttctattttcagtaggacggggtttcaccatgttggccaggctggtcttgaactcctgacctcaggtgatccacccaccttggcctcccaaagtgctggtattacaggcatgagccaccatgcctggctgatttatcactgttgattctaacttttatcatcaccagctgtggtagcatatgataggaaaggcaaactagctgttttctcctattacactgttatactatcagcataacccttctgacattagatgtgtggggctttttccccacacaccaagcgatcctccagtgaacaccaatatggtgtcctatgattcaattcaattctgccacaatctccttagagttagtatcatattccacaagttaaaggctcagacccataaaactgtcccctacttcacatgccagacgtaagtctgggtctctggaacttcttaccgactggctataaattgggggttcctatgttcccctcctcaggctcagtcatttactagagcagctcacggaactcaagaaagcaccttgcttgcacttactgttttttttttttttttaaataaacaatattacacaggatacagacgagcagccagatggaagatatcatagggaacagtatgggggaagtggcccagagctttcatgccctctcatggcagctccaccctccacatgttcagcaacccagaaactctccaaaacctgtagttctgtgatttgtatggaggcttcatcatgtaggcatgatcaattattaagtcagtcttcagcccctctccccttcctggaggatggggagtggggctgaaagttccaagcttctgatcatggcctggtctttctggtgaccattctccttctaggagctcaccaagagttgtctcattagaacaaaggatgttcctcacctaggaaacgctgagggactaggcgttgtgtctggaactggggtcaaagaccaaatatgaaaagtaaagattctcctagtacccctatggcacccagggaatgacagaggttttaagagctctgcaccaggaactgtgtacaaagaccaaagtatatatttattattgtaaattgaagggccacaggtagtgtttgtcaggtttctctgctataaggttactcttcctccccttccctctatactgtagtctttggaaggaagtcactatgtgtagtccacacttgagtgagatctgtgctcccccttcttgagggtagagtatctacataaattatttggaatttttctgtatgggagattaaatcatggctcatttcagcctctaactcctggactcaaattatgtgcctcagcctcccaagtagctgggaccacaggtgcacaccaccatgcctggttcattttttaattttaatttttgtagagacagagtcttgctatattgcccaggctggtctctacctcctggcttcgagcaatcctcccgccttggcctcccaaagcattggtattacaggcatgagcgactgcactgggccggtaacttaaagtcacacagagtgtcaacaaagggactacaatctaggtgtttcctgtttgccctagacacccattctttgcagggttctggtgaaaagttttaagtacctcagagtttgggaccatcaggctttatattttatttcctacagcacttgtgcctaacactgtgctgatgatttagtaggaactcatgtacagtttttttgtttatgagtctttcccttgaagaactttacagcctaaagagaacaaggaaagattggattcagtggtattgaaacccatgcaaaaaaacatgatagaagcagaaaagtagatctaaagcttgattttgctgtataggataaatattttccctttctgtgtttatgtttatttggataccctacttttgctaatctaatttaatcatttttctattactaaaaaaaaaatcagctttattggcaaggccgttcatcttatcaggaacatgtgcctcacgcaatgcactaccatgccgtgtacattcattccttctgcaaatatttactaagccccttgtaactcgaagaaaaaatgtaatatatagttgagtatctaaaaagtaaaatgatggcaattttttgtgctggtttggctcttataaataaaatgatatgaggaagcctcagaaacttaagatatcagcatcttgaaatcattatttttatgtgacaaaatgctattaggaatttatgttttttgtttgtttctctttttcctgtgaaaatgagtttttttttttttgaaaggaaaagctatgtttatttagtgtttactttaaaatgtctctacaggatcacaattctttgtggtagaaaattcagaagtgaaactgactagaaatagagcacaagcagaattgaaactaataagttgggcctgaagtgaaacgtatggtagaatgaaaaaaaattagattttcatagtttccaaatgtgtatttttgataagctgtgtatttttacctgtcagacatgttactgctggggagaaaaagaagtttgtcattttttttttttttttttttttgaggcggagtctcactctgtcgcccaggctggagtgcagtggcacgatctcggctcactgcaagctccgcctcccgggttcacgccattctcctgcctcagcctccctagtagctgggactacaggcgcctgccaccacgcccggctaattttttgtatttttagtagagatggggtttcaccgtgttagccaggatggtctcgatctcctgacttcatgatacgcctgcctcggcctcccaatgtgctgggattacaggcgtgagccagcgcgcccggccaagtttgtcattttcaacgtactggaatgtgtacagctacaaactgaaggtgttttagaaaaagacatctgtcttatgagagaggttgaaacattttaggtttatgctttgttttaggtttaatgacataagtaatgtcttttttttttttttgagacagcgttaccctgttgtcgcccagaatggagtgcaatggcacgatctcagctcactgcaacctctgcctcccaggttcaagtaattctcctgcctcagcctcccgagtagcctcccgagtagctggggtgcccaccaccccacctggctaatttttgtatttttagtagagacgggtttcaccacattggccagactgatctcgaactcctgacctcaggtgatccacctgcctcgacctcccaaagtgctgggattgcaggcatgagccactgtgcctggccagtaaagtcttatattgttaaattttttcaatgccttgtacagtattttagcagttgcctccttagattataaaagtagacgagtacacacagaatggaaacttgacattggaattttacaattcatagtataccttcttgatttagtatcacataaccttgttttccatcttattttaagatggaaacatgaattttgaatcatggaattttgcagatgcaaaacctgaagccctctgaggtgaagctatttgcctggccacagacttgttctagctatttattcttgccctggagtatttagtaaagagtattagtttaacagatctgtcttgtgtcttgttcctgcttgtggcagagaaataaacagaacctgggtcttgtgaacagttccactgttcttggctgggtgtgttgagaagttgtttcttttttttttttgagatggagttttgctcttgtcacccaggctggagtacagtggtgtgatctcggctcactgcaacctccacctcctgggttcaagcgattctcctgtctcagcctccttagtagttgggattacaggcgcctgccagcacgctcggctaatttttgtaattttagtagagatggggtttcatcacgttggccaggctggtctcgaactcctgaccttaggtgatccacccaccttggcctcccaaagtgctgggattacaggcgtgagccactgtgcctggccaagaacttgtttcgttttctttcctttttttttcttttaagacggagtcttgctctgtcgctaggctggagtgcagtggcacgatcttggctcactgcaacctctgtctcctgggttcaagtgattctcctgcctcagcctccagagtagctgatattacaggtgcccaccaccacacccacctaattttttgtatctttagtagagacggggttttaccatgttggccaggctggtctcaaactcctgacctcgtgatccacccgcctctgcctcctaaagtgctgggattacaggcgtgagcctggccgagaacttgtttcttaaacttcactcggtcctttggcaacattagcctcacagctttggggattttaggctagaactgaaatggaggagaggctgtattttaacgttctctttaagggcagagcactcagagtccaccctcccacgtcccttttatggtgtgaattagagtgaaactttggaatgtccctctggagcttaaatgatcagtcttcctgttttgtccctgggtacttaccatgcctatctttttttttttttttttttaaatgttctacttaagaacttctgttctctgcctctttaagtttctgaaagagtaaccatctggttttttgatggttttattctgtgtaatatttggtgttgattgctgtagaccctatgtggtagtaatgttattaggcattttacttatccattctttgtgaaaactccagtatagtgtgcttattgattgagaggctgagactgataatgctgaagttgagcatcagaacttaccactttggagtctcactttgttggtccattgaaatagctggcgttttttcctactgtggtttttataatgtccaaaagatgcagtcagacatttttgaaaataatgaggaacaccaggaagctgaaactagcagcaacctttggcttttgtcagtagactcctgggaaagaaaaaagggaagacataaaagtaaaagtgagaatcagacttaatagatcataaaagtaaacatgagaatcaggcttatgatctgttttttttttttctccaggaaaaattttatactctttaacatgagtgtagcttttgtgattaagggtttaacagtgaatacaagtaattcgtgtgttcatattagcgtatgttaaaactaattctgggcggggcgcggtggctcatacctgtaatcccagcactgggaggctgaggcaggtggatcacctgaggttaggagttcgagactagcctgcccaacatggcgaaaccccatctctactaaaaatacaaaaaattagctgggcgtggtggcgggcacctgtaatcccagctactcaggaggctgaggcgggagaattgcttgaacccaggaggcggaggttgcagtgagccgagatcacgccactgcactccagcctgggcgacaagagcaaaactccgtctcaaaaacaaacaaacaaacaaacaaaaaactaattctgagtgcaggataggaaaaactgagagccatttattcaatagatacttttaaagtgccttgtttgaattgttaggcacaggattcggaactgtatgtcttgtgtctgccagcctacttacatctttcaggggatatgaactatttccttccttaattccaatcattcttttgtatgagagctaatccagaaaactaaacttttaaacaatacaaaataaaaataatcttgcttaggattttgaaaaacctttttttttttaacgttgtctccttttaatgaaaataagactgtcctcaagaaaatcagtattgctttcatccactaagatgttaatatctaagtatacatgagaagtagcaacatgaagaaagctttctggttttttattctgaaaatagattatgaagcaaggttggcaggtaggctgtggggtgctcattacaggtctaggataatttacaggactatactcattacaggatagaattggtaccattatagaattatatatgtatagtagatatttcagacttgttttcatgaattgacttattggagtttattctacatggagtgtgtttaatataaatataaaaataaagagtagctgcccaggtgctctggagtgattggttgactggtgatagtcatacacttctatcaaaaacgtcagtataaattgggtgccgtgctatgcacctgtaatcctagcctacctgggaggctgaggtgggaggattgcttgaggccaggagtttgattccagcctaggcaatatagtgagacccccatctctaaaaaaaaaaaaaaaaaagacaccagtctgatgatgatgataatgattaattaattttcggagacaaggttgcccaggttggaatgcagtggcgcaatcatggttcacctgcaatcttgacctccctgggcttaggtgatcctcctgccttagcctcctgagtagctgagactacaggcacgcaccaccatgcctggctaatttatatgaatataaataaatatataaatatatacacatatacatgtgtgtgtatatatatatatgtgtatatatatgtgtgtgtgtatatatatatatatacacacacatatatatatatatatatatacacacatatatatatatatatatatatatatttttttttttttgtagagacagggttttgctgctgggactacaggtgcgcatggtgcgcgccaccatgtctgactaatttttgtagttttttttggtagagatagggttttgccatgttgcccaggctggtctcaaactcctgagctcaagcaatccgcccaccttggcctcccaaagtgttggggttacaggtgtgagccactatgcccagccagtctggttattagatgaggacactgtagagttgcagaatttctttttggtttctttttttgagacactgggtctcattatattgcccaacgtcaggctgaagcatagcggctattcacaggtaatgcactacaacctcgaactcctgggttcaaatggatccttctgccttagcctctggagtagctgggactatagatgtgtgcgactgtacccagctaaattgcagaatttcttaactgcaaattagtgcattttttaatattatacaactacccaaaaactactaaaaaattagaaagctgcttctcatgtatacccagacattaacattttagcaaatgaaagcaataccacttgtctcagtgacattcttctcttcattaaggtatcctgtaaagatcagtgtaattgaaagactttcttaactatgacccattttgtttggcttcttaaagttcatttgagtaattcctcacttacttaaagttgcacaaatgtgaatgcttgtaaatgccagagactgtttaggtgctggaagtaaaacagcaagcaagacagagacactgccttcatggacctaaccttctggtgcatgagagacaaggtggttagcaagcttttctgtgaaggaccagatagtgaacatgtttctgtctcagcgggccttctagggtcttagtagcaagtactcaactggttgctgtagtgcagaaacagccctatactatatgtaaacaactgagtgtggttgtattccagtaaaagtttaaggatactgaaattattaattttcatgccatgaaatatttgtcttctttttctttttacttttttgagacgaagtctcactctgttgcccagtctggagtgcagtggcacaatctcggctcactgcagcctccacctgctgggtttaagcaattctcgtgcctcggcctcccacgtagctgggactacaggtgcgtgccaccatgcctggctaagttttgtatttttattagagatggggttttgacatgtttgccaggttggtctccagctcctaacctcaagtgatctgcctgcctcgtcttcccaaagtgctgggattacagatgtgagccactgtgcctggccaattaattggtattaaattccttctgggtatcagatactgcattatactctagtgtacttctttctccaacttctgttattcttggaatgccagaatatctttgaatatggttttgaggcttcttacagcaagtaagtattcttttttttttgagacagtctcgctttcggccaggctggagtgcagtggcgtgatcttggctcactgcaacctctgcctctcgggttcaagcgattctcctgcctcagcctgccgagtagctgggactacaggcgcatgccaccatgcccggctaactttttttgtatttttagtagagactgggttttaccatgttagccaggatggtgtccatctcctgaccttgtgatccacccgcctccgcctcccaaagtgttgggattacaggtgtgagccactgcgcccggccgtaagtattctttaatatggtgtcataagaagacttgttataaggctggtcctgggtataactaaggtaactttggaaaaagtgctttgttctagtcctcaggttcttaagctttacagtgagaagactaggttatctgtagctctgtgcacatttttaacctctgtgtgcctccatttcctcaattgccaaatgcttttgtctcgaatactttcattctacaaatactgtgttcagctctgttctacaacattattaattcaacagttaatttttgagtttctaccatgtatcccacagtggttaagaatatggacactagagcctgactgcttgtgttcaaatcctggtccagctattttctacgtgcctaaactaagttaggcaacctagaagttatttaatctctgtgtgcctcagggagactcaggtaaaatgggcataataatagcctaccttgtagggttgttgagaggattaagtgtgtcataaatttccctaaaaaggtgcttggtttatagtaagtgttcaaaaaatgttagctgttgctactgtcattgctattcccatttgtcaggcactgaagatacaggataagcgtgtccttgccctggagggactcataatctagtgggtggccgggaacggtggctcacacctgtaatcccagcactttgggaggctgaggcgggcagatcacgaggtcaagagagtgagaccatcctggtcaacatggtgaaacccagtctctactaaaaatacaaaaaattagccgggtgtggtggcaggcgcctgtaatcccagctacttgggaggccgaggcaggagaatcacttgaacccgggaggcggagattgcagttagccaagatcgcaccattgcactacagtctgggcaaaaagagtgaaactccttctcaaaaaacaaacaaacaaaaaaaaaaaacaaaactagtgggtaagacaaatatgtcactaggccattttagtgtaatataagagatgattcgaaaaaagtactgagatgggaaagatgggaaatgcatgctagcagagggaccagcttgagcaaaatggtaagaaggtgtaaaaaggaatggcagataattgaggccagagtttaaggagcttagaggaggacggtggaaacaaggagctggagagtacaaatgccttttgatttatgatggggttatgtcctgatgaacccactgtaaattgaaaatatcgctaagtcaaaagtgcatttaatacacctaacctctcgaacaccgtagcttagcctagcctgtgttctcagacactttccattagcctatagttgggcaaaatcgtctgacacaaagctgatttttaaaaaagcattgaatatctcatgtaatttactcatgtaatttattgaatgctgacctgaaggtgaaaaacaggatggctgtatgggcactccatgtacgatttctactgaatgcatattactttcacaccatcataaagtaaaaacatcattaagtcaaaccgtcctaagtcagggactgtctgtacctaggacagtctgtgctgttccacttacaacacttctgacaacaaatatgttgggttttccccccaacatcaaccaattcttttacaccagctgggtatccttgtgttcagttcaattctgatgctatttacccggagttatgacctacaagttaagggcccagtcccacaaggctgctcccacagacgtcagtcccaagtcccggtcgcaggcctcctgtacttctcagctatcagctataaactgaaggttaccatgaccttctccttgtgttcagtaatttgttagaatggctcacagaactcaagaaaacattttatgtattattataggtttaggataaaggatacaacctgggaacagccaatggaagagataaatagggcaaggtatgggggaagggacgtggagcttccatgccctctctgggtgtgccagcctcctagcacttcaatgtatccaccatttcagaagctctccaagctctgtttagggtttcagggaggttctattaggtagccatgattgattatatcattggctgttggtgattaacacaatctccagcctgtctcccctccctggaggtcagggggtagagctaaaagttttaaccctctaatcatgcctcagtgtttctgccctgaagctctctgagggactcccagccaccagttatctcattagcatgcaaaagacacttatcactccagagattccaagggtcttagaaactcttgtgtcaggaactggaaactaccaattattacattataacaaaagatgcttctgtccccctataccaagggttttaggagctgtgtgctagaaaccagggctgaagacatacatttcttatcataccagtgtcacagagaagttgtactaatagtttggagttagattgtaaagggtcacgtatgccgtgatttggaatttggaatttggacattatcctgtaggtagagagaacagtctttattttatttatttttatttttatttggaaagaatttcaagcttatggaaaaatggcaccttttattttataaatttctgtttttcagaacacctgtatacctgttacttagatttgtctgttaacattttgtgttcaaatcctggtccagccatttcctatgtgcctaaactaagttaggcaatctggaagttatttatctctgtatgcttcagggagactcaggtaaaatgggcataataatagcccattttgctacatttgcaagcttgctctctttctctctttctgaatatgtgtagataaggatatataattttatgtgaatcatttaaagttgttacatacatcatgaccctttacccttaaatacttgagtatgtatttcccggaatagggatattctatttcatatccatagcatagttatctgccgagaccagctcggtcagggagaccctaacccagcggcgctagaggaattaaagacacacacatagagaaatatagaggtgtggagctggaaatcaggggtctcacagccttcagagctgggagcctcggaacagagatttacccacgtatttattaacagcaagccagtgataagcattgtttctatagattatagattaactaaaagtattccttacgggaaacaaagggatgggccaaaataaagggatggattgggctagttatctgcagcaggagcatgtccttaaggcacagatcgctcatgttattgtttgtggtttaagaacgtctttaagtggttttccaccctgggtgggccaggtgttccttgccttcattccagtaaacctacaaccttccagcatgggcatcatggccatcacgaacatgtcactagtgctgcagagattttgtttatggccagttttggggccagttaatggccagattttggggggcctgttcccaacagttatcaacatcagtaaatttaacatcgatactttaatctaaggttcatcagttgattctataatgtcctttatagaaattttcctcctccagttcaggatatagtctagggtaggtattacatttagccgttgtgtctctaatgtagaacatttccaaagcttttctttgtcttatttttaaatgtcactagcataatacagaccctgctcccttaaaaaaaaaataggacattcctcattttctgtttatctgatgtttcctcatgattagattcagattacacattttcagttggaatattgcatgggtggtaatatgtccttcataaggtatcacttctggatgttcatttgtccctcattggtaatgttaattttggtcacccggtcaaggtgtcgtctgatttttcaactctaattctttgtgtgtgtgtacatgcatgcccttgcaactaatagtctatagggaaacactttaagaccatgcatggggccgggcgcagtggctcacacctgcaatcccagcactttggtaggccgaggcgggtggatcatgaggtcaggagatcgagactgtcctggctaacatggtgaaaccctgtctgtactaaaaatacaaaaaattagccgggtgtggtggcacgtgcctgtagtcctggttacttgagaggctgaggcaggagaattgcttgaacctgggaggtggaggttgtggtgagccgggattgtgccactgcattccagcttgggcaacagagtgagactctgtctcaaaaaaaacaaaaaacaaaccaacaaaaaaaccaaaaatactttttgtagcaaagggtctcactatgttgcccagcctggtctggaactcctggcctcaagatatcttccctcctcagcctcttaaattgctgggattatgtgagccaccatgcccgacctcatttgtgtttaatagggaaaaaaagaatatgtaattattggagagccataaactataactgataacactggttgccccaggggaaaggaaatgggtatttggggcacacagtagtacggagactgttcactatatcctcttatatactgtgccttttgaattgtgaatcatatgaatttttgtgtgtatcatgtgtatttttaaaaataacattaaggatactttttacttcttattttttaagactagtcaagtgtagtagtgagaagcgggaaagagttgagcaaatttgatctgtaactgactgtgaacactaaattgagaaaactcattacctttggatcagcttaagtttatatttcaaaaaaaacagagatggcaaccaacctttaaacacaggtatgcagatgacaatttcccgaagcaatgtgacacagtgggaagaactcaagttagagcttcagctcaactctaggtggttctaccactcattagtgagcaagccacttactgtttctgagcctgtttccccttccataaaatggagatatttccacctgcctacttctgtgggttactgcaatgatcaaatgaaataatggatatagaagctctctaaaaaagtgtaaagtactttataatatatatttaaatataaagtattacaaaaatagagatgtcaagagaggaatgtggttatcagtgaaagatgatgaatttaggccattcttatttgaagtaaagagacacagatttagaattcatctctctaaatagaggtaattataagtcacaaaagtataacagatctctgaaggataaacattcaacaaataggccgggcatggtggctcacgcctgtaatcccagcactttgggaggcggtggtgggcagatcacaaggtcaggagatggagaccatcctggccaacatggtgaaaccctgtctctacttaaaaaaaatatatacaaaaaattaactgggcgtggtggtgtgcgcctgtagtcccagctacttgggaggctgaggcaggagaatcgcttgaacccgggaggcggaggttgcagtgagcctagatcatgccactgcactccagcctggagacagtgagactctgtcttaaaaaaaaaaacaaaaaaacccaccttcaacaaatagaagtataatactgcagaaccagaaaggaccttgaaggtcatctaagcctttgctactctgcatcacttgtagtgaaaatgctgagaatctcaggtcccaccatagacctagtcaatcagaattgtacttcaacaagattccctaggtaattcatatagacattttaagtttaagaagcactgatctaggccatcttccttatttttcagataataaaactgaggccctaagtaaagggatttacccatgttcacattgttaataagtagcaaaatcaagatttggacacaggcttgatctcctgggctgggtacaccatgtattcgcttcccagacaccctgtttcaaaacctttgagacatctttgcatttcaaacttcccatgttctcacccccatttcttattggccatctagatccatcaattctttcttcacaatttctttggcatacgctgcttcttttccacccacttcattcactgccctaaagctactgttcataccacgaaaaagcagcttccctctcctgtgcatgtatcaacttcctcttctgcaaacaagagtgcactttcaaatagtaagctctatataattccttaagaaggtgcaagtcattaaaaagcattaaactttaacatgctaacttcaggcagaatttgtatttgaaacccaccaagattagcagctataactgtaattctaactcaaaatcttcatgtcttcacttccattatttctttcctattacctccttttctttgccctagaactagcttttatgtaacaaggccctcccattctaatcaagcttttctaaaatatagttcatcatccctcagtatcctcaggtgattcactccaggaacagccaccaccctaatcccccaccaccacagataaaaaaatctgctggccaggagcggtggctcacgcctgtaatcccagcactttgggaggccaaggtgggtggatcctgaggtcaggagatcaagaccatcctggctaacagggtgaaaccccatccactaaaaatacaaaaaattagccgagcgtggtggcaggcacctgtagtcccagctactcaggaggctgaggcaggagaatcgtgtgacctcgggagtcagagcttgcagtgagctgagatcacgccactgcactccggcctgggcgacagagtgagactctgtctcaaaaaaaaaaaaaaaaaaaaaagtctgcagatgctcaagtccctgatataaaatggcatagtatgcatataacccatgcaacatcttcctgtagactttaaatcatctctagattacttataatatctaatgcaaggtaaatgctatgtaaatagttgttacgctgtattgagtttttttgtactttttaaaaattgttttgttttggtttgtttttttcaggctagtcaagtgaggaactgggagtggagaaggaacaaagaaatctctaactggttctgatcaactagttgtgaacacaactgcatttggactagcctattgagattttttttttctgaatattttctatctgtaattggttgaatccagaatcctcagatgcagagggcctgctgtagattcaaagtatcatcttctgaatttatagctcttaccatctacattctcatgcctttataattctctcctatatattccattctaagaaaccaaattatttcagcatttcttgaatacctattaaaaagttttaaaaaattaggcaggcatggtggcattggcctggagtcctagttactttggaggctgaagcaggagggttgcttgagcctgagagtttgaggctgcagtgggctgtgattgtgccaccactcgccagcctgggtgatagagtgagaccttgtctctacataccaccaccgctgcaatccaagaaaagccacaaatgctaaacacactgactgtataaactgtacttaaaaaaaaaccctacaaactaatagtagatcttggaaattattccatatcagtgatcaaagagctgccatgttatgtattctttatggtcacatagcatttcactgtaggatatatcataatttagtcccctattgatgtacatttcagttatttctagttctttttgctaataagcaacactctattacttacatcatattgctgaatcaaagaatatgtgcatttgtaatttttttaaattttagggttttttttgtttttgtttttgagacagaatcttaccctgctgcccaggctggagtgcagtggcttgatcatggctcactgaagcctcaacctcctgggctcaatcgatcctcccacctcagcctcccaagtaggtgggtctacaggcatgcaccaccacacccagctaatttctaagtttttcatagagactctctctctatatatagagtcttcctatgttgcccaggctggtcttgaactcctgggctcaagtgatcctcccacattggcctcccaaagtgctgggattacaggtatgggccaccgtacccagcctgcatttgtaattttgatagatgttgtcagattgccatctgttatggatgtctgtttgaatatctgttggaatatttgtcctctccaaaactcatgttgaaatttagtccccagtatggcagtattgagaggtagggtctttaagaggtgataccatgataccatacctctgccctgatgagtggattaatccatttatgtattaacgggttaatgggttagtgggttaaggggttatcatgggggaagaactggtggctttataagaacagaggcctgagctagcaccttagtgctcagctcccttgccatgcgataccctgcaagtcctcaccagcaaaaaggctctcaccagaggctgcccctcggcctgtgttatcagattttttggtctgtgccaattttagtgtagttttaacttgcatttctcttatgagtgagattgagaatcttttcatgtttaagagctatttgtgtttatttttctgtgaattatctgttaatgttctttgccatttttttctgttgggttgttggacttttgatttctaggaattctttatgttttagtgaaattgtcttttttatattaattaaaattttttcttaggttttttcctttgactctgcataaggtagtttttgccatgcctaattttaaagtgttttatgtagtaatttttttcttttatagcttctgaatatcatttttagacctttgtgtttataaaataattgttcatggtttctttgggtactttctgctttatgtacattaaatatttttaagccttctggaatttaatgtaaggcataggatgtgtgtgtgtgtgtatttttgatggctaccctattgccctaacacctttattgattagttctcttttccctagaggttatctttgacttgtttgtctcttttttcaattttctcttcatccctaaccacatccattatctaattagttatcccagtaagctcagtttttctttaggctcctatatgttcttatattttctttctgttcctattgataatactttaaaccatttttattgtggaaatttcaatgtctattgaaatgtatattttatatatgaatatattcatcagtatatcaatgtatattgaaatgcaagtagtgtatgtgtgtgtgtttttgtgtgtgtgtgtatatatatatatacacacccccacacatatatatatagagagagagagagagagaaagagattgagagaggaatataatgaactcccaggtacctgttaccccacttcaataactattaactcatgttggatcttgtttgatctatatgcctacctccttgtcctcctttcctccctccaattattttgaagcaaatcacaggcatgctattactcaacatctggacctctgtcagctattttctgtcttcaatttttatcttctgtaggtcatcctgggtaactgtgtgtttcttcattggtcttatatttctttttttttaaattttgatcttatgtttctaaatgctgaaatttacctgaaaatttaccagaaatttgcccttttcatgtgtacaaactctagttctttagtaagatcatatactctgaaattaggtagtaattcctaataatagtctgtaaaggcaatactaagctagaatagaagaaagaaggaaatgaggggtgggggaaagagacacttacagagggcggtagcggatctacctgtttcttagagtaacactacctggcagaagaatggggcgggggaaggcaagttttggggcctttcaccaagtttgggggtaaatagggtagaaataagaaacccacagccaaaatgtataagaaatgtagaaagttcagagtcgcagtttgttttttcctgttgagaagcctgttttataatttagtgcttagtaaatgactgcattaaattcagactgatttgaacttggtgggagagcagagttaatttcagaataaaggctttagttccaaggttgtgtaatttgtgccagagaaagctctcaattagcgaccagaactatgaagtgtttcatgagagattagggttgttgggttgtttgtttaaatctgtaacttggttggcaccatttgcttatagccagtagccccaggcactagttttaaagcattcttgtgttctttcaaaattttcatagtgaggctttcaggttggatcaaaggattaggaaaatataggtgattgagagtgctataatatagagagctcctttctgttttttgtttttttgtttttaaactgacttgaatttatcaagcttaaattcttagttcagtagttgagtatctttaccttctgtggaaatgtggaaaaccagtttcccacaggtttatatttgttacctctcaaaaagttataacaaagtaacagtaatataaatttgcccgaaataatctgggccttaattcttgcctgccattgagcctggtctcaggctgagaggaaatgtctgacctgagaaagaaatggaaccaggagttgagagtgggaatgaaataaggtgtacaggacaagcttgactacatttccaaaggcaaatactattttaagaaattatctcataatatctgtgtttatctaaatcaggggtcagcaaactgtgactaactggctggtttttgtaacaaccaataagctaagaatggttattatattgttaaaagattgttaactaaaaaagaagagtatgtagacagacagggtgtgcactgaaaagcgtaaaagatttactccctgatctacattattcaaggtatatagtaatatttctttacgtaaacattaaacatttcttgctcttttgtttgttttatatcatcattttcaatgacctttaaaaaaaaactggtaatatggttttccattgcatttttacattgtaccacaatgtaagagtgttactcagtttttgcttttatagcaatactggaataaacatatttgaacacaattttatgacttgtgaaatgcttggtaaaattttatatgaactttaaaatttgataattttttgctaaattgcccttgctccaaagcagaccagttttatgttttccccactttgttgtccttacccgtgtcaaccccagtagagactaaaatggttagactctttaatcagataggtccctttaattatctattactccataacaaacaaaacctgagtggcttaaaataacatcatcatcattaattttgctcagaaatctgcagtttggtctgagcttggtgggaacaacttgtctctgcttattatcttgatgtcatttctggaggctccgagcctcaggacatggtcacttacatgtctggctgcctgctggaatctcagctggggctgtggagaacacctatgaagcccatgtgactggttggcttcctcacagtatagtcactgggttccaaggaagaatatcccaaaaggaccaggtggaagccatgtcacctttcatgatttagcctcagaagtcacatagcttcatatctgcccacatttaagggggaggagacatagacctcacttcttaatggatgacaggggtggcagcattacactgtaagagagcatgtcagatgggatgtattggggcaaccaagtttggaaactgcagtcggtcacaaggtggaatatttattttgatgtgcgtattttaaaattgtgggtgtgattatacatcttttcacatgttcattgactagttccattacttttccttttactgtgacctgccttttctttctttttttttttttttttgagacggagtctcaccctgtcacccaggctggagtgcaatggcgtgatcacggctcactgcaacctccccctcctgggttcaaacgattctcctgcctcagcctcccgagtacttgggattacaggcgcccgccatcattcccagctaatttttgtatttttagtagagacagggtttcaccatgttgcccaggctggtcttgaactcctgaccttgtgatctgctcgcctcagcctcccaaagtgccgggattaccggcatgagccaccgtacctggcctgacctgccttttcatatcctttgcccctttttcgttggtctctaggttattgattattggttacattattgatgtgtaataactcttatagattaagcaaatcaaactcaaactcgatttagaagttacttccttgtggccctgggagttgtgaaagttgtgtgtgggatggtttagtttggtgatggtggggatttatggagtaattattttaagaaccatactacttttgttttttaagcaagtgatccagcaagggagggtgaatgggagccatttccttgtctttggttatcagcctctctgaatcactctctaatgcttgatgcagaacaagattaagggcacatcagttctctttggtcattaatatacctcagaagccagagaattttagatgcatgcaagggaaaggtaaaatatttcactactgaaaatggctttgagttctgtcagttctggtgtgtgatctgaccgggttttttaagacttgctttccgctgtattaaggttcaaaactgtatcaacaaatatagattgaccctacagaaatgatcattttctaaaatacgggtatgtttaataaagtgaaacatttcttttatcttgccactaagttagaatgttactcttcatctactaacctgccatgggataaatccttaataaaccttacagtataagttctttccctagttgtaatctttgacagttttaaagggatgggctgatgtttgtcatcatagtactcattttaagtatagtttgatccaggcttggactgtgtcagcaggatctgaatcccacatctcttgactctgctctcttccttgttggtttcattccctggtttcactgtgatagaaagatggctgacaggatctctagccctatgtccttctaggttcagggccagtaggggcaaaaaagaactcatggccggctcagtggctcatgcctgtaatcccagcactttgggaggccgaggtgggtggatcatttgaggtcaggagtacgagaccagcctggccaaaatggcaaaaccccgtctatacaaaagatacaaaaattacctgggtgtggtggcaggcgcctgtagttccagcaactcaggaggctgaggcaggagaatctcttgagcccaggaggcagaggttgcagtgagctgagattgcgccactgcactccagcctgggtgacagagcaagacgccatctaaaaaaaaaaaaaaaaaaagaactctcaacagtttaatttctgggtctttcgttagccctaattggatcatatgttatgatcgggagaatataatgtgctgattgattggcctgagctgaattgtgtgaacatccctgatgctgcaggtagagttaactctactgaactgtggatctacaaggccataaacaaaacaaacaaaaatataaaaacaaaataaaaaagttgtttgtattctaccgttaagttttaaagcagatttctttttctttttttcttttttttttgaggcagagtctcactctgtcgcccaggctggagtgcagtggcactatctcggctcactgcaagttccgcctcctgggttcacgccattctcctgcctcagcctcccagtagctgggactacaggtgcccgccaccacgcctggctaattttttgtatttttagtagagatggggtttcactgtgttagccagatggtcttgatctcctgacctcgtgatctgcctgcctcggcctcccaaaatgctgggattacaggggtgagccaccgtgcccggcctaaagcagctttctaagaaaattactggtattaagaagaaaaacagctattctgggttttttggaagcactggtttacagtcatactaatgagtatgattgtgatactaatatttttatttttttactaaagcagatgtttctcttttcttttcttttttttttttgagacaaggcctcactgtgttgcccagtctggagtacagtggtgccatcatggctcactgcagccttggctcatttgggctcgggtgattcttgcacctcagcctcctgggtagctggaactacattcatgtgccaccatgcccaactaatttttgtggagatggagttttgccatgttgcccaggctggtcttaaaactcctgggctcaagcgatgtgccctccttggcctcccaaagtgctgggattgcaggtgtaaaccatcatgaccagccagatgtttcaaatttactatgcataccacttaagtcttgcgttagaatttgtatttgaaagatttataaaaagttaaggaatttagggtcatattgctcttttgcccactcccaacatttcaggtagttgaattgtgccctataatctgtctgtctcccagatgaaagctgaataggttttgattttgtatgttagtgaatgtttttaacctttatataaggatgtgataggtagtgtttcaaatattttaaagccatgttaatttaaaaattaaaatcccctattcagctctggggatggatattactagagcacaactcagccacctgaagctaccactgtagtataatgcacaaagagcattttataactgtgaaagtataaagtagagcatttgaggaagtttctggagattgcttgaccacatgactattcacaatagcaaagacatggaatcaacctagatgcccatcaatggtggactggttaaagaaaatgtgatacatatacaccatggaatactacacagccagaaaaaagaatgagatcatggcctttgcagcaacatggttggagctggattctattatcctaagtgaattaatgcaggagcagaaaaccaaaaacttcatgttctcccttataagtaggagcagaaaaccaaaaacctcatgttctcctttataagtacacatggacacaaagaagggaacagtagatactggggcctatttgaggggtggagcatgggaagagggtgaggatttaaaaactagctattgggcattatgctgattacctgggtgagaaaattatctgtaccccaaaccctgagacatgcagtttacccatataacaaaacctgtatatgtacctcttgagcctaaaggttgcccaaaaaaaaaaagttagcagatcttaggaagttatgtcacagacatgaaagaaaaagaaaactgcatagaatgttatcttaaagagtgattccaaagtttgtgtaaattttaatttttttgtgtaaatttacattttaattactccgaatgtttttactttcctgagatatttgaaccgatttagatcataaaaatgtttggcttaaatatctgtagctggaccattaattctaaacagaccagtaattctgtttagaaaagatcaaagcattgatatttatgctagatggtgcctctaggatgtgaagtaccactagaccttatactcgagagcagttgaaggatgagccttgaggatttccaataggctaaaagtgttattaagacttaccgcgtttcagtcattagacaagttcttagatgtgaagtgcgctgtgttctccatctggtgggtgggcatcagaatcaggtaagggtttcagaccactcagaaccattgcaaagcctaagaaaaaccaagttttaaattttaattaagtcccatttatcagtttcatcttttatgaattatgcctttggtgttgtatctagaaagtcctcacaaacccaagatcaccaaaattttttcctatgttatcttctaggacttttatagttttgcattttcactgaggtctccgattcattttaagttaatttttgtgaaaagtataaatctgtgtctacattcatttttttttttttgcatgtgaatgtccactttcagcaccatttgttgaaaagacttggctgttgtctttgaattgtgtttgagcctttatcaaagaatagttgactgtatttgtgtaagtgtatttctaggctctctattctgttctcgtctgtttgtctcttcttttgccaataccatcctgccttgattactgtagctttatagtaatgtcagttctctgactttgttctttcattttttttttttgagacggagtcttgctctgtcgcataggctatagtgcagtgacatgatctcagctcactgcaacctctgcctcccttgttcaggcgattctcctgccttagcctcctgagtagctgtgattacaggtgtgtgccaccacgcccggctaattttttgtatttttagtagagatggggttttgccatgttagccaggctactctcgaactcctgacctcaggtgatccacccacctcggcctcccaaaatgctgggattacaggtatgggccaccgtgcctggcctgttcttttgttttcttgagatggagtctcactcattctgttacccaggctggagtgcagtggcgtgatctcggcttactgcaacgtccaactccggggttcaagtgagtctcctgcctcagcctgtcaagtagctgagattacaggtgtgtgccaccacgcctggctaacttttgtatctttagtagagacgggtttcaccatattggccaggctggtcttgaactcttgacctcaaatgatccacccgcctcggcctcccaaagtgctagtattacaggtatgagccactgtgcccagcccagctaatttatttttattttttctagagatagggtctcactatgttgttgcctaggctgatcttgaactcctgggctcaagtgatcctcttgctttggcctcccaaagtgctgggattacagttatgagccactgtgcctggctctggaatgaacgttattaaaaaagaaggccagacctagggcacaagagggtttacatgtacacttactgccttttaccaagattgcatcagtaatttacccataaagagtttattagcgactgggcacggtggctcacgcctgtaatcccagcacttttgggaggctgaggtgggcggatcacgaggtcaggagatcgagaccatcctggccaacatggtgaaaccccgtctccactaaaatacaaaaaattagctgggtgtggtggtatgcgcctacagtcccagctactcaggaggctgaggctggggaaatgcttgaacccgggaggcggagattgcagtgagccgagatcgcaccactgcactccagcctggcaacagagtgagactgtgtctcaaaaaaaaaaaaaagaaaaaaggatttattagcacgggcaacatagggagactctgtctctaaaaaaaaaaaaaaaaatttagctgggcatggtggcatatgcctgtggtcccagctacttgggagactgaggtgggaggattgcttgagcctgggaggttgaggctgcagtgagctacgatctaccactgtactccagcctgggggacagagagagaccctgtctcaaaaaaaaaaaaaaagtttctttcctttgtccattccagttgctggaagtatcttggattttaattaattatggtataatgagaatacttaccctaatgcttttgaaataagtaaaataaaggaaaagggcaaaaagtcatacagcccacagtcagtgctttaattatagttggtcagtttatggagtttgttttttgtaaacctttttataaaatggtctgaatgtggtttgttctgtttattcgcattaatggattacactggtaatcacccagatgaaaatcatagagtttagaatcagaaggtatcttggaggtggtcgtgctaatttcccacagttgctacataatgcagagatctctttgataataatatccatgcatctattatagattcgatctccgtccaagccctgcacactgctttgtaaggcagtcaattccatggtaattgcatgtgtcataaagttattcttttgagttgaagaattggttatttccttgtgttctgtagtaataaaggagtatgaagacaaattatatcttttaggtatatgtagtatttagatggagatacatatccacgtatataggatgtaatccttggctttctttctgcattctttccttcttttgagatatctcctgtcatttattattttctttgttttatatttggttacttagaaatgtaagactaggctgggtgtggtggctcacaactgtaatctcagcactttggggagctgaggcaggtcgatcacctgaggtcaggagttcgagaccagcctggccaacatggtgaaaccctgtctttactaaaaatacaaaattagccaagtgtggtggcacatgcctgtagtcgcagctacttgggagcgtgagacaggagaatcacttgaacccaggatgcggaggctgcagtgagccgacatggcgccattgcactccagcctgggcgagacagagcgagactccctctcaaaagaaaaaaaaaatgttgagataaagaaatgaataatgatggacgggcgggtggtggctcacacctgtaatcccagcactttgggaggccaaggcgggcggatcacgaggtcagaagattgagaccatcctggctaacacagtgaaaccccctctctactaaaaatacaaaaaaattagccgggtgcctgtagtcccagctacttgggaggctgaggcaggagaatggcatgaacctgggaggcggagcttgcagagagccgagattgcgccactgcactccagcctgggcgacagagcgagactccatctcaaaaaaaaaaaaaaattaatgataatgagtaatagttaaccttgtagggttgttatgagaattaaatgttcacatgtatgaagcacatatttagcacagtacatgacacaaggtaaacatttaataaatgctgacagtacagtgatggttgtggtttctatcaagccttttaatgctagattaatagggaagataacggtaaacaattaactataataaaggccgaacaaaataagtgctatagtagagatagaagcaaagttcttacttgtcctaataagggagcaactaattttgttactggtagcgggtcttgactgaaagttctccaggttctaggtgttttgaacaaagaattggacaaaattaacagcaaagcaagcaaagagtgaagcaatgaaagcagagatttattgagaatgaaagtacattcagcaaggtgggagtgggccttgcagcccctggagagcccccttacagaatcttctaggacccacatacccccagaggtttcccattggccacttggtgttcacaccatgcaaatgaagtggtggcctgcaatcagtctgattggttgcagaaagcagccaatcagaggctgaagttacaaagttacactcctatgcaagcatctgattggttatggaaagcacccagccagaatggggagtttgcaaagggtgtagcctttggtccttttgttatttaggcatggaaagttggggttttcctttagatttagttctagggttgccttaggtccctggagaccctattctcctgcctcaatttcaattggaaaatcaggaagggcaggaatcttctttcctaaactttgaaatatgcataggatctccttaaagagcgggatggcattgaggtctaccatcagcaaatgcatggagctaggaaagttcatggtctttttgatggactttaagcagtcatgtgtgactgaggggttgggtatgtggaagagctggtgggaagtaaggatggtatatagagaagttagactgtagagggctttgaacacaatgatgggatgtttttgtacattatcctagatattccagatgttttcaggtctttgaacagaggagcaggattgtaatcttatagcaaaatagatgtgattattgtatgcagataattagtggttcctgtttttaaagttttgactgaaagggctaatgaaaagtgtgtagcaggagaaaattgttgctgtaatccagggtgtgaaatggaaaccattggcagattgtggaaaaatgagtcttttagagtaagcccaggaaactttttgtaaatacatttgaggcttttcatacttagaggattaaacaaatttattagacaataaccttctctctcaaagaatcttaatctctagattgggagaaaggattgggttggtatgtgcacgggaaaaagacctgggctcttttggctgactgtgcctgtaattgaaagtggacttacctcaggagagtgaactggctttcagcctgcgggagagctttaagcacattttaagtgtgagcacttggtttctatttttaagtctctgaagataatgatctgacatagggaactagcttttggggatgaatctgctgtgcccagacttcagcgttgccaacattctctttttgatatatgagttgatttggctatcccttaagcttattttgtatttttgttgatttctactattgcttatgaagcttttccatttctaaacttatgatttcaaatcattaaagagtctggttggagaaattgttaggaaggaggcctgattatgaaattgagactggtgaaatgagaatcgaatggaagctcacagcagttgctttattggctggatggggtggatggagtgaccagtgagtcactatttttattttttggctgtggccttgttttcctgcttgtatagataatctggcatctagactgaactagcatcaggggtgagtgtatgtgttaactggtgattatctgttggtatgagatggattttatatgtctatcagaatccctctgtggagaaaaccaaattactacttagtttatgttccagggaatactaatgctattatgcgggtatatagcacttacataacgttggtccttttcaaaaatatttcatgtctgttgtcacttcattctccaaccaccttgtaaatgagatagggcaggtataattcctgtttgacagaggggatgctgaggcataaataagagactgggttatggtttctggctcaataaataaatgactgagacaacttattacatttcatttttgaactgcaacttccagaaaattttataggaggaaaaatctgaatgccttctcttttttgttgttatttttcagcggcgtcttcgacatcttcggaacattgctgcccggaacattgttaatagaaatggccatcagctccttgatacctactttacacttcacttgtgtagtactgaaaagatatataaaggtaaggggatctgtggccttactacccacagattgttatatttttattttttttgtaacacaagtgattctcagtgcctcctgcttttgtggcttctcggaaacctaaattgttatgctgtctgaaaatatctcatgagcagttgggatgtatactaaagaaagatggcagttggatagttctttcagataactgagccttacattgatacgtttatcattcctttatgaatgttagctattaatggtctagcagctagcatttcaagtagattgaatccagtatcctgtagtaattttacttttataaaaatgtaataaatttcttttctttaatattatggtaaaatagggacctagtttatatcttctcgtatctgtaattccctgtatatatgggatctttttcagaagaatggcatggttttctctaattcagttttatatattgtactgtggattcttctgtaagtgaaaaattctaagagtagaccaaatatttgattaaaaatggcaaccaccttcagaatgcatattagatgagaggcactgagacataatccgttggcttaggtgggatggtgtaagagaggaagcatggtaaaatgataggaatgttggattatgatggaaaatacttccgtactagttctagcccagctactcactagcttcgtgacttttgataaagatcacggtttttggaacttcactctccccatttgtaaagtagagataatgatgtcttatgaagtaggcaagacagatttttatgaggatcataaaaatctcagtaagatgtgattaaagatctatttatgctaacaaaaggtgacatcattttaacaaaaggtactgagacttatttgaatcttgtcctgtggcaaagatgaaaaattcaagtgatatttatttatttatttattttcgagataggatctcaccctgtcagccaggctagagtacagtggcacaatcatggctcactgcagctttgacctcacagactcaaatgatcctcctgcctccatctcccaagtagctgggactacaggtgtgagacgccactccaggctaactttgaaaaaatttttgtagaaatggggtcctactatgttttttgggctggtctccaactcctggactcaagctatgctcctcccccagcctcccaaagtgctgggattataggtatgagccactgtccctaacctctttttagttttaatgattatttaaagcagtgattgtttaacaactttttttaatgtcaattccagtatctgctcattaaaaaattgagtcaagaaatatacagtgaagaaaccccttcagagtaaatagccttaaaataattcccgcccaccccaccctgagacggagtttcgctgtgtcacccagccagcctggagtgcaatggcgtgatctcagctcactgcaacctccgcctccctggattctagtgattctgctgcctcagcctcccaattagctgggattacgggcacatgccaccacgcctggctaacttttgtatttttggtagagatggggtttcaccatgttggccaggctggtctcgaactcctgacctctgcctgccttggccttccaaagtgctgggattacaggtgtgagccactgtgcctggcaataatttttaaggatgggaaaaggactctaaattccactatcctcatgtaattttatttcattctcacttttcagtctaaccattgcatggatttatttatttatttgtttatttatttatttatttatttattttttgaggcagagtctcgctccgttgcccaggctggtgtgcagtggtgcaatcttggctcattgcaacctctgcctcctgggttcaagcaattctcctgcctcagcctcctgagtagctgggattacaggtgcctgccaccacgtccagctgatatttgtatttttagtagagacagggtttcgtcatgttggccaggctggtcttgaactcctgacctcaggtgatcccacacctgcctcagcctcccaacgtgctgggattacaggtgtgagctactgtgcccagtccattccatatttttgaaacaattgtattcatctgaatgattaatgctagctattgtaacaaataccacaactcttagtggcttaccataatacatgtcttatactaagtccagtgtaggtgttctttatcaggttctgtcttggcagctgtcctttaagtgatgactcaggtatgcaggttccttctagtttgggctgctggtgtcctcaatacatggcctctggcatggccagagatagaaggattacttgtgggagatttttaaatggaaatggtccatatcaatttcattacattctattggccataaatcagttacattgtcctttttattttttattttatttatttatttttgagatggagtctcagtctgtttgcccaggctggagtgcagtggtgccatctcggttcactgcaacctccgcctcccacgttcaagcgattctcctgcctcagcctcccaagaaggtggcattacaggcatgcgccaccacacccagctaatttttgtattttttgtagagatggggtttcaccatgttggccaggctggtcttgagctactgacctcaagtgacctgcccatcttagtctcccaaaatgctgggattatagatgtgagccactgtgcttggcctgaattgtcctttttagatggaaaggggactgggaaatgcagtcttcctatgtgtccagaaagaaaatgaaacaatttggctactatttggtttaagggtttaagcatttttgtaggccttaaaacatttagtctactgctcactaattggttatatcactagcaatgtatgacagtgccagagtattttaaatttttgatgagtgtctatataatcagtcctggttaccttaacaaaacttctgtgttcttgccccagtgttacctctgataatagtaattaacaccagtacttagcgcattttgggaatttggaaaatgatagcaattattattagaattataataatcataatagtattttctaaaaagaatagtcatggggctggttgaagatcatgttaaaaaacttgtctagagatatgatgaaagcaaagtgccttttttgtttttgttttttctctcttccagctcagattatatcttgaatttaggagttgtcattgactgttttttgaagttatctcaatgagatatctcaatccaatcctcaacacagttagggaatagctggtgacagagcacggggaagtccggggtctggtgttgctgttgaatctggcactagctgtcaagcctcttgagggcatttactccctcttgcgggcttcagttaatttatcattaaaatgaagggattggtgatttctgagcattcctcccattccaaaatgtcatggttgagtgaagcctattcatgaactttgttgggctttacaaacttttaactaccataggaggagctgggaagccctttctttagtaattctagttagtgctgtcgtatcttgttggtcggacctattatgacaaacgtgaatatttgatgatcattgtttggtccttggtatagaacaaccatcataagagaccaattgactcttcttgatgaaccacccataccacctgtttagtggtaacatttcttagtgtcagaagacagttttttattggaagaatatccgaaatgctggtttctaagtttttcttttatttcagctaaatttacagcagatccaaagaagatatgtgtaaaatttaagaagagatgtgtgaaattttttgacttttgacattcttgtagtgcttttaggagattgtttacttatttccaatcaaatactagttattatatccccagagaacaaagccttgtgttaatggatggatagattctaaacttggttcttgttaaaattggaaatttttattttttattttttatttttttgagacggagtctcactctgtcgcccaggctggagtgcagtggcgcgattccagctcactgcaagctccgcctcctgggttcagaccattctcctgcctcaccctcccgagtagctgggactacaggcatccgccaccacgcccagctaattttttgtatttttagtagagacggggtttcactgtgtttgtttcaccgtgttagccaggatagtctcgatctcctgacctcgtgatccgcctgcctcggcctccaaaagtgctgagattacaggcgtgagccaccgtgcccggcccttaagtttgtttttcatagttattttcttacccatgaaatgtaaatgcctgccctctcctggaataccgactgtcttgaatacatcagaagatgaactctatattacttaatttggtgatcttacccaagtctcatagttttatttatttttatttattttttatgagacagagtctgactctgtcaaccaggctggagtgcagaatcacagctcactatagcctcaaccttttgggctcaggtgattctcccgcctcagcctcccgagtagctgggactataggcacacaccaccatgcctggctaattttttgttgttgtttgtagagccgagttttgccatgttgtctaggctggtcccaaacttctgggttcaagcaatccacctgccttggttcccaaagtgctgggattataggcagaagccaccaagcctgggtcaagtcttcaagttttaaatgtcacctgttgacctttcctctgaactcatacccctgtaatccagttgcctactctacagctccatttggggtctagtaggtaacttaaacttgatatgttcaaaactgagcttctgatgttccagctgtgatccatctcctgtattcttccttatatcagaaaatggcaactccatttccttggccaaaaacttggagttatcctggattgtcttctttctcttacatttcacatccagtctttcagcgtatacttttggctcttactatcaaaatatatccataacctaatcacttcttgctatcttcaaaccacagtcatcttttaactacattgttgaagtagacgtttaacaggtttgtctgctcatgcaactccgtcagtctgttctcaactgagatcctgttaaaatgaaagtcacatccctttatttctctcctcaaaaccctcccatggcttcccatctcattcacagaaaaggctaaaatccttatggtttcctagaaggcctttcatgatctggttcttggttacctctctgaactcattttctgctactcttccagctgtctgtgttccagctagctgaaattgtagctgttgcttgaatgcattggttttaactaacttaaagacctctgcatttgccatttgacttggatacttttccttcacttattcacgtgactagtgcttccaccttcttgcagatctttctttttcccccccccttttttttttgagatggagtctcgctctgttgcccaggctggagtgcagtggtgcagtctcagctcactgcagcctctacctcccaggttcaaacgattcgtctgccttagcctcccgaatagctaggactacaggtgtatgccaccacgcccagctaatttttgtagttttagtagagatggggattcaccatgttggccagtatggtcttgatctcttgacctcgtgatccacccgtcttggcttccctaagtgctgggattacaggcctgagccactgtactcagcctttttttttttttcctttcaattctgctccttctgaattgcaggtctttattccacatgtttctcagagaaagtctccttgatcactgactaacccttttataaattgtgattattctcctctgtcttctgtgctttatttttctctgtggtacttaagatcacttgacatactatatgtttaattatttgattattgtatgtctcttcccactagaatgtaaactctatgaaggcagagattttcaggtcacttttgcttattgctctgtccccaatatgcagaactgcagaaccatgcttgacacatactaggccttcaaatatttttgtctttttaatttaattttttaataggtaaaaaaaaatatatatgtgtatatatatataaagatacaaaggttcatattaaggcctccctttcaccagccttctgtcaccctagttttctaccccaccctgataaccactgttactcatttcttgtttgtctttcctgagattctttatgcaaatacaagtacaaatacaaatattcttattcctttctctcctcttttttacacaaagtgtaccatactatttatgtttctgtaccttgcatttttcacttactgtcttagggttttctccatattggttcatagacagcatccctgtattttgtttttttctgcatagttttgcattgaatagatacaccataatttatttactggctcctattggtggacacttaggttgttccagtcttttgctatacacacagtattgcattgaataactttataatacattgttttgtatgagtgacagtatattgatagggtaaatttcataaagtggaattactaggacaaagagaatgtgtacttgaagttttggtagatattgcgaaattgccctccgtgggagttgttttatgtgtgagtgcttttctccccacagcttcaaccaccaagcctatgcaaacttttgaatttttgccaccctgttaggtgaaaaataattttgcagtatagcttaagtttgtatttctcctattatgagtccacattcatagtaggagatagttttgctttgaatagatacaccatatctatgagtattaggatgaggcacttaagcatttgttgaatgaatggaatgctgcagaacagccaaaatatgccacttgaaacatactctgcaatctgtgattgctttgtttctttccgtcttagcatggctacatagagaaatatttatatttaatggtctttttcatgtagaagtaggtcttgaatgatatctttttgaaaatttaggctgggtgtggtggctcacgcctgtaatcccagcactttgggaggccgaggcgtgtggatcatttgaggtcaggagttcaagacgagcctggccaacatggcgaaacctcttctctactaaaaatacaaaaattagccgggcggtggtggtgtgcacctgcaatcccagctactcaggaggttggggctggagaatcacttgaacccgggaggcggaggttgcggtgagccgagatcacgccactgcactccagcctgggtgacagagtgagaccctgtctcaaaaaaaaaaaaagaaaatttccttgtatgattttactcacattgaatggaaaaaaactaaacaattttattaataaaattttattaattttgttttaaataattttaggttttgttttaagcaataaaacttaaacaataacaataaaaattataaaatattttaaatacattattttatttcagcctcgtaacaaccctattatattccaggtgtcattctcctttgaaagatgaagaaattgtgggccataaaggttaattgacctatccagggtcacaaagattgaggtagattgaggactggaactatttttttttaactctacattcactcatttttttatattgtgctataaattttattgataatattttagatgcaatagaatgctacacagtgtaggttcatgtttgtcatattagaaataacctcatactcagcaatttctttccaaattgtatggctcctttgttaaactctcttcatttacattggcatgttcattttgagggtctgctggagaaggcgaattgttttgtttgatttattcagccaggtaacaaagttttatttatttatttattttgagatggagttttgctctcgctcaggctgaagtgcaatgtgcaatctcagctcactgcaacctccaccttctgggttcaagtgattgtactgcctcagcctccccagtagctgggattacaggcacccaccaccacacctggctaatttttgtatttttagtagagacaggatttcaccatgttggccagactggtcttgaactgctgacttcaggtgatctgcccgcctcagcctcccaaagtgctgggattacaggcgtgagccaccacacccagcccccaagttaacaaagttttggaagaaggaatgataccactcatcttagagctagaaatatgtattgcaaaaactgtttaatttagacactttgcagattaagctaaggaattcgctttctcaaaagaaaaagggattatctttcttgtgtttttcactgacttaacagtaatatatactttaattcaaacaacacaagaatatatacagtattatgtaaaaataccctgtaataaaaaacaatagttttaaatcccttatgcttttgttttttgaaaaatgtatggtgcgtgtatgttaggatatatgtatatgtatacataaatacatacatttctaagtttgtattgtcagttaatggttggaataattggttaaccatttgaggataaaatgaaaagaacaatacttacggtttcatagtgttggagaaacagactttttcataagtggtattgtaaattagtataatatttgtatgtaacaatttggcaatatctatcaaagtcaaattgttctttgagcgtgcaatttcttttcttttcttttcttttttttttttagatggagtctcactctgtcacccaggctggagtgcagtagtgcaattctacccactgcagcctctgtctcctgggttcaagcaattctcctgcttcagcctcccaagtagcagggattacaagcatgtgccaccacacctaatttttgtatttttagtagagatggggtttcatcctgttggccataagagcagcatggagatgacttgggcaggataagcagagggaatattggaaggttttcaggagtgtctgaacttctgacacattttgattgcatctttgagttttgtgaccttttccaacatacatgaaggcttgtagagtcatgaaattttaatgcttaccaaggaccttcaattatctgttcaattctctaagttgtcttagagcaataatgagcccaggggaattaaagagacatagtgttagtgacagaggtagaagtaggacttaagtcacccggttgctagtgttttaaccaaaactgtcaaccagttaacctagattaaaacactagcaaccaggtaacctacatcagtattcactccacagtactgcaatgggtaatcattcgagatgtttgagaaaaacagagcggatggagtcagttgtgagggtggaagcggggaaggaagaaggttggagcttttaagggctcaaattagaattggaggaaaaaggagtcagtaaggtaataatcactaaagcaaatctgaaaggttttatccttctttactgaatttttttccctttaaaacactttcattgaatttttacttttttttttaacagataaagatatagagagaataaatcccttgaaaatattttaaatgttttactgcaacatatgttaaaaaaattagaggattaacagttggttaatgggcttattttctttcatatcacttattgttcttttttcttcttttccagaattttatagaagtgaagtgattaagaattccttggtaagtttgctttctgacgggtacatatgactaagtatatacacctgttttcagaaaatgcagaaatgtaaaataagttgaggttcagctctggttttatgatactttaacggatctgctcaattgttaaatcatcattgttttgttcattgctgtatctctagtgcttatgtagtaggtgcttgataaatatttactgaatgaaatgacaagttaatgggtgtagcacaccgacatggcacatgtatacgtatgtaacaaactggcacgttgtgtacatgtaccctaaaacttacagtataataataataaaataaaaaaagaaaaaaatatttactgaatgaactgatttttctgttaagaactttaaatgataaaaactcaaattctatagttttctcacttccatttcctataaataagtttctgattatttcactcgccatatgtcataataaatgatatctttgttcagatatagttcttaagaattttatgcctcgggcttttgtataggatactcctacttgtttcttggcagtggcattgctcagttggaaagttgtaaatatcctacttttgataatgtatacactggatatttgcataaatggctcaatttattaggctgtgttgaaaacaaagaagacctttctggtaatgaaaatatcttagtaatggtccagtaccatcttggatttggcccttgtctgcttttccacctcatctcctcctcttttccgcactcattgtgttccaggtgtacctctttcagtgcttcaaacacacaaagcttatcttgttccttatgtctagaacacttgtttcctcagctgttcgcttgactgaagaggtcttcaaggtctcagctatgtcacttcagcaagaccttctatggctatctcatctagagcagttctctttccccagtcatgctttttcatgaccctgttttattttctttaaagtgttcatcactgttggaaactcttgcttgcttacttgtttgtgtttatgaactgcctcccacctgctagaacataagttccatgaaagcacgggccctgccaatctcgctgctcctgttaccctggagtctagaatagtatagatgctcagtaactacttgttaaatgaataaagggttatcaatgatgtgttgtatttacatgttatcccattttgatccttagaacaacctgtaaagtagatggggcagatcttaggaagctggtacccagagagttccaacaacttttgcagagtcagaggactgcaggaccagaaccccaatctagaccttctgtctttgtctctactctttcctcttcatcaagctgtctttgaaatgtctctaaaatatcaatagatttggattctaggccagacagttccttgagtccatctctggggaggtcccatcaccagtaaagctctggttctacgtatattatatgatataaaataagtgcctagcatcatgcttgatgtataatagttactgagtaaatattagtttttcctcctctccttgctcaggtggaaacagaaatagtttgcagacagttaagagctaggagtgattatggggaagatagaacagaattttgtgttcatttattctgttctcttttccatagtcaaatgttggggatggttttttaatatccattgcttttcccccagatttgtgttataatagaccctatgtcataataatagaccctatgtcataatggcactttagtgtattgttctgcattattagtattggatttattagatcttcccttggctcccaaatccatatttctaaagatctctgaatgttaactcctatcttcaactccttttggcctccatcttcaattgctttggagctatctgtgaggtcatgataccttcatcctttgtgcacttaggtggaatattgtctccaaagaatactgtagaatggattcaagacaagggggaggattggactaaaacacttgtaggtccctttcaactcacagtttatactataattgttttccgaatgtacctcatacagtgtttgcttgcattgtgatttcatggacattctgtttcacaaagtagatcaaatctcctggaggtcacagactgtatgtctttatatccccttagttcctagtgtatttctattgggtagttgtttgacaaatattaattttttgatgttccttttaaaggtattctttgagattttggcaaggattctttttttttcttttatatcttaataaaggttctattaactttttttttttttttgagacagggtctctctatcacccaggctggagtgcagtagcatgatctcagctcactgcaacctccaccttgtgagctgaggcgatcctcttacctcagcctcccaaggagctgggactacaggcatgaaccaccatgcctgactaatttttgtattttttgtagagacagggtttcaccatgttacccaggctggcctggaactcctgacctcaagcaatccgcctaactcagcctcccaaagtgctgggattacaggcatgagccactgtgcccagcctaattaactctttctttctgagggagctcttttttcttagctttttgctaattcattgtgattggttcagattgatgggcattgggcagtacaggagtcaacaaccctcagagaatatgccagagatggcacgttgttactgcccttcttgctgcctctgaagaagcactgccaggtcaacagcagaattggttggtttctttcctgtttaggattttgcgatttttaagctattgtgatatttgctgaatagttagtcgtttaaatgcttttgtatttatttgttaccattgtgcttggcacacagaagacgctcagcaaatgtttcttgaataaatgaattcttccctaaggatatttattaacttcgaagttatatcctgaaactgcaaatcttcaattagatactaaaggattaggcaaagatttgaatactttatttctaattaaggctttgagtaaattttcactctggtgaactaagttggactttgataagcttgtaagtatctttttcactcatgtaactttgagatacagaatgttgttccttgtttatattctgagcttggttcttagaccagagtggcttggtttcatcactctgacgtcaaaggagacatggaaaaatggactcaagattaaaaagaggccgagtgtggtggcctacgcctgtaatcccagcactttgggaggctgaggcgggcggatcatctgaggtcagaagtttgagaccagcctgaccaacatggagaatccccatctctactaaaaatataaaattagctgggcgtggtggcacatgcctgtaatctcagctactcgggaggctgaggcaggagaattgcttgaacctgagaggcggaggttgcggtgagccgagatcgtgctgttgcactccagcctgggcaacaagagtgaaactccatctcaaaaaaaaaaaaaaaaaaaaaagataaaaaagagtgttttcccccaaatattagataaactgttcttatgcccttattctgtgcttctttctaactcttgaatactccagatcacctgtccaataaaactttctgcaatgatggtaatgttctacgtattgttcagtacagttgccactggccacatgtggccattgagcacttgaaatgtggttcagtcctactgcagaactgaattttaaattttgtttaattttaatttaaatagccacatgaggctagtagatatcatattagacagcacagttctagatgcttctgaaaagctttctttttttttttttgagatgttgtcttgctcttgtcgcccaggctggggtgcagtggcacgatctcggctcattttaacctccgcctcccgggttcaaatgattctcttgcttcagcctcctgagtagctgggactacaggtgcccgccagcatgcccggctaatttttgtatttttagtagagacaggatttcgccatgttggccaggctggtgttgaactcctgatctccggtgatctgcccacctcagcttcccaaagtgctgggattacaggcgtgagccaccacgcctggccagggcttataatcattaacaggaagaaatttcacctttttgtttttttaaaagtagtttggcccaggtgcagtggctcatgcctataatcttagcactttgggagaccaaggtgggcggattgcttgagcctaggagttcaagaccagcctgggcaacatggcaaaaccccatctctaccaaaaaatgcaaaaattacccgggaagttgaggcgagaggattgcttaagtctcagaggcggaggtttcagtcagccaagattgtgccactccagcttgggtgacagagtgagaccctgtctcaaaggaaaaacaaattacttcgagctgagcgtggtggctcacacctatatcccagtactttaggaggctgaggcaggaggatcatgtaagcccaggagcttgagatcagcctgggcaagatgacgagactcccatctctacaataaataaataaataaataaataaaataaaataaaataattagctgggcatggtggtgcatacgtgtagttccctgctagctgggaggctgaggcagggggatcccttgagcccaggaatttgagattgtggtgaactatgattgcaccactgcactccagcttgggcgacacagtgagaacccatctcaaaacaacagcaacagcaacaaaaactaaataaaaaactttgtgcttttttttttaataccactagtctcatttataaatccatataatagctttttgtatggttgtcttagcttctttggtatgtaataataaacttcagaaagcagggacctcatgtggttcatgttttaatctccatagtcattgtatcgtgatttgctttgacttggcaaacaaacaaaatatgtttagtatgtcatatatgtatgtatccaaatctaagtttctggctgtaagactcactgttattttacatttacaaaaaatagttaaacattctaattaaactgaacataaggcctgagcaatagtcttatgagttgtgattcaattttactaacctgttgttactttggagtttcttcaatccattccaagatatttagcagtctttccttttttcattatttgacttatgataaggaatcctattagcaataaaatatttacttccttaagtcctttaaagaggttggatgcagtcatttctccagtgacagatatttgcttctctaataccaaattcatgcctcattgctctgtttctgtgctttctgcctacacaaaatcttaatactttttattgaagtttggcatttatagaagagtttatagttcataagtatacagcatgatgaattatctcaaactgaatacacccatatatccagcatccagatcaacaaatagaatattttcagctcttaaaaagccctctcctcccctctccagtcgctgttactttcctgacttttaacaccataggttaattttacctgcttttgtatgaatgaaataatatcgtatgcactcttttgtgtccgattgccatgtttcaactttatgtagtaagattcatttattttttgggacgtatttgtggtttgtttgctctataatattccattatgtgaaatcacagaattgactcattttttctgtggataggcatttggttaggttctagttttgagctaacataaatagtgctgctataaacactctcctatatgtcttttggtaaatgtatggatgtatttctgttgagtatacatctaggagtggaattgctaggaatatgcatatggtcagctaaagctgccaaatagttttccaaaattattgtttgatttatactctcacccccagtctgcaagagttctgtttacatggttgtgaacacttgatttttaaaaaaccttttgaatttaaattgttaaatattacaaaattttttgtttcagtataaatcaagagaaatattttaaatggcaattaaacttagcagcacatgtagtgctaacattgtgcctaacttaatatcaaacacggctacttttaagggtgtgcgtgtagatacaatgacactggatgactgccacctggtggtcaaagattgtaggactttattgattttactatttctaaaatcagaattcatcttacaatgtgaaaaaatacgcacgttagaactggtgagtgggactatgttggatggtaataaatagaatggagtagactgaagcagaataagggagtacctgccaggggagattgcagtttttctgcagcagtcacatgggagatgtcacttgagcagacgcctgacagaagtgagggaacaagctatatagctatttcaggaatactgttacgggacaagaaacaggaaagtagaaagacaggagtgtacttgaggtgttcaagaaatggctaagaagttagtaaggctggagtgcagtgagcagaggtggtttgaggtgttgctaggcacataagacagagagacaggtgcaagagaattgaggatcaggacagcagagggaatggcctggagcaataggagatgatggtcaagggctaaggagcatgagaatgagattttggaaggcatagcattacaattaatgcaaaatggggcacatctggtggaccaggaccctcaccttatccatgatatatttagcatagaacaattcatggtgaatgtatagttcagtgttaaggtctctggcttcagctagctgtgccctccatatcatctcttcttgtgttcagggagaggttagatccttgatattattgaaaggtcattgggttaataagtaaaattattgaagcaataacaatataagtgactaaattctctgaagttggtttctcatgtttataaaagagattaattatattgcaaacccacatctgcctttaacagttacaaagttaatctactcattggttattttcccaaaaacaagttttaaacttttattagaatattaaaaatctcatggtgggagtatactgatagctaatttgtgtgtgttttgaaatgtctctgtacctggattttttaaatgaagaagaggtatcaattataagtacccacctatgattgaagtagcatgttggacatgtcatatacattatttctcatcctgataatagcattccaagctaagagatatgcttgttttacagctgaggaaccaggttcagcaggctgaggaacttgatctaggtcacaccgctaataactagtaaaaccagtgttccagagccctgctgttttgcagcctcccttatatcccacttccttccactgattaagtctgctagagggctaacagaggtcactgataggctttatcattgaataaacaatttctagagcatgcattttagggaaagcatgtggcataatttatcagaactataaagttctgttgagattgtgactgaggagctgtttttaaatctttgggaaaaaaactggctaaacagtacaaatactttttatgagttactggtctgagtgattctcaaaccaactttatgtttcagttgaattatgattgaatgaattaacattgagtgtgtgtgtgtgtagcttatgtcagattatgttactgtcttttaaactgcatcatcttcaaggttttccaacttctgtctgtttaactacatgatttgaagggagacagagataatcaacaaatcaacacatggaattatatgtagtaccagggaagaacaggatgccatgaaaacatgtaaaagtgttatttatgttagtttggagggagaagttaggaaaggtttctaacaattagtaatttctaaattgagataggaagtctgaataaaagtgaatgagacagggaaagagagtttattgtgttaatagtaatgataaaatcagtatgctattccagtgagatgtgttgtatggtttcagaaagttagaacacattttatgagttcttggttgtgttcttgtaaccatacatttgttatcaagcaacagtaataaataatggttttatgtcctcttgtgggtgtgtggtagacagtgaacttttcagagcttataaatatcctgatattctacttttcagtgaatgtggtggtacaggtccctggatgatattagtacttgattaatttgttccatgtagaaattgggcgggtatgtataggttaaatataaataaaaaaatcatctgggtctatatagtaaaaatagtaggctataaaatctttgaatgtgtggcaggctgtatctgcctgtatctgaatgtaccaacttaggaattattgctcattgtctggcaactgttttgtaatagtataaaggaaagtctttgtaatcagaagattgacaatagctctactgtatcagtgttgtattggcttagaaagaacacccaggtcatctattcaaccacatgaaataacttcaaaaaacttccctgtcctccagaggcatttgattttgaatgaagtatttaagaatatttgctacaacaacccccaagagtatctatccctcttccttgccatgcattatgccccttcagatacattcaccaagtgtcattttttcactttgaaaggaggtattattttctgctttttctgatactttatcactctaatagtaataggaaattatgctacttcatattttagtatatatttactcttattgaaaggtggtcttaaacaaaggggagtaaatgactaccttttagggtggtataatttgaagaccaggagggtttaggctttaggacatacatcaggaagagatgacttcatttgatttatttcagtggggcacctgttgttttttcccttgttggatctttaaaaaaaatagtttaattactttttattgagatattgtacacatctagtaaatgcacaaataatagccttatgacttttcaaaaggaactgatcaatgaaacacgatcatcttttgcttttctttgctttattttatttttttttttgatacggagtttcactcttgttgcccaggctggagtgcaatggcgcgatcccggctcactgcaacctccgcctccaaggtacaagcgattctcctgtctcagcctcccaagtagctcagattacaggcatgtgccaccatgcctggctatttttttatatttagtagagatggggtttcatcataacatgttagtcaggctggtcacgaaccccagacctcaggtgattcgcccacctcggcctcccaaagtgctgggattacaagcatgcgcccctgcgcccggcctatctcttgcttttcagtcactaccttttcccagagagaacctctcttctgacttctaacaccatagcttagttctgcctggttatgaacttttacatggcatatgccctttttttttttttttttttttgaggcagagtctcgctcttgttgcccaggctggagtgcaatggtgggatcttggctcactgcaacctctgcctcccaggttcaagtgattatcccacctcagcctcccaagtaggtgaagtgtgcaccaccataccaggctaatttttttttgtatttttagtagagacagggtttcaccatgttggccagattggtctcgaactcctgatctcaagtgatccgcccaccttggcctcccaaagtgctcggattacaggcacgagccaccgcgcccggactgcatctgctcttttgctcagcataatatttgtgagattcgttcatgttgtatatagtagttcactaattctaatgaacatatcctttgctgaacatatgtgtgcctttctctgaggtaggtacttagaagtggaattaagtgctgggttgtaggttatgttcagctttagtagatattgccaaataattttcccaagcatttgtaccagttacatcttaccagcagtgtgagatttttagttgctctatccttgcccaaacttggtattatctatctttcaagttttagccattctggtgggattatggtattatgttgtggttttagtttagtttaatatggtattatgatatttatgttgtggagcacttgttctggaaaatcataccagttaatgccaattaggaataaacaaatcccgaacaagtattggagtctttttaaaaaaattgatgggatatatttgatctaacttgatagttaacaagctctttttcatcttctttttgactgttcaaggataagtggagttggtggtctgttgaattccagtttagtaaaatattaccatttgagtttttcatatccatattaccttttaatggatttccttcctctcccctttcttaaataggggaagattattcaaccttttctcaacaagtcaaggttatcatgaggaacattaatgattatattatattcgaacttcaggggctgcctgggacataaggctccattattcttactttagacagtccccacaacatggccttcctcgtatacaaaagtgatctaatgctgcctttttttttttttttttagacggaggctcactctgtcgcccaggctagagtgcagtagtgcgatctcggctccctgcaacctctgcctcccaggttcaagcgattctcctgcctcagcctcctgagtagctgagatacaggcgcgccccaccacgcccggctaatttttgtattttttagtagaggtggggtttcaccatattggccaggctggtctcaatctcctgaccttgtgatctgcctgcctcagcctcccaaagtgctgggattacaggtgtgagccaccactcccggcctgctggcatgattttagagtcagtgtcagatattgactttgtcttcctgttccagatataaccaaccatatgacgttagacaagtgacttaataattcttagcatcagcttctcctgaaaaattgggatagtgctgtctgtttcacaggactcttgagtttcatgaagattaagtaagaatatatagtcaaattagtagtatagtacctggcacactgaacctttggtaatggtgctggatattgtagaggataaatacactagtagaaatccctgcctttgaggagctcacgttctggaggggaagacaggcaaaaaaatcagtgatggtgatgtgtcatgccaggtgccgtaagaaagttaaccactcacaggttcctatgggagcatagaggagcggcagccagccccatggacatcagtgaacacacagctttcattgttccccctttcttgtaataattataccagtagtaaaaatgagtaaaatggtttttattctctatttataaagcatgattcatattaggtgagaaagcgaatcactttttccaaatgaatcttaagctatgctttctggtcttggccttaaatttaatatttttgaccccaaagtgattaggtcttgttgcagcaaagtgccaggaatagttttttttttttaattctgcaaatatttgaatacttactttgtctccaggttactgtattatctacttgggaaaacaatagcaaaaaaagccccatcctcgcagtcggtggcaggcagagaaggctgacagttaaagagaattgggaaggcttctgaggaagagatgtttgaactgaaacctagtggtcagagaaacgttaaccaggaaaagaatgggtgggggtagaggcagggagggggtcccaccagaggctctcagcttcctcatttcagaacttgaggtggactaggcaaattcaaaggtcccttttattgctttcattcctagcatatgtaagctagaggaagccctcattttgtctctttctatgttgtacgcagcttgcttgtttgtcctgtagttcatgttaaattaaatccggtatagtgctcagcatgtagtaaatggctcacaaatgattgccattactcatgtaaggtagagttggtgaagggtactcagttccaggggagcaggcacatcctcaggctgcaggctagaaggcttttccccagcattcctagctacagttttctcagcgtcctcggtggacagttgggtgaaccagtgaagggccagttccttcttagctaatctgtaatgaatgcttcattcttgtagtagtggtctaggctttgctattatgtttagtcgtttgttttgtctcagctctagtcagctgtagagtctggtgatggagcagcaagagcaagtgtgagacctgtggagtctccccagttctttctctcagagaatagggcataggcagagggcagagttctttcttccttttctgcctctggctgtgagatataaaataaggaaattgttgacattctctttagcccgcctttgttctaaattctgtcttttgtaatttggtagaaagagaaaaaaaaaacaacaacacacacacacaaaatgaacatgagacaaattctagagaactagattcaaattctgatactgtttttactaagtgaccttaggcaagaagactcagtttctgtgttttattgatttttaatttttcacaatttaacattcctgcacaatctagatgcatcttaaaaccagttctttttggttgtatatacaattatgatgcattttatgattggtgatgtcttggatttgatgaaatatggtatttcgtcttaactattagaattaacaaattgtcttatttacttcatgtggatttattgttaggattaacaaggcttattcagcagattaaatatttgtatgtgctagaataagcattctctatgccctttttatctattattaatactttatatagtgactgtcactagtaagtattaaaatagtagctattgctgtaattagttttttattactattctgttcaagcttcataaaaaccctgtgaggtgatagttttataactgaagattctgagacacagggaattatgcagttcaacaacgtggcttcattatagcactttcctctctaccactctgcctgtcagctctcttcatttttcagaggaaaggctgaagctacgtgattctttaaagccattccacaagccagtggttctgtttgggtgacggtctgctgctgttcccaagcccatccacgtttctagtgattactcctatgtctgcatagcttagtggtcacccagtgattcgtgactttatgcttagatacctcaagccagtaacttctgccagtggattgtgaattttgtccagttttactgttgctttttgggggaaaaatttgctgagctactcattttatcatgtcagacatcataccccttctttagatttactcttataggtaccatttatttgctattcattcattcttgcagcaaaaatgttctgagttcactttgcctaaagtgcatcctttaggattttctttagtgagcatatgttagtgtcacactcccaagtttttttgtctgaaaatgtattcattttactctgatttgtgaagagtattttcattgggtggatttcttggttgtcagttacttggttttatgtgttctgatatggttttatttatcttgcttaggacctgttacgtatttaaacctgtgaattagtttttttttttttttaatcagtctaggaaattgctacttatctctttaaataattccttgcctccttccttaatccattttctctctctggactgcttgctaaatgcgtatcagatctttttactctgtcatccatgtttttaaaccttttttttttttttcatattggtctttttatctctgctgcattctgtgtaatttcttcttccaaggaaggttctcctctcatctgtcatggcaactttccctacagacatctgtgtgtagggatttggtggatttagtttagtttcacttatgctgtttaggggtatagcccttttgtggtcctcagtgtggagagggacattttttagtcatggatgggacctgggcctggctcttgaattatgtccttgcttcctttaagaatgccaaaactggccacgtgcagtggcttacccctgtaatcctagcactttgggacgctgaggtgggagcattgcttgagcccatgacttagagaccagtgtgggcaacatggtgagaccctgtctctaccccaaaaagaaaaaaagaaaaagaatgtgaaaaccaaagccccggctttgtatagatccgtcatggcttcacgacaaagacctctagatctccacttacctctctgggttctttcttccttggtttggaaattctttgatgttaatggtgattattattattatttaaaaaatattttacctgacattttagttgttttcagtgagaggattgtctcatcagtcattatcagaaatggatggctcccttccattcacccattcacccttgggccatatagtcttttatatttacccacatgtttacaattgccagtgctctccattcttttgcctagatccaagtctatatccagtgttgtttccctttagcctgaagaactttgtaagcatttcttgtagtgtggatcagcatagttactcccagaccttattgttgtcttcacatttaattgaaactctgcccctatttagcagggctgctaaaacagttatagtgagatacagactggaggtcatttaagagtggaattctgttgatcttagactgaaattcttgcatggctagcatttagtttttatacaatccagtataaaactgactgcataaatgtgtgtgctaggttatcatcatgttatttgtggtagtatttcagtgtcctctcccaccttacactttggtcaggaaaaaaaaaaaaaactgccacaaagccaagaacagttagttacccttatctgaagaccctttgatttactgatttacataatatgaaaattggtaataggttgattttgtttacattcagcagtgaaagcccttatgttttttttttattttttattttttatttttatttttattgatcattcttgggtgtttctcacagagggggatttggcagggtcatgggacaatagtggagggaaggtcagcagataaacaagtgaacaaaggtctctggttttcctaggcagaggaccctgcggccttccgcagtgtttgtgtccctgggtacttgagattagggagtggtgatgactcttaacgagcatgctgccttcaagcatctgtttaacaaagcacatcttgcaccgcccttaatccatttaaccctgagtggacacagcacatgtttcagagagcacagggttggggggtaaggtcacagatcaacaggatcccaagacagaagaatttttcttagtacagaacaaaatcaaaagtctcccatgtctacttctttccacacagacacggcaaccatctgatttctcaatcttttccccacctttccccgctttctattccacaaaaccgccattgtcatcatggcccgttctcaatgagctgttgggcacacctcccagacggggtggtggctgggcagaggggctcctcacttcccagtaggggcggccgggcagaggtgcccctcacctcccggacggggggtgacccccccacctccctcccggacggggcggctggctgggcggggggtgaccccccccacctccctcccggacggggtggctggccgggcggggggctgaccccccccacctccctcccgtacgggtcggctggccgggcggggggctgacccccccacctccctcccggacggagcggctggccaggcagaggggctcctcacttcccagtaggggcggctgggcagaggcgcccctcacctcctggacggggcggctggccgggcggggggctgacccccccacttccctcccggacggagcggctggccaggcagaggggctcctcacttcccagtaggggcggctgggcagaggcgcccctcacctcccggacggggcggctggccgggcggggggctgacccccccacctccctcccggacggggcggctggcctggcggggggctgacccccccacctccctcctggacggggcggctggcctggtgggggctgacccccacctccctcccagacggggcggctgccgggcggagacgctcctcacttcccagacggggtggctgccgggcggaggggctcctcacttctccagacggggcggctgccgggcggaggggctcctcacttctcagatggggcggttgccgggcggagggtctcctcccttctcagatggggcggctgggcagagacgctcctcacctcccagacggggtcacggccgggcagaggcgctccttacatcccagacggggcggcggggcaaaggtgctccccacatctcagacgatgggcggccgggcagagacgctcctcacttcgtagatgggatggtggccgggaagaggcgctcctcacttcctagatgggatggcggccgggcagagacgctcctcactttccagactgggcagccaggcagaggggctcctcacatcccagacgatgggcggccaggcagagacgctcctcacttcctagacggggtggcggccgggcagaggctgcactctgggcactttgggaggccaaggctggcggctgggaggtggaggttgtagcgagccgagatcacgccactgcactccagcctgggcaccattgagcactgagtgaaccagacaccgtctgcaatcccggcacctccggaggccgaggctggcggatcactcgcggttaggagctggagaccagcccggctaacacagggaaacccagtctccaccaaaaaaatatgaaaaccagtcaggcgtggcggcgcgcgcctgcaatcgcaggcactcggcaggctgaggcaggagaatcaggcagggaggttgcagtgagccgagatggcagcagtacagtccagcttcagctcggcatcagagggagaccatggaaagagagagagagagagaccgtggggagacgggacagggacagggacagggagggggagggggagggagagggagagggagagggagacccccttatgtttaatgtaggggaaataagcaaaagtagttgatgtattacattgtagttcattcctttgatgttatgaaagctccttaacattttcacttttcagagagggtttcgactccctggacggttctcttaatgagaaataatgttctttcagagcataaagctgaccttgttattttcaacttgaaaacatttcaatggccccactgttgtacagagtaaagtattccctcctagcaaaaggcataaaagatccttcagttcagttccttgtgtgtctgtccagctttgtgtcctgccacttttgtattgtgtgctccagcagtagtcctgagtgccctgaccacaccttggcattttacacctctgagcccttttcatattgtgttcctctttgcctgaaattacttattttaatctggtgaaagcccacttatctgttaaaagccaggtttcacagcctttgtgatgtcttcccctgttcatcagtttatttttcctttctcttctgctgtgtagccttatgcataattctgttattgaactttgcacaaaacagtgtaattatttaaatggaggtttgaatccaacagtaagttggagcctctttgagggcattgtttatgtgttggctgttaataatcacgtattaagtgtcgaataaatgaatgaattaccgtatgaaaccatgtaagtgagtgataggaatatacgcttcttctaatgactataataagtaagcagagaaattcaaaagtaccattatcaccccttttgtgttaattgtaatgtcttcttggcttacttaagtttgcaatttaatgtatttatgaggtcttttggttttgaaaaacaaaatgatttgtcacctaattgaaataatcgtaaacaaatagagttgtcctaaagcgtgttttcattttcatgagcagaatcccacgtggcgaagtctcgattttggaattatgccagaccgtcttgatacatctgtgtcttgtttcgtggtgaagatatggggtggaaaggagaacatctaccagctgttgattgaatggaaagtctgtttggatgggctgaaatacttgggtcagcaggtaatttttagactgtagtttcaagtagttgtcatctccaaattaacgtgtctaacctttctgttgattcttctgattctgcgtttcctattataaagagagacttttatgactgtttacttatatcactaagagagaccttgatgatcatttacatatgttattatttacttatattacttacattgttatgtttgaatcattgcctagtttaacaaacacctttgtctgaagaaatttatgaagatggatttgtgtgtgtgtttaggaaagaatgtgctttctcatagcattttgctttttctgtcttactggatgtcctcacctagaatctgaaaattaagttgaaataaggaatatcacgttaaatacctctcttttgaccagtagcgttattccaggaataagaagagctactatttattgagcacaggatgacacctgcttggattatttgctgccactggttctccatctctgctgtacccatgactgatgtagctagtagattacagttctctttttttttgagacgaagtttcactcttgttgcccagactggagtgcaatggcgcgcaatctcggctcaccacagcctccgcctcccaagttcaagcgattctcctgcctcagcctcacaagtagctgggattacaggcatgtgccaccatgcccagctaattttttgtattttagtagagacagggtttctccatgttggccaggctggtctcgaactcctgagctcaggtaatacacccgcctcggcctcccaaagtgctgggattacaggtgtgagccactgtgcctggcctctacagttctcttttaactgggctcaaaagtagctccataatattttctttcttcctttcttttatttacttctttttttttttttttttttttttttttaaattaaagacagggtcttgccctggtgcctaggctggagtgcagtggtgtgatcatagctcactgtagcctcaaactcctgggttcaagtgatcctttccgcctcagcctcaatccctcaatacctcctgcctcagcaagtagctgggactacaggcaggcgccatcatgcccagctaatttttatttttatttttgtagagatgggtgtaaacatgtgagacaggtctcagttaatttagaaagtttattttgccaagataggatgtgcctgtcacaccgccccagaaagacgtgcccaaggtggttggggcacagcttggttttatacattttaaggaaacatgagacatcaatcaatacatgtaagaagtacattggttcagtctggaaaggcaggacaacttgaaacaaaagcaggaagactcgaagcagggagggagcttccaggttacagacaggtgatacacaaacggttgcattcttctgagtttctgattagccattccaaaggcggcaaatcagatatgcatctatctcagtgagcagaggggtgactttgaatagaatgggaggaagggcccccaagcagtttccagcttgagttttccttaatgattttgggggcccaagatgttttcctttcacattgggttttgctatgttgccctggctggttgtgaacccctaggctcaagcagtcctcctgccttggcctcccgaagaactgggattacaggcatgagccatggcaccaggccttcagaatcctttctaacagtgttccaggacaaaactaggaatctgttagaattgtaaatgaaatgaaacctatttgctatcatcagatatagattattataattaatatttatagcaaccttgtgaagtttgatattattgcccttattttccagatgaaaaaaattgagcctcagaaactttaggaaatgattcaagatcacacagctggagctaagatttaaattcaggcctggctgatttaaaaattcattctctttgtcctatactgcactggtatatacatgtggtccttggtaaccccccaccccaccttggaatgaatctcatttctattttgtgatgcctatggtactactattaaaggtaaccataaaatattagtcatagattatctataaacatcttgatgctttcttcatatttattcaatataatactttctgagatgtttcttattaaagaaacaacttaattctgcattttttcaggttaaaaatctgaaaatctgggccaggtgtggtggctcatgcctgtaaccttgggagcagtttgggaggctgaggcgggaggatcacttgaagccaggagtttgataccagcctggccaacatggcaaaccctgtctctactaaaaatacaaaaattaactgggcacagcggcatgtgcctgtaatcccagctactcaggaggctgaggtgggagaattgcttgaaccggggaggtggaggttgtaatgaaccgagatggcgccactgcactccagcctgggtgacagagtgagactctatctcaaaaaaaaaaaaaaattttttttgaaaatctaaaaaaaactaaaaatctctgtgctcattttgcttaccatactttttatttttaaattttttacctgtagtcaccatgctgtagtctcgtgaacttattcctcctatttaactgaaattttgtatcctttgaccagcatcttcccaagcctcctcccctccacgcagctcctgctaaccaccattctactctctacttctatgagttcaacttttttagattccacggacaagtgagatcatgcttttaacatattttttttattttgtgtcctatagtgaccagaacagtgcatataatatatatgttctttaaactacattctaaactacaatttaaacattttttaaaaaatcttaatttttttctctgttttagggattatcttaattaaaacttagaaaataatgacttttggtttaggccagggcctttgttttcttttttgctaccaggtacttgttgcctttagactgaccaaccagatccctgcactggggtatatatcccatctatcttcccacataccatacttggctctctttggatagactctgatattaagtacttgtttctcttctacttgaaagtatctatatttcatggaggatggtgcttcttaacgttctggttgcagggctctaggcctgaagggcttttttggctagtgaagatgggtttcatcatgtttttcaagtcacactttccttcggtggtggtcttgttgccatacccagctgagcttatatctaaccagccctactttcagagagttggcattcaggtgtcttcatataaagtcagttatgctggagtaacagagaacaaaaaaaaaaaaagaaaagaaaaaaaaaaaagaaaaaacatgtttcttaaagccagatagaaacttaagatcattgtagaaagtcaaaacttatctataaaatagctataacaagtaacatactgctaaaaataagattaaatagagttataaagttttggaggaacatgaggctaagatgttttaggataatagccagaatcagttaggttcattgatagatcatatactttctaccaggcattgttctttgtgttaaggatccagagatttgtaggacaaggttcttagacccggtgtactgatgattgatgaataccttcatagagagctgtgagagtcgtacggggaagagatatttagaccagcttgtatagaatcagggaggaatgacttctgaataaagtattttttttaagttaggtttattgaggtacaatttacatgtcataaaatccaccctttttaaagtgtgcaattcaatgaatttgaaaaaccgatagagttgagtaaccaccaccataataaataaagctactatgaatatttaaatataggtctttgtgtttcttttgggtaaatctccaggaatggaattgatgggtctaatggtaaatgtatgttgaaatttataagaaactgccagttttccaaagtgactataacatcctgcattcccatcagcaatgtataatagttctgtttgtttcacatctttgctatcacttgtgattgccagtctttttaaattttgaggtggtatctcattgtagttttaatttgaattttcctaatgacaaaattaaattgagccttgtaagcaaaaagtctatttgagatcagtctctctctctctctctctctctctctttctctctctctctctgtgtgaagtgttcagatcttttgctcatttttaattgggttgtttgaattattgagttgtaaagttctttatgtattctggatataaatcagtcctttataagatatgtattttccaatattttctgccagtttgtggcttgtcttttcattttttaatgttggtgaagtccactatgtcagtttttgctgttgtgttacatgctttttgtgtcttatctttgcctaacccaaggtcacaaagactttttcctttgttttcttttgtaagttttcttctagaagttttatagttttaggttttacatttacatcaatgatccattttgaattttctatataaagtgcaaggttcattgttttgcagatggatgaacaattgttcctgtactctttgttgcaaaggctattatttctccattgaattaccttgtcatctttgttgaaaatcagtagttgagaatcatttgtgtggttctgtttcattgatctgtatttctgtcttaatgccaataccaaattgtcttgattactgtagttttaaaatgtgtctagaattcagtcaatgagttcttcaactttgttcttttttcaaaaaatttctggctattctaggtctttggcctttccatatacactttagaacagtttgtccatttctataaaaatcctgggattttgatagatgttgaatctaagaaaatttggggagaattaacttcttaatagtattgagtctttcagtctatagatatgtctctccatttataaaaattttcttgtagttttcagcatacagatcttgcacatattttgttagatttatacctatagatttttatgctaatttaaatggtatttcttttttaatatttctgttttcaattttttttgctagtatatgtagaaatatatatctctgtactgagcttgtattctacacccttgctaaactcaaaaatcaaatctggtacttttttttggtagatttcttttgtagattgcttacatgggtcatgtatcatcctaacttgcgtgttatggaagaaattcttgtgcttagtttaagtggttagaactttgtattaataacaacaacaattgtatacctcttcagtgtttgggtatctttttacatacatacaatgacctgaagctttttgaagatcatgtgaacaagtattgttttcttcctcagtatttaagaaaacagaagctcagaaagattcagtgatttgccaaagatcgcgcagtgtttggtggatttaggccattagttgtttcattgctcagactgtatgtattattcatttcactaatcctagcagctgtcttaaaaagtatgctgtttttcgtaaagatatcaaaatacgaggttgtggttaagttctaagttctatagtttccatattaggattctaatacaattattgttaggccattaacctataattgataagtaaaggatagtacacattacgcttattagcataatttagcagttcggaaatgtgcacagtagtgtgcaatatgatacagccagttttgttaagcatatttattagtcaggaacaaagggatctttctgagttttatggttgccttattcctaatacattattagattttttaatcaatgttttttacatctaatttccaaaaatactttcatatcttattatctcaccgtttttatgacactcatgcaaggtagggcaggaaatgttttctggtttttggctgatgaaggaattaaagtatataccattaacattgataaactactatatgttggatagagtaggggtaccagggctgtaaaacaagtcagagttcccttctctgaagagttccttaagaaacagttaaagttggaattagaactcaggttacttactttttaaccccgtatcttttcaagtactagtactatattgtttcttatttttcaacaaactattttaatgcacgtcttcatgaagtttacactttgagaactttaccttcatgttagatttgtttctccccatactctcccatccctttctttaagtgtatatttttattttcttctaattttgtttgtggacaatttggaaaatttagaaaagcacagaaaagagaataaaaaattacacgtaattcttctgcccagctgtaaccattgttaacattttggtgaatataattttaatctttttttccccaggtatatatgtgtaaaaatgttttatgtttattaaatttcaggatccttctaatcttgagactgctttcataatgttttctcttttccaaggtgaaaaactccttgagattgatttatagtttttattttaaacttatgattgcagacttatcttttggtattgtattcagttcagtaaatgatgtggataaacagggagtatgtgattaattttgctttggtgatagaggtaggagatacagaagtcagggaagtgttcacaggaatcttctgctgctggctttgactattttccatctctaggtagagaaaggagagattctgttctggtagtccctcttgtctttcccccacttgaactttcacttaaaaccttcacggcagaagaattttttttttttttgccacaactctttctgatgaagtaactaaagctatttatatatttcatagttggacactttatactacttcgagttttttttttaatctgagttccttaattttgttttttttttttgagacggagtctcgctctgtcgcccaggctggagtgcagtggcgtgatctcggctcactgcaagctccgcctcccgggttcaaacaattctcctgcctcactcagcctccctagtagctggaattacagatgtgcactgccacgcccagctaatttctttttctttctttctttttttttgagacaaggtcttgcttggtcgcccaggctggagtgcagcggcgtgctctcggctcactgcaacttccgcctcccgggtacaagcgattctcctgcctcagcctcccgagtagctgggattacaggcgcccgccaccatgcccggctaaattttgtgtttttagtaggcacggggtttcaccatgttggccaggctggtcacaaactgctgacctcaagtgatccgccgccttggcctcccgaagtgctgggattacaggcttgaaccagcgtgcctggcgcaggtttttttttttttttttgagacggagtctcgctctgtctcccaggctggagtgcagtggcacaatctcggctctctgcaagctctgcctcccgggttcatgccattctcctgcctcagcctcccgagtagctgggactgcaggcgcccgctaccacgcccagctaattttttgtatttttagtagagacggggtttcaccgtgttacccaggatggtctcgatctcctgacctcgtgatccacccgccttggcctcccaaagtgctgggattataggcatgagccactgcgccgggccccaagttttgtatttttagtagagacggggtttcgccatgttggccaggctggtctcgaatttctcacctcaagtgatccgcccgcttcggcctcccaaagtgctgggattacaggctaccggtgtctggcctcagttccttaatttttaaagttttattcttccaccttttaaatgaagtttaatttgggatgcaatgactgcagctcacctcatctgaaatagagtggtttgcagacaataatagaagagagtggtttgcagacagtaataaaagagagtggtttgcagacatttaagactttagggattggatactattgcttttttaaaaattgcctttttgaaaatagaatatattaatcttttatgtttttctagggcttcattttttttcttatttttaagacgaggttgtgctccctcacccatgctggagtgcagtggtgtgatcatggctcactgaagccttgaccactcaggctccggcagtcctcccaccacagcctcccgagtagctgggaccacaggcgtgcaccatcatgcccggctaatattttttattgttattgttatttgtagagaagaggtcttgctatgttgcccaggctggtcttgaactcctgagcttaagctatctgcccatctctgcctcccaaagtgctgggaatataggcgtgagctactgtgccaggcctaggcttcatgttaaaaaaaaatacttttagaattaataaattgtgttttctttggggttagagagggtagaatatgcctctgaataccctattgttcaggaatagccattccataacaacctcaagaaatgtttgtgaaagatatgtgagtgatggtgcctgtgattgcatgtgatagttttgcaaggcctttgactaaagcaggaaatgctgaattgatcacctggtcttttgaatagtgattggttttctgctagtatgtttagatgtagtcagccggtttctcagtattgaagtagatcctgttgtaactgtcattctctggttgtattaaaacatgatcggaataaaaataacaaatactgtattttcctcctctcttagattcatgcccgaaaccaaaatgaaataatttttgggctgaatgatggatactatggtgctccatttgaacataaggtaagaagatccttctaatgttatgaattttgtttagtgcaggtgtgccttgcaggtgtacagggtagatataatcctgaaaactctgtgtaaatagaatcatgctttaaatttgttgcttagtgtggcttaaggtggatgctttttaatgggaaaactcattctgtaaggcacataaccatccagtccatcttttctaaatccagattatattaatttttctacaggaaatctggagctagctgttttctcttattctacataactctttgggggttaagaaaggatggtgaattttgattaaatgcaatacagttttatgaaatgtttcagatatcttttataactttcaatacatttaagaaactatgaatcggttgttttatagtcagcattatctctacatctaaaagttattagagaaaggaaagggaagcgaattcacatttaccaagtacctactatctatggtactgtgccaggtgattcttgtccttttcctcacttaatactagccaaaaccaatgtggtttgttttgtcctctccattttatagttaaggaaaaaagttgtttgagatgagcttcgtaggttcacccatctagaaagtagctgagctgaaatttcaggttgcctgcctctaaagcctgtgctttttctattctactatggtgttctacccaacaaccctgtgcattatttgctcttagtgatcatgttgcttcatagctcttggttgtctgaaatgctgttgcttagagtacttcatttattcaacaacattttattgagcgcctgctgtatgtcagccactgtactgtactccaagtgctaagaacacagtggtgagcaaatggataatttcctgctgttgtggagtatatatgcaagaggcaaacactgatacagtaatctaacagataaacatgtaaacacaaatggtggtaaatgctatataagcatataatgagggcctaacctattctaagggctcaagaaaggtcttcttggggacttgacttttaaagctacactccagatgatgaatagaagtgaactgtgtaaagggagtagggagtaggggctgaatagagagagcatttcagccagaggaggttaacatgttggaaggccatgaaatagaagggaacatgatgagttttagggactaaaggaaggtcagagtgatgaggggggagtgatacccgatggggctggagagctaggcaggggccacagcacgcagaacttttaaaggattttaccctaagaacaggggtctttgtgaaaggagttttagcacagcagtgtgattatcagatttgcgtttcagtaatttcattctggctgcagtagagactgattgtagaagaggcaagaatatttgtgggagaccagtaaggaggatcttacagtataccagataacagatgtattactttgaaacagggtgacagtagaatagagagaagatagatttaagaaagttttagtagataaaatcattaggacttgctgatgatttgaatttaaggcataagaaaaaggaggtgtcatggatgacttttgggtttctggcttagatgaagtaactggatggataaaggtgtcaggcactgagaaaactaagtgacactggaggaaaaccaggtttggtggaggcagattgtgagttgcgatttgatcctgtggagtttgagatgcctttgagacattcatgtgtagatggaagtaggcctttggatctatgagtctgaagttcagaggagaggactaggttagaaatatttatgtggggccaatgacaaacagtcattggagtcataagtggtgataagatggactaggaacaggcagtactgtaggaagaaagggggctaggtacccaagcctggaagacctccagtttttaaagtccacatagggggcaccagaaaagatgactgaaaagaagtggcccaagggaaagagagcaaagttttgtgtagaatctcaaagtccagagaaagaaagggttttgttgttgttgttgttgttgttattgttgtttgtctttttgcttgtttttttaagaggagagagtgatcaaataggaggaccaaaaattgcccattggatttagcaaaatggaagttattcaagtgacttcttcaaaattcaattcaaactctgatagacatttttctttctttatttcaaagctctcctcttctaagttcctatatcaacatactatgtatacctttgacataggatataccactttgcaactaggcttgtctttcttcctttctagcctgtaagcttttgaaggacagatttctataaataatattgaattcccagcacctgccacagtttttggggtatgcagtttgcttagtaaaagtgtttgtgatttaatgaaataattatgggattgctactgctgctgttcataatatctcatgtacagggttagctgttctaatactgttgcaacattaagttcctcctgcaactggtataactcaccttttaggacaatatctggcacatataataataatattaatagctaaaatgtattgagcattactgtatatcaaacactgtaagagcttcacatctattattgtatttaataccccaagaaccttatagccaaatcctcagagctgttgagattttgagtaagccaataactaatactcctttcttctcctgagtttggagcaagttcagatataggtgatagtctgtaatcccagtggattttgggaggctgagctgggaggatcagcagttcgagagctcagcagttcgagaccagtctgggcaacgtagcaagaccttgtctgtactaaaattcaaacaaaaaattagccaggtgtggtgacacgtgtctgtagtcccaccaacttgaggggctgaggcgggaggattgcttgagaccaggaggttgatggtgcagtgaaccctgatggcgccacttcactgggcaatggacgagaccctgtctcagggaggggaaagaaaaaaaaaggataggtgatagataaatgtagatcagaacattggctttattactaataaaactgatggacaaatgtgatttaaattatgtgactaaaagagtttgctgtgactaaaagggcttgtcgattccttctatatacttcctcttggactgaacctcccccacaaaataacaaaacaagtgaaaccaaggtcttcctcttataggaacaaagcctgagcctccaagccagaagcaaagtttgtatgcgtggttagacaggttgtttctgattggagagaacctggaaagaattaagccagtcacacacaggtccatctctgaagcccagccatcagatcagtcatctgctggtcctggagaggagtgagtggaggacacagagaaactgcagatgctcctttcatgaccttttctcctgagaaatggagtggggcatttgtctcctgtgtgggaacatgggaatgcagagtaagtgtttccctctaacgggaataatagctagtatttagtgagcacttctatgctggcactattctaaacactttacacattttaccttatttaaacctcacacttggcctttcatagaagaggaagttggcacagagaacttaagtaactttccccaaattacgcagctccctgagtagcagagctgcgattcaaaagcagatggtcagtacatgcttattgaatatatgatcgtaattagtggtgtactttcccctattgtccttcagttagtgagctttgttaattggataagttcagcagatcttgccccctttaccagctttcaaatgaacacctgacatgtagactgaaccttaaaaaaccttgtcttttttaacaaagccgcaagcagagtttccagtcaagatgacattgtaagtgtacactttgagaccttcctcagcaccaagcaagaagcaaggattgatgaaatcggagaaatgtaaaagaaatattcctggccgggtgctgtgactcacgcctgtaatctcagcactttgggaggccgaggcaggtggatcacaaggtcaggcattcaagaccagcctagccaacgtggcgaaaccccatctctactaaaaacacaaaaattagccaggcatagtggcgggtgcctgtaatcccagctactctgaggctgaggcaggagaactgcttgaacccaggaggtggaggttgcagtgagccgagatcgcaccactgcaccccagcctggaggccagagcaagactccgtctcaaaaaaaaaaagaaaaaaagaagaattattccttcctaaaacaaacaagaaaccaaggcaataaacatctcccaaacagaagtggaatagaaacacaaagaagtgggaagaagcagaagacttgggccttctggccactctgcccagaagtaggcagaaagatgggctcttcagggtaaaatgagcactaaatgagcacgaaaagctgagtggggctctccctattaaaaaaagggccgagaaaagacagcttagagaaactgcagaactttaagaataatcctaaaaggggaaatttgaaaagctaccagcgagaaaggaaatattactcacaaattaggctgacagcagacttctcatcagcagcagtagatgccagaagaaataggtcttcaatgcgctgttaattattaattgtttctagtaaactttcagtcaagagtgagggtaatttgagaccagctagggtaacataatgaaatactatctctaccaaaaaaaaaaaaaaaaaaaaaaaaaaattagccaggcatggtacatggctgtagtccaagctacttgggaggctgaggtgggaggattgtttgagccaggaatttgaggctgcagtgagctgtgatcgcaccattgcactctagcctatgtgacagaaaaaaaaaaaaagcgagggtgagagagcattttattgattgagacagagtctcactctgttgcccagtcccacctctgagtagcagggattataggtgtgaaccactgcacctgtcagggatagttttaaatgcataaagattgagagtttactacccacagaccctttacccatgctgaatgatgcacatagaagatgataccaaagggagcatatagtgtataagaaaacagcaaggggtatacaaatggttaaaacattagtgaatttaatttctgactgtaagctaacaaacaaaaataaatatctgataaacctatgtgttttaaggtgaaagaagctaggccattgttattcaaaatgtagtctggaccgctgcttgtctaggaactgtctgtcacaatctgtggtgagcaacgtggaaaaagtgagggtaaaagtttcaaaacttctatagcaatttgacgttattgtgactcttcattgtattttacaaaagtatcagttcacaatggaatgaagaaaaaaaaaactccagccaactggtctttccccacagagagtgaaaagcattgccctagacaacaataatgagagtgggtgttcaaagggttaagactcattgagatcactgatttgtttgggaggaggatagagatagtaaccaactttagaatttgctagaaaaaattttggtcaagtgtacatgttaaaaatttaaggatacctagtaaaggctaaaatcagagggctgagtgtgttggctcacacctgtaatcccagcactttggtctcaaacccctgatcccaagtgatccgtcctcctcagcctcccaaagtgtggggattacaggctgaggcaccctgcccagactgtataatcctagcactttgggaagctgaggtgggaggatcgcttgaagccaggagtttgagaccagcctgggcaacaaagtgagactcccgtctctaccaaaaaaaaaaaaaaaaaaaagatggaaagcagagattatagatttctaattagcagaggaaaaaagggaataaagtatagaaagctttgtcaacttggtaggtaacagaaaaggaaacaaaagataaaaagaaacatgtagtgtgggggtagcattatgtccaaatatatttgtaatcacaataattataaatggatatcatatagttttgaagtatttcgtttaaaactttaaaaatgctgaagcaacaaggctttgagaacaggattaaattttaagaatgagtgttttatacagaagaggaaaagttacccttaggaagcaatgacagagcacattttaaagcagctttcaataatgcctaaaatttttgttgaccagttctttggcattcttcttttttacattagctgtgaccagaaacagttttattattattgctgatgattttgttgatgttaatactccctctgtctacattatcttaatatgtcttcaggcactatggatctaaaagctgaaattacttatctgttcataacttttccctctttgtttatctgcttctcccaaaggctttacatctttctgttgagtttttaggaaccaaaatctcttaactatagaatacaatggctaagtagttcattttcacttccaggagtgtgttggacactacctaatacactgaaaaatttttcattaaaataaatactggattttaatcctttgttcagtaacctcttctggcattgttagggagtgatatattctggttaagcgtatgtagcaaaatggtctttatttggcatacaaatgtggcactctgtttttttttttttaaaggaaaaaaaaatagagatgaggtctcactgtgttgcccaggatggtcttgaacttctgggctcaaatgatcctcctaccttggcctcccgaagtgttgggattacaggcgtgagccaccacacctggccagatactgcaatcttaagtatttaatagcaattcagacaaaagagaagttgaataagtgatgatgcaaatttttgtcttagttgtaaaagtgattcatgattttttttcctggcaaaaaatgtcaagcgcctactacaagcctattattaaactaggtactgtgggatacaaaagtataagacatggattcaaaatttattttctttgttgaggagataagacagtatatattccagaagacatgcagtttacaaatgagtttagtttgaaaaattgtttttggtgtcatttgtttgcatcttgcagataatgcaggtaagttatagcagaaccttaaataatttgaagagcacttcaggaagaggttttaatgtttggtgactattgggaagcaaagaggagctttgttataccttgaagttggtgtggaggttggtgaataaggctgggtgacctttagagatttctacaggggttttctaggtgggtttaaccgctatgatggtgattaggggaggatgataaataaaaagctgttgagtcagtaagctggaaatctttcagatccctattcaggattttgcctttaatgtatacaggtaagattatctttgcctttatttcattttggtgaccactcgtcttttgtgggactgctgacagctgctttttatgaatgcacagtcctagtcgttaggaatatggatattggagtcagattgatataagtttaattataggcactcctgacaactattactccagtaaatggaaacttctactcactaggctctaaatcctatgataagaggaattacatctctaatgcttaccattgtattaacactatatctctagcacagtgcctggtatgtagtaggctctcagtaaaactttgttagtgaatgaaggtgaatgcttgctgtgtttagggctatcacagcaatcattgagaataaaaatcttgagtagatgatatttgttccaccctgggttacctccagcctcaacttttggtatttatttttatgtaactcatattggcataattactccaacttttgtgctattgataaggtgcaaaagcattagaccagttgttataaggctggagtgaaattacttatagacaaatctctaaagattaaagagctgtgaaggtaagtatatagatacatagagatacaagtaagaatttcatttttctgactagaagctacagcggtaatatctttagagtccagtagatggcaatactttctcactttaatggaaaaaattagagcaggcatagaatccaagtcaaaaggagcaaatctttgtggatgaaagaaacccaagatattgaaatagcaatttggtgatgaatttcacaaaaataaccatataacttgatcgtctcgagtacataggctgagattgaagatttaggtataaaaagtttcaggatctgttttgaaagcctgaacaaatgaaaactccttattttatatttttcaatttgttctggtactgtgttgcttagcaaatcacttaacttctctcagttttaggttcctcatctcaaaagtaagaaaatcctaattagctggataacaccgcagggaatattagttatctagcccaacactcttattttgtagatggaaaaactgacgttcagggggctcatgatttattgaacttgacatggcaagttagctctatgctacagatgataacttagacatagctataatttattttatttattattattatttttgagatggcatctcattctgtcacccaggctggagtgcagtggcatgatctcggctcactgcaacctctgcctcccaggttcaatcggttacctgcttcagcctcccgagtagctgggattataggcatccgccaccacacccagctaatttttgtatttttagtagagatggggtttcaccatgttgtccaggctggtctcgaactcctgacctcaagtgatctgcccacctcggcttcccaaagtgctgggattacaggcatgagctaccagctgctataatttatttatctctatatatctatatacttaccttcatagctctttaatttttttttttttttttttggacaagtctcgttctgtcacccaggctggagtgcagtggcgcgatctcggctcactgcaagctccgcctcctgggttcaagcaattctctctctcagcctcccgagtggctgggattacaggggcctgccaccacgcccggctaatttttttgtgtttttagtagagatggggtttcagcatcttgtccaggctggtcttgaactcctgacctcgtgatccacccgcctcggcctcccaaagtgctgggattacaggcgtgagccactgcgcctggcccatagctctttaatctttagagttttgtctgtaattcatttattccagccttataacaaccttagaggaaggtagggccaatttatcattatttgcttaaaagaaattgagtcacagaggggcaaagtgacttcctttcattccgtgacttaatcatttctgtacaatgaattgcccctttctctttgctcctgaagcccttttgacatacctctgttagtagctcttgagtttattgtagttttttgaattgtctatctctctctctttctagaaggtacaaactgtattttaactttgtaataccaggctcagtagcaggcatctaataggtatatagtaagtacttatggaataaaaatgaatggccaagatgttaggatgagttgtggcagaacctggatcagaacacatctctccctctttatagacgtgcactttcttcgttatactacgtcacctgtgaagaggtgatgtgatagaagattttcatcatttaatttttgtttgaggtttcttccatcatttaatttcactgtgattatatactgttagcgacatctcctttaacttatagcgtcttaggggggcaagtagtagtattttcattttcaggatgaagatgctgaaacccagagaagttaagagatttccatgtagttaactttgtagaactgagaaattaaataggtggttatttcctcttgctagtcatactaatggatactaacttgtttccaaagcacgtcccaaacagtacgcaagcagaacatcattcagaagtagggattaactgtcccaagtaaagccaatattttaataacaaagagctggatatggtgtatttctgcccaggtcttttagtacattatcaaggaaaagttggaaaaaaaatcatttaaaaagtccattcctatgcatattctgtttggttttcctttcccctgccttacaaaatagaacaaagaaagactgggaaaatcctcagggactgtttataatagctgcttgctttattataaagcatctagagatctgaacccagattaaatccagggtaaaattttatttctgaactatttgagctggtgtgattgtgtactaacagtattatactaggtaagtatagagcttttatttattttatttttaaatatttcttccatttctcttctcaggaatacagagctttaaaaaaactaccattgccagttttcatttactgagtgcctgctatgagacactatgtcagaaaggttatgtatttttatttaatttgtgtataacagccccatgaggtagttctcctgcttttatgagtgaagtaccttagaagaaggcattaaactactgccccaagcaagatggcataggtggtgaatagcagatccatgattcgagcccaggtctcattcatttgaaggcttgttttcttaaccgctatgctgtatgacatctccacatttcttcccacttcatatagtgtgacagcgtaccaagtctctgccttcacattaaccagcacaaagcataactagttgtgcattgtgggaatcaaatgagagagaacacgtgcaaacactttgaacagtatcaaagtgctttattctacagactttgtgcatttattattgtagagtgggcatgcaatgcccatgagaccatcaacccactgaagtccacaaaagttccacacattagtcactgtatttggcttccctctgagtcttttttcccccttttctcttggattgaattagcttttgacaggtgtttggaaaatcatcttatcctgtaattcatatttataaaccctgctgctgcagtgtggtccccattctctctcttcattgaagccagagaataatctgggaaaatgccacgtttcctgttatgaatttggaggatcttgtcttcttagcacaatttttgagcttttgagaacttttaatactgtaaaattcaaagccaagtatggttctttatatagatgttttagattcttgagaagtaaacagaaacagagttcgacttgttctcaccaggggattcagagagtttaaaattttgttttgtttaatattttgaaaacttgttttcaccattcttttttagatttgtatagagggcatttttgagcctcctcaccccatcctgtaagttaatttctgtttcaactgttgtacaaagctgggaatcttccctcattctctttttttctctctccacgaatgctagttaacatgctgtcactgttgccttctcttctttctctctgctttcaccgttatagtaatttggccatacatcctttcttcctattagggtgtatgctcctttagggctgaggttatgccttactcagctttaaagtctcagactttgcttactgaatatttttccatgagtgaatgaagtctactaggatcacgttgttcccatctctgttttaaggtagactttttgcttaagggacggctacttcagcagggttactttcagtcctcatgtcatggagtagcattgaaggcacttagtccacttcatacttggagtgtgtgcctgtgattgtgattattttctgagaatatttgaagtatgaacaaaaacatcttcatctctgttgatttaaatttaaaataattaattttaatttcaggatctgtatatctttgcttaatgacactattcttatttctcagtgcttctcactgttttaaaggagaggaaaaacatcctctgttgtctcaaacactgggccaaatctgaggggatgtactcattcagctcaggttaattgtctaagaagaggtctcacctttcctccttaactactcagtatctgggcttcgtcagatctcagagccaggggtgtctaaggcttgatgatgcttaacagagatacgtacacagttttattcggcttaaacttggctgatgcctagaagtgttattaatgtccaaatgaacatatacacctaggaacacaggctgtctactgattcattaggtagctgtagtcatacaaacaaacactgtatttttaaaaaagtatactcattgcatctgaaaatgtgctcaagtagtaggatgagccattgtttttttttcccttgcccatcaagatttcttattttacctaggttaagtagaagacgactattttcaaagctcacttatggttttatgaataaatatagaacactggcaagtcctgctggggagagatttcctcccagataaacacctccagtctagatttccatgtatctaaacatgtgtcaaatttgcctggatgtttcagagatacatatgctctccatagcccaaactgagctcagttcccttcccctctcacaacacttcctcctgctgtgtttcttagtgaagtgaatggtaccacaatccatctactttctcaagtcagaacatagagttgtcctgagtcccttcttctgtgtttccatcactactgatggtggctgctacttttttcctggttcttgacattatagtcagatttatttttctaaaatgatcatattcttcctttattcaaatcttgtcagcagtgtttgccctcaataattaatgacttatgaggtcttgctattccttatttctaaacactccatccttaacactttctcaggctaagatttgttcacgtcagttttagctaaggcctcatttctataggaaggtttttctgtgatatacctcttaagtccagtgtggatagatcccttttatatgcttccgtagcaccttgtattacatttccctcttcactgacccttatcctattatattctgattgcccgtttgcttacctctcttacctgctacactgtaaactgtgtgagggcaaggacagtgtctgttttcacctgttgatccctagtgcttagcactgtgtctggcatgtaataataatccagtacattcttgtcaaatgagtgaatgaagcttctgtagcagcagatcattagaaattctattggaatacaccacttggttgtcatcagtagtatagctcagcagtccccaacctttttggcaccagggatcggttttgtggaagacaagtttttccagggacgggagtggggacggtttcaggatgaaactgttccacctcagatgatcaggcattagttagattttcataaggaacgcacaacctagatcccttgcatgtatagtttacagtagggttcgagctcccatgaaaatctaatgcccacgctgatctgacaggagggggagctcaggtggtgatgcttgccctgggggttgggaacccctgatatagcttgttactcaaaattgtaattctctgtcttagtggtttctgacatttctgcatagatgcctgccaaattattatactttaaatggagctcttcattttttctctccaaggttgctttctcttccagttttccatgtctttattaactattttttcatttatcctggcctcaaattttatagttaagtgttgattttttttaattttatccattctattcagtcagccactagactcttttgagttcttctttgaagtagttctggtatctgtggctacttttccctctccattgacataatccaagctcagatcaacattcccaaagggctgggtcactgcagtagtttcctggcggacctatagactctagtctctttgtatccactctgtcttactgctgcctgattaatcttgctaaaggatgctttcgttttttattcctttgcttaaagattgtatggagtaaattcttattgtctgctagatgtgtccaactctctggtctgattgctttctctccatcagcccaaattcagtcagttgtatagtactttgggttctgtctccgctttttatctctcttcttccttctcctcctcctccccaccttcctcctcctcctctctctttttctgtttctgttgttttttattaccattgccactgatggattttgaaccctcattatgtctaatatgtatggatttttatagtagcctcctatcgggtagttggacagtcttcctccaatttatgaggtttgttaataccagagtaaccttccttaaatgtagctctgattataaccctaaactgttagaaaccttccatgagttcttactgcccataggttgtctttacattttagcatggtattcaagacttgctgtgttctggccctccttacttacttattcagctgtatctcccactacttccctctccagggatccaaataatttccacgtcactgaagctaaacgaattggactactatttaattttctctgaatgcagcttgtgttttcctgctgtcatgctttggctaaaggtgttcagtctgtgtgggactttccttcactgccattcagcttttcagtactacttaatccatcccaaatactgccacccctgcagtctttgatgttcctgctctaccagatggaatctttactgcagcagaactcctgtagctttttaaaaagcctttcttatggcactcttgcattatttgattcacttggaaccttcactgggttgtgttctctatgaggacagtagtaataattgcctaacaccatctatgtactcggtgttcagtaaacactgaaaggaataagtatatgtataatgctatttgcttcctaatcagttatcctactaactgcgttatttctgtatacattttgtagttttaatgaagttaaggacagtcttgtgttgttgcagctaaaaactctcaaaatatatagtaacatgttttaaaacgtgactcatccaatgaactagtacagggataagcaaactgtagtccagcacatatttttgtatagcttgcgactaagaatgattttacatttttaaagaattttaaagaaaaaataagactatgtgacagaaatgacatgtggcctgcaaagcctaaaacatttactatgtggccctttatggaaaaagtttgctgaccactcatctagaaatacacctgacttgcctggaattactcctgctcattggatatgttaaattatctatttccctgagcagtttaataggcactcacccagacttgttactattctgttccttgaagaattgttaggcctgacttcagaagaattttgagtgacatgtaaatctcttctgggctctttggcacttggcagtatctcacacagataaccagatacaaatgagccgtttctttccattataatccttcatcagaagtctgttgggatcgaacatctggtgaagttagatgtcattcagaacaaggctcttagcatatttcaagaatgttaattgctaagtgatggctgaaacaggagggcttaataatgtccttaaattgccttaaatgtacatggactcagaatttttagaattggaaaaggtcctagagatcatcaagtatagcctggttcttaagaacacgggctgtggagccagactgcatggctcttctctttaatcctctttgtgtctcagtttccacacctttaaagtggggatattaatagcacctgtttcacaggggtttgtgagtattaaatgtgttaacatttaacatattaacagctaacgttgacatgtaaaatacaatactgcctgccacactgtaaatgcatgtaaacattactttttatattgctgttattttttattactgtttttattagtagtagttgcatctcattttataattaaagaaactgaggcctaggagagttaaattattttccttacttatgcgataggcagagtagattaaaacccaggattctagctttcagttgaatgttctttccctgttataaagtgtggcttttagttgtatgtcggtgggtgtggataaattttttatagtaagaaaaaatatttggcagctttttccgtaaaataagaaaagctaagtagaacatcattaattatttctcctgagaatcttaaatctacttctcaagtcttctattatttggattttgttgctgatttataagactgtctcctctgtcctttttctcctcatctcctcttaaaatgtattgattatttcttagcatccattttttaaaattgaagtgaaattaatgtaacataaattaactgttttgaagtgtgcaattcagtggctctgggtacattcacagtgttgtgtaccaccatctctgtcaagttgcaaaacattttcataatccccaaattaaactttgtacctatgaagtgctcactttctattttgctgtcctccaaacccctggcaaacaccagtttgttttccatctctatggatttacctattttgggtatttcatacaaattgaattatgtagtatgtgaccttttgttctggcttttttcacttagtgtaatgttttggtgttgcatctacatgtaggaaggaatgtacttcattcctttttagggctgagtaatattctattgcatgtgtacacacacagagacacacacacacacattttgtttattcatgtctgttgatagacatttgtgttgtttctctttttttgactgttgtgaatagtgctgctgtgaacatttgtgtacaactgtttgtttgagtccctgttttcagtcttttgggtatgtacctaggagtgaaattgctgggtcatattataattctatgattacctttttgaggaactgctaaacttttttttttttaccgtggctgaccaatacattcctaatagcaatatgtgagggttctcatttctccacatcctcactatcttctgtttgtttgttatgctatttgtatgtctttatttggagaaatgtctcttgcagttctttgcccattttaaaattgagttgtctttttgctgttgaatgtatgagttctttatatcatctggaaattagacctctgtcagatatacaatttgtaaatattttctcccattctgttgggttctttttctacttaattgatagtgtcctttgatgcacaaaagtttttgattttaatgaagtataatttactgatttttttgtactaatgctttttatatcatatctaagaatagattggtaaatccaaggttatataaacccctgtgttttcttctaatagttctataggttttttttagctttatagtgggtttttttgtttgtttgtttgtttggagatagagtctcactctgttgcccaggctggagtgcagtggcgtgatctcagctcacttcaatctctgcctcctgggttcaagtgattctcctgcctccagcctcccgagtagctgggattacaagcgcgtgccatcatgcctggctaatttttgtatttttaggaggtaccaggttttaccatgttagctaggctggtctcgaactcctgacctcaagtgatctgcccacctcagcctctcaaagtgctgggattacaggcgcgagccaccgtgcctggccagctttatggttttacagttaagtctttgattcattttgaggtaatttaaaaatatggtattaaggacaggtccaacttcattcttttaaaagtggctatccagtttttttagcaccatttgatgaaaagacttatttccccattgagtagtctatgaacctttgctgaaaatcagttgatcatagatgcatcgatttatttctggattctcagttctattttgttgatttatatgtctgtccttatgccagtgctatcctgttttgactattgttgcttggtattaagttgaaattgggatatgcgaatcttctaactttgttctcttcaatataattttggctattgaccccttgcaattccatatgaatttgagaactggcttgtccatttctgtaaacaaggctgctggaattttgatagagatggcattgaatatcttatctagattgctttgggtattgttcctatgttgataatattaagtctttatatccgtgaacatgggatgccattttatttattttggtccagtttggaatacactttatttttcttgcctaattgttctggctagaacttagagtacaaatgttgagtagaagtggtgaaagcaatcaccttgtctttcttgtttttgatattgggggaagattttgagtctttcaccattgagtatggtgttagctgtgggttttttgtagatgccctttatcaggtctgggaaattcctttctattcctagtttgtgattttttttttttttaaatcatggaaaggtgctgaattttgtcaaatgcattttctgcatcaactgagatgactgtgtgtgttgtggtgtattacactgatccttccttccttctttctataatttctctttttgacagagtcttgctctgtcacttaggctggaatgcagtggcacaatcatggctcactgtaccctcaaactcctgggctcaagtgatcctcccacctcagcctcctgagtagccgggactgcaggcatgcatcaccatgcccagccaatttctttattaaaacaattttttttttttttagaaatggtgtctcactgtattgtccaggctggtctctaactcctgggctctagtgatcctcctgcctgtgcctcccaaagtgctggtattacaggtgcctagcctgattgattttcatgtatcgaaattcccttgcataccgtgtatgaatttcagctgttcatggtgtataatctttaaaaaattttttttgtggtaaattacaaatacacaaaatttactatcttaaccattctaagtatacagtttagtggcattaggtacattcacactgttgtgcaaccattgccaccatccatgtatttcatcttgcaaaacttttcaccttacaaaactgaaactctttattaaacaataattcctcattctcccctatcccctggtccctgccagttaccgttcgactttctgtttctatgattttgactactctaggtacctcatatgaatgaatgaatgaatgtttttcctttgattggcttatttcacttaatataatgtcctcaagcttcatcaatgttttagcgtgtgtcagaatttccttcctttttaatggtgaataatatttccttgtatgaatataccatgttttgtttatccatcatctgtctgtggacacttgggttgcttccaccccttggctattgtaaataatgctgctatgaatatggatatacaaatggcacttcccattcttgctttcacttttttggggtacatacccagaaatagttgccaggttgtgggctgtaattcttttaatatgccactagatcacttttagtagtattttgttgaagatttttatatctgtattcataaaggatattggtctatagttttcttgtgacattttgtctggctttggtatcaggatagtattggtctcatagaataacttaagaagtatttccttgcttttatgttttttgaagactttgagaaggattggcattaaataattggtcaaattcaccagtcaaataatctggttctgggcttttttttttttttttttttttttttgggggagttttgtgattacaaattctatctacctctttatctgttataggtctgttcagattttctgtttcttcttgagtcatttttggtagtttctgtttcttcttgagtcattttggtagagtcattttggtagtttggtagtttatatcattttgtctacattatctgatttgctggaatacaattaattgttcactgtattcttttataagccttcttatttctgtaagattggtaataacgttcccacttctttcctgattttagtgatttgagtcttctttcctttccctttggttagtttaccttaagatttgtcaatgagccaggtgcagtggctcatgcctgtaatcccagcactttgggaggccaaggtaggaggatagcttgagtccagaagttaaagagcagccttggcaacatagtaagacacccttctctataaaaaattaaaattagctgggcgtggtggtgcatgcctgtaatcccagctaattgggaggctgaggtgggagggtctcacgaacccaggagttcaaagtcagtctgggcaacatggagaaaccccatctctacaaaaaaaatacaaaaattaactgggtatggtgttgcatgcctgtaattccagctattcaggtggctgaggcaggaggatcgcttcagcccaggaggttgagactgcagtgaactgtgatcatgctactactctccagcctgggtaacagaatcagaacttgtttaaaaaaaaaaaagatttgtcaatgttgatctttttaaaaaacaagcttctctagtttgaattaatatcaacttagttttaatgctgtaaaaagctttgcttctgtatagctctattcccctacctttgtgtcattgttttcacagattgcatctttataatggtgtgcccatcaagatagatttataaagattgtttcatgtatttgtctagttgattgttttttaaatggtagatcaactagacattcttaggctacatccagttaataatatgtcttttttaatctttataatgtattgctggttcaatttgctgatatttcgctaaggatttttgtgtttcttttcgtgagggatattggtgtataatttcctttgtgtgtgtgtgttgtctctgtctagttttggcatcagtaatgctagttttataagttggaaattgttcccttctccgctttctgaaggagtttgtgtaaagtggatattctttctttcttaaatgtttgatgaaattcatcagtaagaccatttggacaggatttgtgtgtgtgtgggaagattttcaattgcttattcactaaaaaagtagatatgggactatttagatgtttcatagtatgtctgtttgggcacttttgtgtttcttttcaaggaacttgtctaattaagttgtcacagttattagcataaagttgttaataatattctcctaatatcctttaaatgtctgtagtgatataacttttaatgatactactagcattatagcgaacatgtatgtggtgcttattaaatacctttcattttacagatattaacttttaattcccgcattttgtgaggcagttactattatcatctccatattacagatgaagaaaccaaggttaaactaagagcactctggttccttgcttaagattatatagctgttgtattgaaggcttgaattggactcctggtgggtccagagtctttttttctaaattactgtgtactctccccaccccccacttttttttttttaagaaacatgactatttattcctttttatcttttttttttttttttgacagtgtcttgctctttcactcaggctggagtgcagtggtgtgaccgccagattggttcaccttgccctctgcctggacagagccaatttatcaagacaggggaattgcaatagggaaagagtaattcatgtagagccagctatgcaggagactggagttttatcattactgaactcagtctcctctgcctttcttaaatgacagagatacctattctgttcttcttctggaattgtcctgtattctttttagaaagtatccttgctactttgtaccacagagtagaaatatttgtttctggtgttcctagtcagaacttggaatgcccttttccccataaaaacattacatatgatggctaggcatagttgaaatattattgttaatactctttttgagtcacataatatgttaaaatgacttctggagcttccttgggaggttcaccacaatttataatgtgaaacattgtttccgtgggaaactgtgagaagaaatgtattttatttttttgacctaacaccgaatttatcactttttaaaaacaagatattttcaacaaaagtgaagaaataagaaacaaatccagtgttcatgcattcccaaactgcagccttgattccaggatacctccttctctcaaaccgagctggcttcctgggaatccagtggtggtacatggatcgagggttcctttgtgctgcattttttactgcctctctcctgagttgtcgggatagattctgcaggctcttgtgctagcccaaaggtgcccagccttgactccacttccgtgtctttgatcctgggtgggcacgtttcctgggtccctgtgctctcagaagctttctcaggcacctctccttggtgctgttgccccaggtgatgttcagccatcatctggagctctctcgttgtgggtgtgatccttgtcatcttctgtcactgtggagacattaccaaagtgggtcgaggatccgtgttcatctttctctggggatgactggtcagcacaagggtggcagcgttgggcgacatgtccaaatctgctctgccccctcggggtctgggggctgttgtcttcctccatggctggggcggcacctgctgggctggcactgtggtgggagggaaggccgcgggactcagggctgggctgggcgcgctccttctccactcttgtcagatccccctgccaaaatttattttacattccctcacctgaaaggttaggcttctattacatggcagatatactttactttttggaatctctaaaattttagatttactcagttgttaatatgtcatatttttaaaaagacaagcatgattaatttgtgcatatattttattttgtttggttttgattaatttgttggttaatgtctttcagggttattcaaatgctcagaagactattcttctgcaggtggatcagaactgtgttcgcaattcttacgatgtcttctctttgctacggtaagaaacttcttagattgccctgaattctaaagaatctttctcattttgagtttgtgacatttcaatgtgagaaaattaacggaagctttagaggctgttattcaagcttagcattttttagtgcaagcgtcataaattttgtagctacagtgatttaaatttatctattttacaaagtctttggaaagccatttcctttctctggacagtgggagagaatatttggaagccagtgatctgaaaacagacatgaactgttttctggtcttctgtaccctacagaacagtaatcaaagttgcaaaagttagacttatcaaagtcttaacaactgcggcatcactcggaaagcccttcaacggccccaaacatggctttgagtttggacctgttctttgtcttaaaagaattatgtttggcaagccaaaaaagctttgcatgtatctaatgctcagaggcttaaaggcctcagctctatattttcataatgtctgggcttaattttgaaagattttaaaatctggctttaattttaaatgtgatagatcatcaaggatatttttccagggagcaagccaccaaaataaatgcaattccaaataaagttaacagcaacactcaaccaatgttcaccctactcagacagattgttcattgaaatttgattttgacagtattttctaatgtttacgtgacacataatacatttcagaacattagacatcctttatatatgtacttgaggaagaatccagaaggatgctcggagaactggttattttagaaactttacaaaattggcctttcgtttgtgaaacttgaatcttattacacatgatatagagtttggtcacatggactgtgtccattaatcttaagaaacatgattttgactaaagtaaccatatacattttctgagttttggttcttgcttgagagatgcctacaccttgactgcttaggatatgtagcagaacacacaggatttagaaattagagggtggagattgtagtaaacatattttaatgcctgttcagtttgagacacacaaagttttaagttttgaaaagaagaaagttcagaaattatttgaaatatgagtaagccactaatatttcttgatctcagttttccttagtaagtaaaatgaggcgtagggtacaattattttaaagatatgttctaaatgtgagattgtgtgaccttattagagaaaacagtagaattaaaagaaaaaatactaagtcaggaagaagaggatttgggatagtgcagtatcatagatgctgaaagaggatagtttccaggagtagcgaacactgtgataatgtaggagagcaggaactgaagaaagactgttggatcttgtgaagcagtgtggtatcatggaggatgctttgattaatcctaccctgcctttatctttgatttatcctaattcatttaacctctgatgcttctaaaaagtggaagcagtgatgtaacaaatttgtgtaatttacaagcattttcacattttttatcttattctcttagaagtccttcatgcatcagggatgatagatagcccttgtcttgattgtagaagctgaggccaagaggcattaaatgttttatctatctgagggcacacagcaagtaagagccagactggaggatgctttgacggttttctgacaatgtttttgtagatccttttaatagtctcaccttcctaaactggtggttacaaggcacacatggcataatgactgtggacattctttagaaaacacaatgccctacataaatgcaaagtcatcaggctaatttagtagttgctcagttattgaacattgatcttgcaatgatttggctcttggggagttcatatctagagtatttttcagactcttcagatgtgtcagtaatttgaactgccttattaacagtggtctcctcatgcctattgtacaattcatgcctagctaataacacagatatacttttcctaaaccagatcacgtgactatttatcaaccaaatttactgaacccagggagttgttctggaattggaaactttaaattgcacttattaaagttgatgagtcagatgggactttggtgatagttctctcagacattagtaaagagtacccatcatctgctctattaaatgatcctcttttcccatagtgtttgccatgatatatgtgaagtgctttctaggaaacttaattgtgtgcctattgaattaaactctagttcgtggtttcctctctaacattgtccttggctggagtcattttaaaaaatatatcttttcttttcctgatgctttcttggtttataaaattgctgttacttgatctgtaattttgtgtgaaaacacacagtctaaattctttaatgccacttaactctataaaattctgcatgctgtttagagtcatgtttagaaccctggtctcctgattctgttttttttgagacagagtttcgctctgtcacccaggttggagtgcagcggcccgaccttggctcacttctgccttcatctcccaggttcaagtgattctcctgcctcagcctcccgagtagctgggattacaggcatgcgccaccatacccagctaatttttgtatttttagtagagacggggtttcaccatgttggtcaggctggtcttgaactcctgacctcaaatgatccacctgccttggcctcccaaagtgctgggattacaggcgtgagccactgtgcctggccccgattctgttttttgagagtatattctagttaattaattttcactgtactgttgggccactaggatacatctgttctctctcctttttgtgtgggagtgtcacagaaaaatgggcactcttgactaaggcaaggactttggagcacctaaaaccaggtgctccttcatgctgggtgtggtggctcatgcctgtaatcccagcactttgagaggccaaggcaggcggattgcctgaggtcaggagtttgagaccagcctggtcaacatggtgaaacctcatctctactaaaaatacaaaaattaaccaggcatggtgacacatgcctgtagtcccagctgctcgggaggctgaggcaggagattagtttgaacctgggaggcggaggttgcagtgagccaagattgtgccactgcactccagcctgggtgacagagtaggactccactgcagagagaaaaaaaaaagaaaaaagctccttcagatggatgggttgtattgttttatagaaaaacaatgacctgagaccttattcaggtgctttgacccatagttaagaatttaggctaatttcagtgttgccaaagattagcagttctttccaaatttacatttaatgtgggatagtaattgaactattccttcttaactcttggaaatctctggattaagcatttgttttcaggtaaaagtagacatttaattaatagccagtttacttgttgttgtatttcatattttagggtgctcaccacaaggtgtcaatgttattccttaactagcatttgaaattttatttattttacaattttgggttgagaaaagtacgggactaaaatggaatataaagcaatgttgtaaattataaataagcattcagttttaggagttaactaaaaaaatctcttagtatgattccttctaggttaaggaatacaggcttagtagatagctttctaataggcttattaggtacctttctccttttggttctgtttttttaaagtcctattgatagggaattattgaaagattataaagagaggaggagtaaatgacatagtcaggtttgcaatttagaattctaaccatggtgtcagtgtggagtggacctgagggatgagcctggaagcaatgatttctgtctaatcatttcttaatgtgtctaatcatatctaatctgttctctgactgagagattatttttagtgttaactcattttttggttgttttttcttttatactttttcaaagagataactctgttatagtaagaaaagtaataattctggtttttttctagtatagttttcattgtttttttccccttcttcttcagaaatatcctgcttttgccagtttaataagtggaagtatggtggaaaataaagggctttggtccttcacctaaattccagtcctaaaactgccatgtgtaggtagactggatgcaagactttgagcaagtaacgtcaactttttgtataccttagtctgcttttgtaaaatggggctaatatttgtctcttctattaggaatattgttagaattaaataagataaaatatttgaaagatcttaggatagttactggcatatagtagacatttaataaatgttagttttcttcttcctctttacttacctggtcttggatatagctttctcctctaagccagtattccttttccttgttaccactagcttttctacttttcagcatattttccctttctctccccagcattctagtgttttccatatctgcttttataactgcatgatggattcttcttgctcactgcccagaaaagtcaatgcattgagaacaggttttgcagcaaagaaagagtttaattattacagggccagccaaatggaaggatgggagataattctcagatccgcttcctcagaattcacaggctagagtgtttcaaggatagtttggtaggcagaggtctaggaaatggggaaacctgattagttgggttggggctaaaatcatagggggtctaagctgtcttcttgtgccaagttagttcctgtgtgggggtcataagaccaattaagccagtttcttgatatgggctacttatttgataccagctggtccatcagaattcagagtctgaaaaatacctcaagcaccagtcttagattttatgatagtgatgttatctataggagcaattgggaatgttacaaaccttgtgacctctgggtgcatgactcctgaaccataattttacaaaggtgttttcagtccctgagtaataaggaggaggttactttcaggaagggactgttatcatctttattttaaagttaagctataaactaaattcctcccgtagttagcttggcctatgcccaggaatgtacaaagacagcttgtgaggctagaagcaagatggagtcagctacatgttgattgatttctgtcactcataatttttgcaaaggtggttttactttcaaagttgcttttgttaattctaaacagtcataataaaaaatatttaacatgtgtgtgtcttttctccttaatgacattgaaatcttcttgaaggaaaggattatttcttatggctatatttctcctgtccttctatcttaccaatacttcttggttaattgttggagttcctttggcttgtgagcttactaggactcttctgtattactctttttccctaggtactctcttgtgttactaaagctacaaccaacacatctacatgttaatacctcttcaatctatatctctagctctacctctcttttggatttccagtctgcattttccaaccaccatggatatttgaacttttttgtccttgaggaacctcaaccccaaagtgtctggagccacactcatcgcgttaatactcctcttccttttcttttccctggtttgtctaatggtattatcaccatcctagtctcccaagctagtaatcttagtcatttttggtttctctaatttttcttcccttggtgatagatatagttgatgataaaccatattgattctttggcaagatgtctcatctgtcgacccttctttgtttttaatctgtattttcctagactatttccttatctcctagatgaagaaattaaggcacaaagcagttaagtaacttcaccaaggtcacacaaactagtgttagaatttgtattcaaacccaggcagtctagctccagaggctatcatataaaccagtgtatcttaaatccttacaatcttttacactgctgctggagtgatcttttaaaagatacgtgggctgggtgtggtggctcacgcctgtaatcccagcactttgggaggccgagacgggcagatcatgaggtcaggagatcgagaccatcctggctaacacagtgaaaccccttctctactaaaaatacaaaaaaaaaaaaaaaaaaaatagccaggcatggtagcgggcgcctgtagtcccagctactccagaggctaaggcaggagaatggcgtgaacccaggagcagagcttgcagtgagccgagatcgcgccgctgctctccagtctgagcaacagagcgagactccgtctcagaaaaaaaaaaaaaaaaagatacatgaattttcttactcgctgggcttagaaagctttgatatatcatgtacaggagaaagttcacacttcttagtgtgatattcaagggacatttagcaatacatgcccttagggaccaaggtctttatttcaaagtcctcccactccctacttgtataatcaataactatcatttatggagtgcttactgtgttataaatagttcttcattgtctgattttccctccactcatctcaacacccccaaactgagagcacctttaggcaagaatccttgttttattagtctttgtattagccctatcgcagtgtgtatcatatatatgttaaacagataataaatgccatttctattgatcaaattgaactattgttcaggttactagaggactaaagttttgtttttcctaatggtttccatctggtaaaatgagagttgcaaaaaatttctaggctaatatttaaaaggtgatgaaaatgcaatcaggtctgtgagccttcagctgttgctttctttcagcccctgctctccacacaacatgtggtgagattttcaggattttgtgactttcaatccaactctttctataagtgttttgggaagacctttatttggctctctagaagcaaattcccctccccgcactttgctagaaagtactgtcaactataaaattccaattttaacaggaaaatgctcacaaccaataaattatcaatagcatagtgtttagagaagagatgggatgagaagtataaggtataactttgtttatcatctttaaactatggatgtgataaccaacttttaggctgcaggaagagatttttttttttcctccctgcctaatggactctaagtggtaattgcagttatacagaatacagctaagaacccaactgtaagcagactttacaaagtttatgtgctaaaactcgtgtactttcttttcttaatagagactaggctcttacccagtttctgtatgcttattttaagtaagttaggggaggaattaagaggattactgttaaaatagacacactgacagcaagaagcgaaagctgatagtttgctctgttatactctttgattctggaatatagctgagtgataaatcatattagctactgtcctacctttgtagtcactgtttggattcttaaacagccctgtctcactacttcatgtaaaaagagagaggaggagaaacagttcactgtaaggagaggccaactaaagaaaaaaacatagctagccaacttggccaaagcacatgtctgtattgcatttcataactcaagttactcacgagaattatgagtgcactgtcttagtttttaataatgctgtctccatttaacagatgaggaagcagtcttaaaatggtgagatgatttgcctgggccacaggctggttaagtgtggaagcaggtctgaagaaaggtctgccaggctccagtgcacgtgctgttttctattatgccatgttggtgccaaatcatcagtaaaatagaaaagtgtaattatgagagccttcataagaaagcaggcacatagaagatttaggaaggttttcaatcaaaatttaaaataaaataattttggttttttttttttttttttttttttttttttttttgggacgaagtctcgctctgttgcccagcctggagtgcaatggtgtgattttggctcgctgcaacctccgcctctccagttcaagcgattcttctgcctcagcctcccaagtagctgggactacaggcacgtgccaccacgcctggctaattttttgtgtttttagtagagacggggtttcaccatgttagccaggatgatctcaatttcctgacctcgtgatccacctgccccggcctcccaaagtgctgggattacaggtgtgagccaccacgcctggctaattttggtatttaatgtgagttttggtggagcaaaatttgtatttatgtgcagcagcacattttattcttctttattcatccgtctctacatatactataaatatatctatgtatgtatacatacacataaagacacacatatacacacacacacagttttacaaaaataggatttaagcaaaatacgggagtaattatagggtgaagtcttctccttcccctttccttgtactttttggctcatcttcttctttaagcccttttcccccattccgctgccagcaaaccacccaaacacagaacataggtccgcatgacccctagtcacccttcacccatgttaacaatctgatatgtatccatctgtattttttcccatagtctctctatatgtcatagatatgatttatagatacatttatatatgttttctatataatttatggtttatgtatatggtttgaattaatttataaaattaaaattgttttataaaattggagttgatacacatacttgggtttcttgttcaatattctatgcatacattcctctaattcactttttaaatggcttaataatagtcagtggtgaggctatatcatatttattcagccactaccctattgataggcatttaatataatatttactctggctctggtttttaatgcgtgtttgttttgacagtatgcacattactgaaggaaatatttatacacatatataaccttgtttttatgatgattttgtttccatggattacattcccagcagtgggatttctgagtcaaagggtatgtattgtttcaattgttagagataatcaggttgttttcccaaagggcacaaaataaatggcattactccttaccctgattctgtgctggcaatggccatcatcaatttttatgatttttactaatttgatgagtgtaaatgatacctcagtattacttcaatttttgtcagcctggtgcaagtacttagtttgagctacaagtgaaatttaacatgttttcttaagcttattagctatttagggtattcttctgtgaatttgcctattcatttactttacctagtttttaaaaattgagttgcttgcatttttctcataagttcctaagagtacttggtatttttttcccaaatctgacaattacatcttgacttatgataccttatacaaaaagttcatatttgttgtatcgtgtaattctgttttctgttttatattttctgggcactcttgagttgaagaggactctcctataccttgcttctatagatattttttgctaactttgagatttatattattttactttttaaattaaatatttaatacaaattgcaatttattttttttttcttttaatccacccatctgcacactgatatctagtatagatagtccatatcttgtaaggtagaaattatttcttcatagatgaattcattgtgccagcacctttcttttcccactgaatttaaataatacttttgtaatatattaaaagtgcatatatactgggatctatttctggattcgctctttttttgtttatcttatccttttgtgtattttgtaactttcagattgatttaactacaggggatttttttgtgtggtctaaaatcaagtaaggcacgtcctgttgctactcttctttttgatactatttttggctattctcagaactttattcttttatgtgaactttaagcttattttatcctactttaaaagaccaatcttattggaattttaatcgaaatttttatatcagttgaagttttacaattattttgggaaagatgtcattttatattagtatacccatccaagaacatggtgtcttttcatttgtttatattttattttattccttcaacaagattgtagttctctttatatggtcatttggctttctgttacatttgttcttaagtatgttatagtttttacagtattttgtataaaataggtgttccattccattcttgtgtgcttactgctattataaggaaaagctatacttctaggaaaatcttatttatatttagtaatatatctaattgtttttattgctattgtttttttaaggaaagctctccttttttggcatacacattatcatcagtaaaaggataggcttttcttctctaatgtttatactgattttctagacttactgcatttgctaaaccttctggaactttcagaataatgttgaaaagtaataggcattgtgaccatcccagttccttgttctaattgaaaaagttcagtagtttgctgttcagaatattttctgttaattttgaaaactattggccgggcgtggtggctcatgcctgtaatcccagcactttggaaggcctaggcaggtggatcacctgaggtcaggagttcaagaccagcctggccaacatggcgaaaccccgtctctactaaaaatacaaaaattagctgggcgtggtggcacgcacctgtaattcctgaggcaggagaatcacttgaacccaggcagcggaggttgtgatgagccgagattgcaccactgcaccccagtctgggcgacaagagcgaaactacatctgaaaggaaaaaaaaaaaaagaaaaacgaacatatatatataagaaaaaaatatatatacatatattttttcatatatatatatatatatatgttcgtttttctttttctttttctttttgagacggagttttgctcttgttgcccgtgctggagtgcaatggctcgatcttgactcactgcaacctccgcctcaaaaaggaaaatattttaaataattctttttattcacttaatgcttttgttaggattggttgctgaattttttgaaatgcctttccacatttattaatattatatattttcttcctttataattgtaataaggtatgtggatttcccagtgttgtattactgactagttataggttattcttttgatcattacttataagcaagattagtttttagcagttgtgttgttgttatggggggaggtataaattaccgtctctcccaaaatcataaaattgagttgtgaatgaattgtgaagctttccatcttattctatgatcctaatctgtaaaatgatgatgataatagcatttgtctctggatcgctgggaagatgaaaggtattaatgtgaactgcttagtacagtgcctgaattgtatgtgtcagctatcattatcatcattaccatctgaaacagattaaataattttgaaagtttttagttctttgaaggttaggacttagctagtaaatcatccagttcaggtgcattttataagggtaaatcttctttcaatccctttagtactcatcgctctgtccattttttcctgcttctccttggtttattttggaatttgttttttggtaggaaaccacctatttcctctagatttccaacattattgctgaaataatgcacatagttttattttataattcttttaataatttcaataatttacagcacattttctaattaagaccagaaactactctaatgttgtagttagaaatgttgttacattatgacctcttcttggacaggatgctctctgatgttgaaattgtaataacttttttcatgtaaactaaaacaaaatatttcagatacttttgccttaaagtgtttctcagaatgagaatggagaatgtggactatatacgttcagggaatttatatctcagtttacaatgttgttcctagcatatagcaccaagctggctcagagcgaatgctcagcaaatatttgttaaatgaatgaatgaagaaatgggtgaaatataatcctgttggataataactgaaccaggtagattttttgaggaattttttaaatggtagatttttaattacctttccaaagatgattagtactaaccttggatatgttttgccacagttatagtatattttatatataaaataatttaatatttcattttggatacagtgcatgctaatgaaaaattcatgttgaaagcattgtgtttttttttgtttttgtttttttttgtgacggagtctcgctctgtcacccaggctagagtgcagtggcatgatcttggctcactgcaagctctgtctcccaggttcatgccattctcctgcctcagcctcccaagtagctgggacttacaggcgcccaccaccatgcccagctatttttttttgtatttttagtagagaaggggtttcaccgtgttagccaggatggtcttgatctcctgacctcgtgatccacccgcctcggcctcccaaagtgctgggattacaggcgggagccaccgtgcctggcctgaaagcattgtttttaaattaactgcagtttactaaatgagtaaaccagtagtcaggacttactgatagatctcatagtctttaactaggacctcttataggcaattatgctactaagttcattttctctagtttactgaatgtttaatagagaatggaaatgtaatgggtaagttaaatgagcccttcccaaaacatgttcagaacttttggcttagagcaaaagtcagctttcaaatgttgaaaaggtgaatgaagaataaaataggaagaataaaatcagcgtaaagaagtaaagcattctttgagggcagttaagtatatgtagtcttctgcccaagagatgttctctgtctctgcccctgtcctttaattttggcttgaattcacagagttactggactaagactgctttgtttgagatgtcactgcgaattaaggcttcactgtcacatctctcatagctgccttgtaacttctacattcccgctggtgccaggcatgttccaaggcagcattccaaggtttagtgatttcaccctgatgtctctgccaataaaaataaccagttaccattaaaacctaccccacccataacttgatttttacatgccgttttattaagaaaacttattgatgattttaggagaattaatacattaagtttatcaggatatcaactggcccttggagtaacttttgttctaaaagtggatgtttcaccttggaagagaatctgagactcagcatgtttatctattgagagtggactttgtaataaccttattcctacagttgattctttatgactggaaatactctgttaaaatgagaagccagattattaccttagggatttatattctagtaggacagataacagatacagcaaacaaagggtctttcattcgttgagaaactaataataatttctaaatatgttgtgttctaagaatgagtcagaatccgttccttttctacaaagggcctacacagggggtggagaaggaaaataagatttgaatattaaaaattttcacttaaatacattaatgctattaagtaaaatagcatttcagttaaatgctaaaagttagcatacatctttttattgtgttcacaatagccacactactattgcaattccaatactattacaagctcagactgaagcttgcaaaagttgagtagtgtggttcccaggtgttcagctagtaagtcatgcagagtctgagtttagtggtaaaggcctttccattatatttctccatctcatgtggaggaattccccgtgacattcttttctcttgttgagacttccttatagcacccttagtcttcccagtaaaagttttttttttttgatgatacaccaacataaaatgagccaggaattacttagagtcttgtggcacccacacaatggagactttcctaataggctttcctggagccctccagagtgtgcttaatatactcctcaccttgtgcctccccgtggaggaggtcttaatggtttactattgaggagtgtctctgactctatgaccacataggtctttttacttcttttctcccaatatgtcaagtgtgaagtgattggacccaatgattctttcttagttggcatccctgactgttcttaggcttctgttccttaaattcagactctgcaagaagtaaactaatgtcatagaggaaaatgacttttccacagtagcactgatttttctgttcccgagattctttgattctaatgacagagttaaatttgaacatgggaggaaaactgactttaaacagtttatggggagaacatctggagatttaaactcatgaaaaattcagtgtaagccaagaaattgactcagcagcattaaaaaaggagctaagatgatcttatattgcattaattaaaatatattgtccagatcaagagaagtaatagtcttcctggactttgtgttcattagatcatatttggagtattctgtttaatttgggtcccagtttactttgatgggaaagagccggggagatggccaggaagataaatgattttaaagcagtcatgtaaagactagttgggaatagaggatatttagagaatataaatatcctagagaagagaggactttggggatatagttgccgtctttaaacagttatgtagttaatttggcaaacaattttagggtaataagagtaaaagacacatttattggatatgtactatctgccagttaagtttttcacatgctttatctcatttaatccttaaagcaagtgtatggattgctgctagtcattgttaccgctgttttactcatgagatccagaaaggggaattgatttgcctaaggttgcattatggcaaaggcatttttttttttttttttgagatgaagtctcgctctgttgcccaggctgcagtgcagtggcgcaatctcgggtcactgcaacctccgcctcccaggttcaagcaattctcctgcctcagcctcccgagtagctgggactgcaggtgtgtgccactacgcccgtctaatttttatatttttagtagagctggagttttgcgatgttggccagactgctgtcttaacttctgacctggtgatccgtctgccttggcctcccaaagtgctgggattacaggtgtgagccactgcacctggccagggatgtaatttggaagtgaaaaagtatataggttgttgttattcctgagagtagaatataatgatagctatgtttattgagtgttgttatgttctaggctcttgttatatactgaaaaagaaagaaaaagtcctatcttcatggagcgtacattttaataggaaattcagaagtagataaattagttataaatttgttgctagtggtaagttctatgaagaaaaataaagtagtaggaggagaatagaggttggtagatactgaggatggtaggatgatcagggaagacctcactgagaagaaaatatttgaacaaagacttgaaaaaaattagacagcaaagttggatgggcatttggagaaagaacattccagagagaagagatagcaggtaggaatgagtttggtttgttacaagaatagctaggtggtcagtctagtttgggcatagtgagcaaagttggcaaggccagaatcatgtagagttttattttttttccaagcatgataagaagttgttggagggctttgagcaagggagtgatgtgatctgatttctagtttttaaaaaaatacctctgattagccaggcttggtggcacatgcctgtagtcccagctacttgggaggatgaggctggaggatcccttgagcccaggaatttgaggctgtagtgagctctcattgtgccactacactctagtctggccaacaaagctgagaccccatctctaaaaagaaaaaaaaaatgcctttggtgtggagaatagactgggcttcggggtcaacccaccacagctgtgatccagcaatcagaaaactgctgctggtgaaatagccatcccacacttaccagacacctaaataaggaaactgtctactgcaaaacctcactcctgaaagagcttgtcactgctgcaggaagaatggcgtctatcccttctaccttccagattttgctcaaggcattccaacatttaagaagaggatgatagaacagaggagaaggacggctaatgaggttgtggaaaatctaggacaaagaggtgtcccagaggtcaaagtaaattaaatatttctaagagagtgattaattgaatcaaatattgatggctgggacatggtggctcacgcctgtaatcccagaaatttgggaggctgaagggggaggattgcttgagcctaggggtttgagaccagcctaggtaacatagtgagaccctgcctcagaaaaaaaaaaaggttgctgattggttgagtaatgtgagggttaagaatcgaaagctgggccgggtgcggtggctcacgcttgtaatcccagcactttgggaggcccaggtgggcggatcacgaggtcaggagattgagactatcctggctaacatggtgaaaccccgtctttactaaaaatacaaaaaaaaatttgccgggcatggtggtgggcgcccgtagtcccagctacttgggaggctgaggcaggagaatgacgtgaacccgggaagcagagcttgcagtgagctgagatcatgccactgcactccagcctgggcgacagagcgagactgtctcaaaaaaaaaaaaaaaaaaaaaaaaaaagaattgaaagctgaatttagcaacttggagctcactggtgacatatataagagcagttttgatgtgtggtgaaagtggtacaaagaagaatggaagtgttttccaacattttaaatgattgaacaattataattatgtgactgtgagaatgtgtataaaaatagtaacaataaagaattttaccatatagtatccatatgaatcgtggagattgctgtgtgataaactttgcagttgagaattttatgacaaattaggtgcagagtttagtgatccagtaatcaagaaaaagaatgcttgttaattatttgaaataaaatgtcattagtgagaaatctttattgagaatctgttgttagtagaccttgtgttactctgtcagtcacccccctccattctgtcagtttgaatggggagctatgcacagaataaacagtagcggaatgaaaatcagagagttgttttatgagtaggtgcccaaaggaagggtgcagtcgctgaaactccctggaaaaggactgggttaaaatagggggatttaggcccaagggaacctcctacattacccctaaatctaaatcttggcctcagcgtgctcagtcatatttttattttggggtgtatgttggtgagggagagaaatgaagcccgttgtcatcttctattataaaattttacatggcgatataattctgtgtttaattattctgtatccctccatagatttgtgggggacagggactctagtttatcttgctcacggtaacagccactggtgcttagcttgttccctgtcatggggcaggtgttaaatttataaggaataattgagagtttatcaggcagtataaggaacagaagataacacctgggtaccagcatgtggaaaggtggggaatgcttgcctgacacgttaaatacattcttagagatgtagatcacattcctctgctttaggaagcattgttggatctcacttcgttcctgtacccatattgcacatagaaagtattctgtgccctggatactttgcgttattcaccttacattatcatatagatacctccttatctcctcaatactagtcacaactttttttgattgcctgtcatttgcaaatattgtgctaggtgttgtatatattttatcattctatttaattctttcagcaaccagggacattaggcaaatgaataaattgaggctcaggaaagtttaacaacttgtctaagattgtacactactttcttagcaccttccaaaagcttgaggcttcttctgttccatggtgttttttaacaggatacatacttcagtagaatttgtatgcttaatgaaagtcttttatactttttttaagatcttaccacaattcctttcttttttgttgattatttgatcaaagggccatgtaattctaacacttcttgaaacattggagctgaaaagtaagactggtgaaatagctgactttaaatattgcgttttcaaggctaaaaatgagtgtctaacttactgattcattgtatgataaactaatattatagaactgtttttatatagagcagacagaaaaagttttataattgctctgagaaaaaaatatacttactcaaaatgtgttaagcattccaattttgatgcttcaacacggagctgtcccctgtagccttggagaccataacttcacagtgcttgtttttaaagtaaggttttcttttgaatgtaagcagattttgatggtagaaagaagttgtcgtgtggaattattctgtggagccatttgaatagacttgaaacattgtttatgcataaataaattcaccactctgaaaagtattctgacaaggcacggcatgtgttggcatctgcaagtcagcctgtactgagttttcactacccacaagaggtggtgaaaacgatctctggtataaagcaaatggaaaaggtaaagtgtcgggattttctttctttctttctttctttctttctttctttctttctttctttctttctttctttccatttttaatttcttttaacctttcctgggtattcatcaaaagtttcttttcaaaattaattttttggtgagatacagttagcatgacagaactataaatgttgatgttcattttatgtttttttgggagtttgtttctctcttcttttcctttttttaatgctgttttgcaaataatttgtgtgatcatttttttcactatggaccatcattcatgtgttgttttcattcagcagatacttattgctcttctagttattatactgttatgtgctggagatacaaatgtcacgttatgacaccagccttccaggagattttagtctagtgtgttagtcatacaactatgcacacagacacagtacagtatattaaatgcttggatagtgtctcatgcttgcctgttgggaacacagggaaaagagaccccaaggtagtcatgggaaacttcctggagaaagtgataccatctttccttttgttccccaaacaaacttagcccccaattgcacctggcatattttaaaaaattaaagtgaaatctgcatacaatttttaaaaaatcaaattctaaaatgaaaagtaaaagttctcgttcaaccctcccaaccttgacccagtcacagcccttagtaataaccacctttcacactttctattttcccttatgatggttatcattaaaacatgaaacaatgtatttgtttctgttatttaatacaaaaacattaaatagtgatttggctttggacaatgaaagatgaggaatttaccacatttataatacctgccaccttctctctctcactctacctctgtgtttttgttagctatctcatttttacattatcaagtttaaaaaaactttacatgttatgttgttataatcagctcctgtgctttgtctatagggtgactttaggagttgagccacagacaaatacccttcataatattattataggcagaagtagtgaaatgtgctaacactggaagaatttcccaagaatcaaggtccagtggtccaatggatggtttgtcttttttttctttttaccacaaagacctgacttttttctcattggatatgtgaattccaaccttctttttgaatgacatttagtatggtgcttgaaaattcaaacagaataatgcctcatttatttggcaatatcaatttataacagccaaacagtaatccaaagttagcattaaaaatccgctaagcaaattggaaaggaagaactcaaattatctttgtttgcagattatatgatctttatttatttatttatttatttatttatttatttattgagatggagtctcactctgtcatcaggctggagtgcagtggtgcgatcttggctcactgcaacctctgcctcccgagttcaagtgattctcctgcctcagcctcccgaatagctgggactacaggcgtgcatcaccatgcccagctaattttttgtatttttagcagggatggggttacaccatgttggcaaggatggtctcgatctcctgagctcatgatctgcccgcctcggcctcccaaagtgctgggattacaggcgtgaaccactgtgcctggcccagatgatatgatcttatgtttggaaaaatcctcaagactcaaccaaaaaactgttagaactgataaacacattcattaaagttgcaggatacaaaataaacatataccaaaatcagtttctatatgccaacatgaacaatctgaaaaagaaatcaagaaagtaatcccattcacaatagctacaaataaagttaaatatctaggaattaactaaagacatgaaagctctgcagtgaaaactacaagacattaatacaagaaattgaagcagacacacaaaaatggaaagatattccatgttcatagatttagaagaattaatattgttgaaatgtctgttctacccaaggcaacctgcaagtttaatgcaatttctatcaaaatatcaatgacattcttcacagaaatagaaaaaagaaaactcctaaaatttatatggaaccacaaaacacccagaatagccaaagctatcctgagcaaaaataacaaaacttcaggaatcacattacctgactttaaattatactacagatctgtagtaaacaaaacagtatggtactggcctaaaagcagacacatagaccagtggaacagaataaagaacgcagaaataaatccatacatctacagttaactcatttttgacaaaggtgttaagaacatacattggagaaagatcagtctcatcaataaatgatgctgggaaaactagatatccaaatgcagaagaaggaaactagaccactgtctcttgccatataaaaaattaaatcaaagtgggttaaagacatgaatctaagacctaaaactatgaaactattaaaagaaaatattggggaactctccagaacattggagtgggcaacagttttttgagcaatatcccacaagcacaggcaaccaaagcaaaaatgggcaaatgggatcacatcaaattaagaagcttctgcacagcaaacaatcaataaagtgaaggcacaacctagagaatgggagaaaacatttgcaaactacccatctgacaagggattaataaccagaatgtataaggagctcaaacaactctgggaataaaatctaataatccgatttaaaaagagcataagatctgaatagacatttctcaaaggaagacatatacatggcagacaggcctatgaaaaggtgctcaacatcactgatcatcagagaaatgcagatcaaaactacaatgagatattatctcacgctagttaaactggcttttatccaaaagataggcaataacaaatactggtgaggaggtggagaaaagggaacccttgtacactgttagtggaaatgtaaattagtacaaccactatggagaatagtttggaggttcctcaaaaaaactaaaaactgagctattacatgatgtagcaatcccactgctgggcatatagccaaaagaaaggaaatcagtttatcaaagagatacctgtactcccatgtttatcacaatagccaagatttgggagcaacctaagtgtccattagcagatgaatggataaagaaaatgtgatacatatacacaatggaatactattccgccattaaaaaaatgagatcctgtcatctataacaacatggatggaactggaggtcataatgttatgtgaaataagtcaagcacagcaagacaaacatcacatgttctcacttatttgtgggagctaaaaattaaaacaattgaagtcatggagatagagagcaagaagtatggttaccagaggctgggaagggtagtaaaataggaggtggtggggaggaagtgaggatggttaatgggtaccaaaaaatagtagaaagaaagaataatacctaatacttgctagtaaaaacaagatgactatagtaaaaaaaatttaattctacatttaaaaataactaaaagtataattggattgtttataacacaaaggataaatacttgaggtgatggataccccatttaccctgtaattattattacttattgtatgcctgtatccaaatttatcatgtagtctgcaaacatatacacttactgtgtgcccactaaaattaagaataaaaaatttaaacaaataataactccctagttacaaaaaaatccactgagcagcaaaaacatctcatacctaaaatgttctacattttatgcctagtaagaatccataggcctcattcagaagctgtttactcttattttgtgtgtcattctacaaatcatgatctagtctccaagtctgtaacagattaaatgttataatttagtgatgctacaggcaggcacattgaaagccctaagaaatgtcatatgggaatctcatagagaagaaaggcagtctgtgcatatcatcctgaatgtgcctgatgttgtctgatctcagaggctaagcagggttgggcctggctagtacttagatgggagaggaaaggcagacaaaatattaaatgctgactatacaatttaaaaggtattatgatgtagggctgtatgatactgggcataatgatgctctagtgatcatcaacctttacaaaaagaatcactattttcattgtacagtgtcagaagacagggaagtaagtagtcattgaggatatattcctatccaaaatggttaaattttgaaatattgttcatacaattaaaaaagataagcgtatgatacagttatctggaaagttaatttgtgtgggagctcttctccaaggtcagtggaattgtatatttattatcacatttgtgacatgaatgggaattgctttattagttattaaaaactcaacaaattagctattgtgtgaattattactgggaggcagctgttgactttgttgtgaaatatgtcagctaggaaaaaaggcaatctgtctctctttctctctctctctctctctgctatatcagtggattgaccattatttccatggattaaaagattggacaggctgccactggggataaagggaatatgcttccttgtggaagagtcttggtttgggatactgctaccttaatactccctgcctttatttcttgagtattttatgtctttttccttggaaatatttccaaacttgaagaaacattacagaaatagtataaagagctttccccctgctaaccatttgaaagtaaattagaaagatgatccctcagtactcccaaataaatcatggatatttgctacaaatacgaacatccttctagataaccatagtatgcccatgaaaaccaggacattaaccttaacatgttactggcatctcattcatccatccattcaagtttcttcagctgtctcagtgtcctttataactaaaggattccatctaagaccacaaattacatttacttgtcatgtatctttactctctgtcaatctgaaataatttctcagtctttccttaagatttttgaagagttttaggccagttaatttgtaatgtttatcaattttggtttgtctgatgtttcctggtgaagagattcaagttatgcatctttggaagaagtaatgcggaagcaatattgtattgtttttgcatcctgtcagaggggacacattttgatttgtcctattgctagtgatataaactttgaagccttaattagtgtctaccatgtttcttctctgtgaagttaaccttttagactttgcaatcagtaagtatttgtggggagatacatttttagatgataaatgtctcattttttaatcaaatctctgtccactagttttagcacatattgatgtttcttggctaaattaatttttttaaatgatagttgccaaatggaatggttaattcagttctcctacatttattagtgtgacattccatttaaggaaaagctttcagctttttctgtttaattgtatcaatgtagacacatggattcctgttttatccggtgaattattatctggtagtataagtatttattttgatactcaaatcactccagatttggccatgggaatctcttcaatctggcttctgtgttcttaagacatatttccatcactctttgagtatgtccttactttctggcataatatattacaggctcatattccctttgcccctggattagaattagtcatttctctaaggagttttgttttgttttagtacagaataataataataaaaaaacccactgttgattgacttaaacatttctgttttttagagacaaggtcttgctgtgtctcccaggctggcgtgcaatggcctgatcacagctcctcaaactcaagggattctctcatctcagcctcttgagtagctgggactacaggcttaggccaccatacctggctgatttaaaattttttagagatggggtcttgctatgttgcccaggctggtcttaaagtcctggtctcaagtgatcttctgttctcagcctcctgagtagctgacaggccaccaagctccagttaattaacttttaaagcaatttaaataataagaaaagtttttaggctgggcgcggtggctcacgcctgtaatcccagcactttggaaggccaaggtgggcggatcctgaggtcaggagtttgagaccagcctggccaacatggtgaaaccctgtctctactaaaaatacaaaaattaactgggcatggtggcgggcgcttgtaatcccagatgaacctgagaggcagaggttgcagtgagccaagatcacgccactgcactccagcctcagcgacagagtgagactctgccaatatatttaccatttctggtgctcttcatttcatttattttcgtctggtatcattttccttatgtctgaagtatttccttttgcatttctcatggtgcctttctactggtaattgaactctttcagtatgtctgaaaacatctctatatcatcttagtttttggaagatgctttcattgggcttggaaatctaggttacgggttttttatgtcttttaattctttaaagatgttgctccactgttttctagcttgtattgtttccagtgagaaatctgtcattctagtatcctctcctttatgtagtgtgtctttttttccttgggctgctttgtcactgttgcaaggcaatttgattctgtgtaccttggcatagttttctttgtgtttttcatacctggtatttgttggtattcttgcatctgtgggtttgtaatattcatcacatttggatattttgcaaccattaattattcaagtattattttttctgtctcctccttcattattttccccttcatgaactccatctaaatgtatattgggcctcagaagttgtgctatcacacactgatgccttttattttgtttttgttttagtcttcctctgtttttcattttaaatagtttctacccaaatgttcactgacatttagtatatcatcaggtttactgtttttcttgtaataactaatttgttcatccatcctttaaaaatatgtgtgtgtatatatatgtatatgtatatacacacacacacacatatatatatttttctcatttcagacatcatgatttccttttttttttgcagtcagctttctcagattaaacagacattgtgattttcatctctgaaagttcaatttgggtttttcaaaaattttcaatgtcactatatgttcagtctattttctggcttttaaacatataaattatagttgtaataactgttttaatggccctatctactgattctgtcatctctagcaattttggatcagttctgattgattttgctgctcattttggattgtattttcctacttctctgcatatacagtcatttttaattggatgtcaggcattgtcaattttaccttattgtttgttggatatttttgtgttcctataaatattctggaaacacagttatgttatttggaaaaattttcttcctttcagttcttgcttttacgcttcctcagcctgtactagagcagcatcaagtccaggattaattttacctacccctgaagcaaacctcttctgagtactttattgcgtggcccgtcagttatgggccatactctggctgtcaggaataggccctgttcctggtcctgtgaaatctctgctttttgtttcctctgtctaatccttttagattgtccttttcctggccttggatcatttcctcagatgattcactgatcagtactcagctgaatatttgagtgtgaccctctgcagatctctggagttctctgtgtgcagttctgtcttcttcagtactgtgccctgagaactctcgcactcatggcttccctggactcctaaatctttcttctacactcaggtagaccaccttattctgttgggatccccatccctactctgaagcctggaaactttctctaagcattaagccggggcaattgtagaactctcctcatgtgtttctctactctcagatgttactacaagttgtctggtggccagtcttgaaatctatcctctcatgttttcctagggtttttttttttaagttatttcaggtgggattaaatgcagtctctgtcactctattttggccagatgcggaataaattttgctggttcttaacattttgatgtcctaaagatcattttagtatcttcagggtaaaaaatgaattttctctacactgtagtgtaaggtgtggaccataccttgctacctctgtatcattttctttgtcctctttgttcttgttgaaacttgaaccaatcttatgggaagctgactatgggccaggcagagtagaatgggagttagattcatatgatctgattccttcccatagagaactcagagcttagagttacataatatcctctaaatcatagctcttaaattggtagaactgagttttgaaccatatattttggccttcccgttgaatgtctttttcactatagcagtgttcttgaataacccccatacatatacatacatagactcacacatatgcatacatacacacacacatacacaccctttgtaactcaggaagcctcatgagcatatggtctaaagtgttcacccccttcagattgctttttgcttatcagtgattaaaaggcttgggaggcatttgagaatgtgtgaggctggtaatgaactggaggtccaacgggatgaaaagggaggaaaaaggagagtgtggtgttttattttttggaacagacttcaataattataattactagtatgctggtataaacttgcctttggagacactgtggtaattttgatttatgtccagttaaaactgcaacaaaactgccaatacagaaggaattctgtgtttactcattttcttcagatagtaggccaaatggagaaattcgttaagccaatcctgaaacactataccaaaaacttaaatgagcaaaattaatcacatgtattggcaataggggattccatgaaaatgtttcaacttctggcagcaacttttaaactttctaatttcagtaataaggctatttgcataactctaaatgtagcaggcaaatggtacaaagaagaaagaagacagtgtggtgtagagaaagaagggaactggaaattaagaaacttggcctttctaaactggcatagctttgagacattggacaagtcattgaatcttaactgtggtttcattttcatatttaaaacgagagcattgaattaaaagacttctaaaataactcctagtactaacattatcatggtcctttgactataaaggtgaccttaattgacttaagagtcagttttctagttatttctaaaactaataacattttaaaaaaatgatttactatactatcacattttctattctacttaaaaggtcattgtccagtttgattgccttgtaattcacaaaaatttagcccagattaattttaatgattcctaaaataccaagtcctctagcaaaggtggagatttgccattatagaggatatccagtgatggtaccacaagttttgtggagaactccccaagtgctttggacagtggcattcttgctggaataaatatgtaggttgtaaggggatagtaataattagagtcactgctaatatttgagtacttatcaagtgataaaactgtagatgcttttgaagtatttagttatcagaataaacctttgaaaaaatgtatgatttttatccccattttgcagatgaagcacgggacttttggttaatggttaataagccactgagctgggatttgaaccatcactggcaccacagcctaccttcctaaccactacactatgctaactactatatttataaaagtcaaatgtatcaaattgcctgatgtatttccacaagtagacatcattaattgtgaaaattctgccttcaaaaaaagtcctttgacattactactaaattatctgtcattctgaactgtttgttaccattctgcaaaaaaaaaaatgaggcagttttgccaaaatgttttcagcaatatccttaataagcacattgttgagttcagctgacattttgtaagcaagattttctcagtgaaggaagtagtcattcattgacttacactcaagagcaaactgcataaaaatgcccttctcactttgcttttatgagctacccaaagtctgtgtaaacccaagaatatagatgaaaccaactgtttctgttcagatttttgttgttgtctctacttctccatatctttattattaatttccctggaaattagaacttttctaaaactgtaagatatttaaaaatcttaaaatgtgttttcctttctaaaaagccttctttaaagttactcattactacaggttgagcatcccttagccaaaatgcttgggactagaagtttctcaggtttttttgtttgtttctttttggaatatttgcattatacttactggttgagcgtctgaaatcccaaatgctccagtgagcatttcctttgaaggaaatgttgatccacttgtttatgctcaaaaagttttgaattttggagcatttttgaattttggattttcaggctagggatggtcaacctgtatcaccatatctgacattcccccctgcaacctgatattatttcctttggtgcagagtttcagaatcaaattaaggaaatgtcatgtttccacagatgagttctctgaaaaacttcctcttacagtgaaagtcatagtccaggagaactttagatgtggaacttcagggccaggtggaaggccattatgaactcttgcattggctctcttatgatcataagcctgaaagtacagaatcctggaaaaggaggcctctctctgcacccatgtaatttttaaaaaggagagaaagatatgaagggtgctaaagcttgatcctaaaagatcagggcaatgaaaacaaatgataatgaataactagtactagaattaaaaatgtaaggcattttaaagagatggggtgccagttataattcagttttgaatactacattgcaaaagaactatttttgaaaatagttaagggaaaaaatatctgaattgttgaataagttccccctatttattcctggtaaacttcaatcccatcttactgcttcattctaagttcttgtggagtgtgaatatcagcaattttctgaccttcaaagaggaacttgaataatttcattggaactctgtgcgttttttgatagtatgattctttgagtttcttgggatgtgttgtcatttttaccttgcagtgaacctcactattgtcctgtctaatgactttgaataaaatatatattttttctttcttgtccctgaagtccatggtggaagcttttgcctcttgtttagacatgatggtggtggcttttctttcggatctccacaaacagcagattcacagcgggagagtctttctctctgagacttacaaatccatgttttttcttcacagctcaacaccactgctttctgttaagatgtaaacaagtctaataatttctttttcaaatgccgttctgatgaaaacctgagtagttaaaaaatactatttaaattacaatttaaaaattgtacaattattaagtgtacattaaacacttgctaagtgtacagctgtttatcagacacaatacaggaggggatacaaaggaagaagacaagaagcgaattgtctagttgaataagatttagcttgtggaagaattagtgtcaagataaatgtattcaagtgctgaacttcatggtacatatgcttactgaataaagcagcatgaaaggtcctttgtatccttagtttatgagccttaaaacagatttagaaaaaggaaaagccaactagacacagtggtgtgcacctatagtcccagctactcgggaggctgagacaggaggctcacttgagcccaggagtttgaggttacagtgagctatgatcataccactgcactccaatctgggtgacagagcgagatcctgtctctaaaaaataaaataaaaaaagtcccacctcccaatactatggcaattaatttcaacatgagtttgggagggtacaaatatttatactatagcacctataaaatcatcatggcctacaccctcccacccccactttggtagcgtttttagtttctttgtagttatcgatctattcaggttttcaacctcttattgagacaatttggtaatttatagtttgatagaaaatcattcacttttcctgtttttttttttttttaaatttattggcctaaagttgtatataatattccttttaaattgtaaaaatcttgtccatatctgtagtttgttttgtttattgtttctaattctgaagtgcttttctgtatacttcctcaagtgtgtttattgtgtaatgaatacattttaaattaaacttactaaaatgcacatggatagtattatgaaaaaatttggaatgatttagcttgcttttatgccaaatgtggttcttcttgcctgaaatgagttagttgagatgtaaattggaaatgcgaagagttgattattgttctataactgtcgcttcatcagtgttgttagtttttgagggtatgcatatcctggttagacttgatgcactaattatcacatgctttcacaccacctaccatctcctcaatagaactttcccacccacgatgctatttacttttccatgaaagtaggttaattttataagtatttataagcaatagtattgtcttatttgatgccattaccatgagattgtgttcttcccaactatgtgcatggtctagacagaggaatgtagaagcaggcttttgggtagactcctggtcttttgggaaactatcatatttaataaatccatcaacgagtatttgagtgattcccatgtgccttagactgctgtaggtgctgtagaggtgcagagaatttattaggcatttaaagtctatagcactgtagctctgatcaacctttccagcctgcctctcatgatattgctcttgtgccctctttgttttatagcacacaacccactttctgttctgaacgtgtaatgcactctgcttccttaatgactttgaaaagctattcccaataccctaaacagcagttcccttgcatacagctgtcagagtcttagctacccttccttcatattggagcttaaatgctgtctcctttaatgagcctttcccaagaacaagttatcttagactaatgtatccattttgcaagggtacttagatttgtagatacagataacttcaataatgtgtttgataaggtatgtcaggatagctttgggagcaagatgaagaggtgtaagctaaatgacagaaaagataggtcgactggtaactacttgatgacttgctatctagagggaaatttttaaatgcatggcatagggctctgctattgacctagtctttttcaacatgtccattcatttgattacttacctgccaaatgtttattcagtactgcatgctggaaactatgcaatatgctgggtatacagtggtgatcaagggagacatggtttttcctcttgagaataccacaatctaagcctttgaacaaagatatagaaaattgactaagttaatgcagtggtaacgtggaacttatagagacagtgattattgcgtaacggaattagtaaataagatctctggggactggaaagatagaattatattcagctcatcttaaattttaagatagagtttaattgtgaaaagaatatagtcttatacttgagtcctaaaaccaactgtatcagaagagggaggcttggcatatgggcaacagtctgagtaaaaaaagatacagaacctttagtcagtagtcaagtcaatatcaataatcagtgagatattactgccagaaaatgttgggttattaaattgatagacatgtagtgtctacaatgagaaatgatcagtcttttctggtttacaaacattaaacaatgttctcaaggcagtttcccaggagtttttctacgcttgatatacatctaaaaaaataaattaattatcactgaataaatattgcatagcatctgagaaaaatagaatcagagaaatcttaaaataatcatttttaattccgtgggtgtctgttgtgctttggggggttaagagaagggtgagatgtgcccctctgtatttctgaggaaggaaagggagtaatctttattacagtctgttactgaaggcctctatatacaaagtactacggggaagctcaggagcacagacactaccaagttataggcctaggttttcaaggagtgtggaatccactgctggagaaagccggaaaacaaatgattatagatgatatgaagtctagatggagcatgctcccagtgctgttgagggagaccacaacccttaccaaatattgactattcctgggctcctacttgagttcttcctcttccaaaatgaatttgtgggtctgttttgtacctacaggtgcctggtctttttgcattgcagcctacatacatgacatctcgtggtcaggcctccaaatgacttatttatttgccttgagagtaaagctccttatcctaatataccaggttttcataatctgacctctgcctgcctttttacctcatctcttgccatcctctcccatatgaccctgtgctccagccttgctaagctgcttacagttcctgaaaatgttagggtaccttttttttgtttttgtacttgtttttgcttttgtctggaatatctttctccctttttatctagctaattcctacttttccttcaaatgttggctcagtgtttaccccctccaagaagacttttgcttccacttgaccccgtccctagaatagatgctccttttttatgttcagcccttacccgatgcatgcctgtgttgtagcctgtataatgctgttatgattgtttacaaaccaagttgtctacaaagtttgagcattatgaagataatgctctgatctctgtatttttattacttaacagagggcatggtgaacatttaggccttcaataaatgtttattgcatgaatatgtaaataaatggtatatttttagagagcacagactgtctgcaatgttttttctcttaacactagactcagtattagcaacatagaaagtgctcaatgtgaagacaggatgaatgaataaatttaaagatacgttaacatgatcagataaggaattaggctaaagatttataatgtgcaggtgttattttgactaatgtgataatgtgctcagtaaatggaatcatgaagagatggctgtgaaagaaggataattaatatttggattgaaagaatgtattagtttttgattgctggataataaattaccacaaatttagtggcttaaaataatacctgttttattgtttctcggtttcttctttaggccggaaatttgggaacagctgacttggttctctgcttatggtctcatgaggctgaaatcagtgtcagctgcgctgtgttcttttctggagctcagggtccttgtttaagctcccatggtttttggcagagttcacttccttgtggtttataggactcagcctcttgttctcttgctgatagtggtctgagggctgctgtcagccccattgaggccacctgcagtttcttgccatgtggcccactttataggccctctcatgcttcaaatctcttctttcaggaagggccagtcccttttaagggcttacctggttagagcagacctaccgtctgtattagtcagcttagactgccataacaaaataccagtctgggtggttttaacaacagacatttattttctcagagatctgaaggctggaactctgagatcaaggtgccagcatggttcagtttctggcgaggctctctccctagcatacagatggccacctgcctgttgtgacttcacatagcctttccttcttgcatgcgtgtggagagggagagatctttttctcttcctgttcttttgaggccaccctatgacctcatcaactttaattacctcctgaaagtcttgtttccaaatatagtcacattaagggttaggatacttcaacatgaatttggggcgggggatgaagggatacagttcagcctatagcacccagctaatctcccttttggttaactcaaagtgaactgatacgtgaccttaattatagcccctcaattccttcaccttgtaaagtaacatttctgggagtaatatcctatggtgtttataagtcctgctaataaccaagagaaggggattatgcagagaatgggaatcttggggtgacattttagaattctgcctaccccaaagatagtgggataaaatgcagcagcagatttagttgagatacgagttatattatgaatagaatcgtagaataatggaagagaaaagcacacagcaacctgatatataaggggaggaatactgagcttggacacatatatttggaaggtttaacctaaataatgtgtctgtgaaaaagcactttggaaactaaaattatttaacatgtaaggtgttactgatgccaaggtttgtggggagatgatgacaagattagcttaggaacgatgggtttgtgggtgggaaataagcagtgaagaccacgggctttggagttaaacaaacctgggtttaaatagtgattctgccacttaccagcttcagttttctcacaggtagaacgggaatgattacgtctatggatttttgtgagaattaaatgaaatatccatttcaagtttttagcttagtgcctggcacatagccagcactaaataaatatgtattcattcaccaacgaattattaaataaatatattctatgtgccaggcactgtattaggcctcaggtttctggtaaatattaatactattgtgcctgagctagatttcattggactttgaattgccaggctaaaacaacagagtttaaatgtttatttaaatcgccctgagctgttttcaagcaaagaataacatctaatattagctttttagaatttgtgattatttggtgctagtacatggtggtttttttcttttgtataaagagctcaaatttgcctgtagtcattctaattattgatacactaagacttaaaagatctccatacctcttacatcattgttttgattttttgaaggacgctattgaaatctgtgttttaggagagcattctcatggcagtgttccaaatggattgaaaagggcagagattaaaaaggaaggccttttattaacgcagaaccagggtgcttacagtgggaatgatgaaaaggaaattatgcggataagagcattgggaaagaagaatcaataggtttaggtgattgaacacaggaagtatgagtgagggaaaaggcagcactaatataatgtgatgtcagttctggagcactgcagtgattcatgactatcatggagcggatttatttgataaaatttatttgaataggtggatttatttgaatagaattctttaaaaaatggaaaattcatttagtgtagaaaaatgtagatcacgcctttttagacaccagaaaaatccttttatcatcgatggaagatgttatcaacatgactagaagtacatatatgttaattacccatagatacataatgaaaggaactgtgtaggcaaccacacactagctattagagggcctagagtatctaaaaggttagtgtccatcagagaagaagaaagataaagtggtgaggtactagatgcattagcacgaatctttgaaattgtaagtttatggattgtgatatttctagttgtctctaaggaaatataattttagatgtgtataaggcaggcgttctggatgctgttggggaagataaactacaattagtaaccgagcaaatgaagaacagggattctttggtactaagaacagaatagaattgagaagaataagagttgaagctaagaaaccagttaggggctattggctaggtggcagtctatctggggtgaggtgaacggatttgaaatggctttaattaagtcgttgctgctaaatatgtagaaactgtctaggccttaggttgcttgatttttgtgacagtggtcattcctcccttgatgggctgttcctttaactgctgtcataccagctctcccagctgtccttctgcttctccctggatattctggttcacaattttttgcaggacttttttcccccctaatttcttaagtattgatattcctctggattctgttctaggttctgtttactctcattctcgcagtcttcagggtgatctcattcactttcatagcgttcataaccatctgtgtgctaatgactgccacatttttatctctggccaagatctgtctcctgagcaacagatctttatattcaactcatattcaacacatcctcttggatgttacacaggcacctccaactgaaaatagaactttcttctcaaactgttgctgccgtgttctacatcgcagtaaatagcatcaccattttttctggttccccaagccatataccagcaaacattcttttctttttctttggcagtgtaatttatatacaataaaatacatatatatatatatatatatatacacacacacacacacatatacacatatatatatacacacatatgtatacatatatacacatatatatacacacacacacatatacacacagtttgatgaattttaataaatatacacacctgtattgccattgttaaatcaaggtatagagtattttcattatccagaatgttccctcatttgccagagttctgacaccctcattcccatccctgggacacttttcttactgccttatcatttattagctttccctgtttttgaacttcttataagtggagtcatacggggcactcttttggtttctggcttcttttgtttaacatacaatttttggaatttatccatgttcttgtatagattagcagtgtattcctttttactggtgaagcagtatttccttctatgaatatattacagtttgcttattcattattctgttgatggatatttggattgtttctactttttggctattataaataaagccgataggaacaccttacacaagttttttgtggtcatgtgctttctcctatttatttatttatttgatattttagagacagggactcattctgtcaccaggctcggagtgcagtagtgcagtcatagctcactgtaacctcaagctcctgaactcaagggattctcccttcagcctcccacgtagctgggaatgggtgcgcactaccatgcttggctaatttaatttttttagcgacagcgtcttgctgtgttgctgggggctgatctcaaactcctgatgtcaagtgatttctcccatctcagcttcccaaagtgttgggattacaggcatgagccaccgcacccagcccacattatacctgagagtgaaactgttggcttatacgagaggtgtatatttaacttattaggtattgccacacaggtttccaaagtagttatacatttttacagtccctccagcaatgtttgaaaagttccagttgctctacctcttgccatcatttggtattgccagttttgtaagttctagccattataataggcttgtagtagtgtatcattttgattttgatttttacttttataatgactaaagttatgagcaccatttcatgtgctaatagctcattcttgtatcttattttttgaagtgtttgttcaaatattttgcctattctcaattattgggttgtttatatttttatttttatgtaggaattctttgtgtattttggatagaagtcctttgtcaggtgtacacacacacacacacacacacacacacacacacacacacatatcccaagtgtttttttctcagtcatgacttgattttttttcatttcctcaataatgcccttaggactaatttttgcctagtcagagtttttgcatatattttcctatgtgttattccagaggcactgtagtcttagcttttacatttaggtccctaatccatctcaaattaatctgtgtgtatgaggtgaggtacaggttaaggttcatttatttcctatatacgtattaagttatttcactgccatttgttgacaaagtttttcttttccttattaaaaaattgagtatgtatgaatgattctttctataatctgaaatgtgtgtgtgtgtgtgtgtgtgtgtgtgtgtgtgtatatattttttgtttgtttgtttgtttgtttgtttttttgagatggagtttcgctcttgttgcctaggctggagtacaatggtgcgatctcagctcaccacaacctctgcctcccaggttcaagcaattcttctgcctcagcctcccaagtagctgggattacaggcatgtgccatcacgcctggctaattttgtatttttagtagacacagtgtttctcaatgttagtcaggctggtctcgaactcccagcctcaggtgatctgcccacctcggcctctcaaagttctgggattacaggcgtgaaccaccgcacccagccctaaattatatttcattgatctgtttgtttagttctgtgtaactactgctgccttacttactgtagctttatgataggtcataaaatctagtagtgtaagccctccagctatttcccgcccccaacattttcttggtgttctaggtcttttgtatttgcatatcaattttaaaagcagtttgccaatttctattaaacaaaaatcttttgggtttttgattgggattgctttggctctagatcaatttagggagacttgactgcttaataatatcgtatcttccaatccatgaaatgatatatgtctccatttatttaaatattctttaatatctcagcggtgttttatggttttcagtgtacaggtctttcacatctttctttagatttattcctagttatttattgatattaaatagaaacactgattgatttttaatatattaatttaaactcttgcaatttgccgaatttactcattagttctagtagttggattgtagatttctttggatttttctacatacacaatcatagcacctttaagtagatttgcttcttcctttcctatacctatggcttttatttacttttaaaatgcattattacaatggtttggaccttgagtatatgtggaatagagtgatgaaagtgggtatctttgccttgtttttgattgtaagtataggattagctgtagatttttttctataaaccttttatcagattgaggaagctcccctttcctcctagtttgttgagggttttttttttatttttaaccattaacaggtattaaattttatcaaatgcttctttttttgaatcttttaagataattatgatcttttttcttcattctgtcattgattgattttcaaatattataccaaccttgtatagtatttgaaaatcagtcagtttaacagaatggtataacctactcagataaacccacttgatccagttgctttatccttttcatatattactagagttgatttgctaacattttattaatggtttttgcatttatgttcatgtataataattggtctataatttttttttcctatagtgttcgtgtcatgttttggtatcagggtcatgttgacctcatgaaacaaactgaaagcatcccttcttcttcttggaaagatttttgatgctactggcattttaccggtgaagctatctgagcctagagtttcctatgtgagaaaatttttaattgcaaatataatttatttaacagatggtggttctttagattttctgtttcttttgtttgttttggaaatttgtggattttaaacaatttgactatttcatttaagttgaatttattggcatacagttgctcataatttctccttaattccttttaactatgtgaaggatctgtagtgatgtcttctctttcatttttatgctggtaatttgttttcaagcatcattctttatctctcttctctctcacttttcacatttacaccatctttcctgtcactattttaatttaggacagagccatttgttacttggactgttggaataacctcacactaaccttcctgtttgcagtctcttttctctgtgtgccattcacctattacaagaagaaatatctttctaaagtgcaaatgtaattaaatctttcccagcttaaaactttttaatggttttctgatgccttcagaataaaaatctaagcaccttcatatgaaatacaaaaccattaattataaggtattgatttgtttcatagacatctgtctttcctgtatttcttctccctttttatctctctctgcaagccgtagggaactatacttcactgcctttgtaggtattctaatttgtcattctttgtcttaaacttgaatgcagggtttctgatgtcatatgatcaatattatcttctaacttctccttcagtgagattatttttaatatctcattggcttcatctcagttaatctttattaataatttacttgacataattttttttattcaatgtatctttacgttcacagaaatatatagcctcaaagcactttagtccagtttcagtttatctcaaatcatgttaaaaaataggaatgcatctctttcctatcaccagaatacctatcggatagctatttgatctctccttcccaacaccagtgacgataagttttatttcagcttgaggatgttagtgttgatattgaccactcacccatattactacatgatatatatttctttctttatagattcttttgatagtttgcaaaatcaagaaacattactctgaaattggccaaccagtttggaggtaaagcagttgtttcttttttagttagtccttcacctctttatccccaggggaatcaggatgtcccatgttatttttcaaagtctaaatacttcaaacttttattctcctgttgggtttgaaaggggggtgttattagctctgtcttgatgcagcaggggctctgaaagtctatttggataacactgaagattggaggaaatgtgactctgtctgtgtgttttaagcccctaaggtaagatcagaaagcgtctggggcagtgagagccaaatagttgaagtcatacattaattatggtcatgaatcatttttatttttaaagtctttaccatttgacaaggttgtttgcatagtaccagtgaagttttaggcggccctttcctacttttaaagtaacaggctattttgttgatttcttctctgggttgatgatgcctatcatttttagaattctgataacatttttagtaaaaattgctgtttcctcacttgaatgagtggtctctatgtgatttttattttgatacactattttgaagttacaaatctaggaaactaccacactgatcttccaattaatctcccactgatgtcaaaaatgtcaaattttgggactgtgcttttatgttcagacattaggcattaagccagcaaatacattttgagtccctcctttgtgccacattctgtgcttagcatttggaatacaccttagaagatgaaatttatttttcccccagaaagatctggtgaaataggcaaagaaataaacagttgctgtaaaatagggtcatgtaatatttttgtggtgccatacacatgaagtagcagatttccagaggaaggagcacctctacctgtccgtaatagtcaggaaaggcttttgaagaagaggttgcttgagctgcctcttgatggattaggagtttatttatctgttaagggatgggaagaacttgtaggcacatagaacaactcacacaggggtacagaaggaataaattataaggatatgtttggagagttgccagtagtttagtattgctagagaagatggtgcaaggtaaaaaataatcaggaatgagactggatgtgtcagcagggtctacatcacaaagggccttaccttgatgtaaaattactttagagctgtctttttaagagagtattactgtcaatgtagattaaacacacaaacacacccagaccaagaggcaacaggatggagtataatctcctctattggattccttaggagccctgagggatttgttgaattactggtcccatgaacaaaatagctgtattgagagttggtcctttttatgtgacctaagaaatcatcaataaatatcaggcaatttctaaaagtaaagaatatatcatgaatattttcagggtttagggtaataataataatgttggcagaggtagtgatatcatcaaatgcctaagaaaatgaacctctcatatatatgatgactttcaggttaggattgatgaccaccttttaaaaaccgaggtaaaattcacacacagtgaaatgcacagatcttaagtgtaaaatctgtgagttttggtgtactccttaccctaatcaagacatcaaagccaggtgcagtggctcactcttgtaatcccaacactgtgggaggctgaggcggaaggatggcttgaggccaggagtttgagataagcctgggcatagcgagactctgtctctacaaaaaattagtcggacccagttgcacgctcctgtagtccagctactcagaaggctgaggcaggaagatcccttaagtccaggaatttgagggggcagtgagttatggtcatgccagtgcactccaacctaggtgacaaagtgagaccaccatctagaaaaataaagacttagaacatttccatcacctcagatagttcctttgttccctcttctccctatgttagtccccaccactcttttgatttgtcaccataggttggttttacctgttcttgaactttgtaaaaagggaatcatacaatatggacttttctgtttctggcttttttcactcaacatattgtttttgagatccattcatattgttgtatgtaccagtggtgtgttcctttttattgctaagtagattttcattatatgaatatacctcaatctgttgattcttctatttgatagacatttgggttgttttctatgaacattcttatacaaagcttcttgtagacatacgttttttatttttcttgggtaaatacctaggagtagaattgctgggtcataggttaaatatatgtttaacttaataactaataatttctaaaaaatggcactattatttattaggctggtgcaaaagtaattgcaattcttgccttttttttttttttttgagatggaatcttgctctgtcgccaggctggagtgcaatggcacgatctcagctcactgcaacttctgcttcccgggttcaagcgattcccttgcctcagcctcccaagtagctgggactacgggcgtatgccaccatgcctggctaactttttgtattttagtagagacggggtttcaccatgttggccaggatggtcttgatctcctgatctcgtgggttcttgcaatttaaatttaaatttaaaataattgcaagaactgtagttacttttgcaccagcctgatatatttttgccagcaatgcatgcaagttttagctgttccacatccttgccagcatttagtgttgtcattttaattttatttattctaacaggtgtgaaatggcacctcattatgattttaatatgcgtttccctgatgactaagactttgagtgacttttcctgtgcttattggccattcttatatcttcttttgtgaagtgttcatttcattctgttgtccatttttaattggctgtcttgattactgatttataagacttctttatagtcagataggtgctttgcaaatatttcctcccagtctatggactgtttttttttttaaattttcctaatgggagctttgttaagattaacaggtatttctcatttttttaaagtctaatttattcctttttaattttatgattaattctttttatgtcttctctagtgaatatttgtctaccccaagtttgcaggagatagtcctacatttttggtcataagtgttatgatttcagctttttatatttactgtgatcctctttaaattaatttttgtgtgtatgaagtaggggatgagattgattttttttctatgcttattcagtgttccatagcacctttgtttaaaaaactttgttttctgcactgatttgccttcattcctttgtcaaaaattaatttgctatatatgtgtaggattattatgatacactttcttctgttccattgatctttgtttttttttttatctccatgaccacaccatattgtcttaattatgtaacttaatagaaactcttgaaatctggcatatttcaagattggtttgtcccttctagattctttgcttttctctataaattacagtatcatcttactaatttctgtcaaaaaaaaatcctttgggaccgtgattaggagtctcaagctatttacccatttgggaaaagctgacaacttaacaatatagaatcttccagtccatgtacatgtattttttacttactagttcttctttattgtagcagtgttttgtgacttcagggttgagtcttgcacatcttttgtttatttcatccctaagtattttatgttttttgatgctgtcattaaagtattatttaaaaatttcataactcaattgtttggggctaatacaggaataccttggagatactgaggatttggttccaggctaccccaataaagcaaatattgcaataaagcagtaaatcaaatatttcaataaagcgagtcacatgaactttttggtttcccagtgcgtataaaagttatgtttacactatgctgtagtctattaagtgtgaaatagcattatgtctaaaaacaatgtacataccttaattaaaacatacttcattgctaaaaaatgctaacgatcatctgaaccttcagcaagccatatctttttgctggtggagggtcttgcctccatgtcagtggctgctgactgatcagattggtggttactgcaggttggagtgattgtgacaatttcttaaaataagacaacatgaagtttgacatatcagttgactcttctttcgtgaatgattctctgtatcatgcgatgctgtttgatagcattttacccagagtagaacttctttcaaaattggagtccgtccttcccctcaaaccctgccactgttttatcaactaagtttatgatggcgtaaattttttgttgtcatttcaacagtgtttatagcttcttcaccaggagtagattctatctcaaaaaaccacttttcttgattaactgtaaaaagtaactcctcatccagtcaagtttgatcatgagatcacagcaattcagtcacatcttcaggctcctcttataattctaattctcttgctattaaaaccatgtctgcagttacttcctccactgaagtctcgaacccctcaaagtcatccatgagggttggaatcagcttcttccaaagtcctgttaatgttgatatttttatctactcccatgaatcatgaatgttctgaatggcattcagaatggcgaatcctttccagaatgttttccattgattttgcccagatccaccagaagaatcaattatctgtggcaactctaggcttatgaaatgtatttcttaaataataaaacttgaaagttgaaatgcctccttcatccatgggctacagaatggataatgtgttagcagacatgaaaacattaatctccttgtacatgcccatcagcactcttgggtgaccaggttcattgccaatgaacaataatattttgaaagaaatcttttttctaagcagtaggtctcaagagtcctaaaatattcataaaaccatgctgtaaacagatacattgtcatccaggctttgatgtaccatttatagaacacaggcagagtagatttagcataattcttaagggccccagggtcttcagagttgcaaatgagcattagcttcaacttaaaatcagcagctgcattaacccctagtaaaagagtcagtctgtcctttgaagctttgaagccaggcattgacttctcctctctagctatgaaagtcctaggtggcatcttatttcaacagaaggctgtttcatctatgttgaaaatctgttgtttagtataaccaccttcattgatgatcttagctagagctactgagtaacttattgcagcttctccattagcacttcctgcttcaccttgcatgtctatgttctagaggtggcttctttccttaaacctcataaaccaatctctgctgtcttccaacttttcttctgcagcttccttacctctctcagccttcaaagatttgaagagagttaggtccttactctggattaggctttgggttaagagaaggttgtggctggtttgatcttgcatccagaccagtaaaactctttccgcatcagcaataaggctgttttactttcttatcattcgtgtgttcactggagtagcacttttaatttccttcaagaacttttcctttgcattcacaacttggctgactgtttcatgcaagaggcctagtttttggcttatcttggcttttcacctgccttcctcagtaagctttgtcatttctagcttttgatttaaagtgagagacataggactattcttttcacttgaacacctagaggttactgtaaggcttggcctaatttcattattgttgtgtctcagggaatatggaggcccaaggagaggaagagagactgggaatggccagtcagtagagcagtcagaacacaaaacatttatcgataaagttcactatcttatacgggtacagctcgtggtgctccaaaataactataatagcaacaccaaagatctctgatcacaggtcaccataacagatataataataatgataaagtttgagatattgtgagaattaccaaaatgtgacagagagacatgaagtgaccacatgctggtggaaaaatggctccagtagacttgattgactcagggttgccacaaaccttcaatttgtttttttttttttgtttcttttttttaaatatctatgaagcacaataaagcaaaatgcagtaaagtgaggtatgcctacatacagaaatataattgatttttttgtgtatattgaccttatatcccatgaccttgctaaattaacttattaattttagtatttgttttgtagatttctgatcattttccacatgacaattatgtcatctgcaaataaagacagtttgaccatttggtatggaaatgtataagaaatacatgagctatatttaaagataaagaggccaggtgcagtggcatagggctgtaatcctagtactttgagaggccgaggcgggcacattgcttgaacacaggagtttgagaccagtctgggcaacatggtgaaacctcgtctctgcaaaaaatacaaaaattagccaggcatggtggtgcatgcctgtagtcccagctatttgggggcctgaggtaggagaatcacttgagcccgggaggtcaaggctgcagtgagccgtgattgcaccactgtactccagcctgggcgacagagtgacatcctgtctcaaaataaaattaaattaaagataaggagaccaagaagcaaaaacacaaagaaaaccataatttaaaaataaaaatagctcttaattttttcattgttccttgaaagagaccttactgagaatgtagttggctagtttgaacctggccgagtatttaattcctcctattactttgtcttttctatcatcttttggttttttcttatatctttgagagtgctgtctgctttgattcaaccttctcaacttggattactgtgaattctttttttcctttatggatacctagaagtaattgtcacctttgagagtggtgatactctctcggtgactttagcaatccatttaatttcactgggcgtcagtttccacatctataaatgataggattttactatattactttctcagggctcttcccaactcctttgagttcttcatcttacctcacagtacatcagaggcaggcaggcaagtacaaaaagggtgttttagagctttactgttataggatttattgtattccctgttatttcattgcgaatatgctagataattaaaaatcaattgagttcattattaattctatgtatcctccaggtttgtcatttatatctgaggctctttgttgagtttactgttaactcatttacatttttctataacttatatttctaggcttcatagagcccagtgtgcaattaaacagactcaggtaactgttcagaaaattggaaaggaaattgaagaaaaactaagactcacatctacaagcaatgaactggtaggtttttatgtatttacctgtttacacttcttgttttctaaaggagagtatcatattcttctagggttaattttaaaaaacgctttagatcgtttttatcttcttaattgtccacagagagttctattggcatttaaatgttggaaataaactttcccatctgctaataatgtaacgcatgaagtgcctgctttattctgctagatgaaactttatattacataaaattacttagaagataattaacaggcagttttattaatgtgaactctaaacatgaactatatagcgaatgaaaaatagccgccaggaggaaaaaaaaaatgggagctaatctacttttgaaagacgaatttaaaaagtatttggattgagcaaaacaggctggtttgtggacagtgatctcttttgggaaatactcttattaaggaggcatttccaaagaaatagaaatcctaacccaaatgggcagatttaagatattagtataattttgagttgtttttcctagtggagtggaaaaatgtctattttgtaatgaatattgtgtttttctaagcacaatagtgggtatggctaataaattgagcttttttttttaaaagccacttgggtatgaatagcttttgaggaactttgtgctgtggattggacttaaaataaaattcagatcttcaaattaagttctagataaaattatttaaatatttgttcgtgtgaactcattatcacagataggcagcatcttcctattgtcatttacacccttctcaacttagcagagggcctttatatccccaaatgaaagctttttgttgccttgaagatttgcccaagataatcatatagtagaagtatagaaaagcagcaatgcacttaaccttacagaaacttctctctcatggaatttgaaattaatatattagttcaaactgtatacagttgctgattttctagctagtgctatagctggcaggtagcaaacatacaaaataggataactgcaataggtatagtagtaattcttattattcacttgactttccttgtctataaaaacatcttccgtttcaaaggtgctgttaaaccacctcttgttgtaacttagccccagcaagactaaatttcagactataaatatattgaagggggaggaaaaatcactaattttaattctttctgtagtgtataaaaatgctggatttttagaacccttggggaaaattgctgggttttatttttgttttcctctcccaaggaaagactgggaaattaattgttgcattaaatgacagcatatgctttatctcagtgtggaaaaatgtatttttaatcctgtttttaaaggaatataagtggtgacatacagagcaaggtaacagaatgtgtgagtttaaagaggtcaagttcagaggttcattgtgtgtttttatgctgcctagtcaacacagaagaaaaatcattggatttttgaactgaacgtgaacctagaaatcatctggttccctaataaccccattcaaaactatagccccctcagtacattctatcccttttcctgctttattctgtataatattcattaccatttaccatgatacatattttgcatatttttctctctctctaagctctataaggcgaggggtttttgtctctctctctttttttacattggtgtatttccagcatctagaaaagtgtttgccacacagtaggtgctcaataagtatttgttgaatttaagaatgaatctagcataatgtccttttataataggacaggaaaatgaagcttaaagaagggaaacagctttcccacaatcatttgacaatagagatggataatttggtttacttgtttccttttagagaataatgccatctacatgttaattagtcagtcactttgaggtttacctatagcatattagaaaactttactatttgtctttttgctcatttacttttcaaattggcccatggccattgtattccaacccatccatttccgatatttaagaaatcattttcattttaacctacgtaaaaatgcagcaaagaaggcatatttgatgttgaaagaaatcagattaccttccaagaccatatatgattaactgtgttataagaaattgggttcatagttggtgactttcaaaaatttggcatcttctcacattacatcaatgcctaatgttttttggcatttaattttatttcttatgaaatttctgctgttatcattttgaatttttacttatgttttataagttttttgtttgtttgttttgaggtgagatctcactatgttgtctgggctgctcttgaactcctggcctcaagtggtcctctcacctgagcctcccgagtagctgggattatagacgtgtaccagcatgcacagtttgtgtttcagattttgtcagattcctttcctgtatctgtttagataaatgtatgttttttctcttctggtattaaggtgaaatacattggttgattttttaatattaagccaactttgcattcctagggaaagccctcttggtcatggtgaattactttttaatgctcattactggatttaatttgttaaaaaattttaaagaaattgtgcatatgtatttataaagaatattggtctgtagtttgtttccttgtaatctctttgtctcattttgttgtcagggtgacgttggccgcaactcacttttgggaagtgttttctccctttttgttttcaggaaaaatatgtgtagaatgggaattatttcttaaatgttaagtagaatttgcattgaagccatctgggcctggaggtttttttgtgggaaggtttttgaactggaaattcaatttctttaataatttaccttttgcattaacttttgtagcttgtgtctttcaaggatttgtccatttcatttaggaggtcagtctttttacatttagctattctagcagttatgtagtattttctctttttgttctaaattgtatttccatgatgagcatttttcatatcctattggatatgcatgcatcttttaataagtatcagtttagggctgggcgtggtggcccacgcctgtaatcccagcaatttgggaggccaaggcaggtggatcacgaggtcaggagttcgagaccagcctggccagtatggtgaaaccccgtttctactgaaagtacaaaaaattagctgggtgtggttctatagttcattgttttgtatcacgtacgtaagggtaattttttccccctgcatggatatccggttgatttagcatcatttattgaatagtcttttcattccccatttaattgccttgacatgtttgttcaaaatcaattgatcatgtatatgtgcatctatttctggattttcttttctgttccattgatctatatgtctgtatttccccaataccaaactcacttattatcatagatttgtcatcttaaaatttgacagggtaagtcttccaactttgttaaaacttctgtggtttttctgggttctttatatttccaactgaatttgggaatcagtttgtcaatttctacacacacaaaaaaaaggtctgatggaattttgataagaagctgtagataaaattgtggagaattgctatcttaacaatagtgggtccttcaatccgtgaacatggtgtatatctcttttacttagatttctctctaattctctttataatgttgtagctttcactgtagagattttggacatcttttatttatttatttatttaattttgagacggagtctcgctctgtcgcccaggctagagtgcagtggcgcgatctcggctcactgcaccctccgacttccgggttcacaccattctcctgcctcagcctcccgagtagctgggactacaggcgtccaccaccacgcccagttaattttttaaaaatatttttagtagagacgggggttcaccgtgttagcctggatggtctccatctcctgacctcgtggtctgcccgccttggcctcccaaagtgctgggattacaggcatgagccaccgcgcccggcagatgttggacatcttttgttagagttattctgaagtgttttatgggagttttttggcaggggaggcattattgcaagtggaattgtttttaaatttttatttctcattcgtttgctgctagtatgtaataatacaattaattttaacttattaatcttctgtcttgcaatcttgttatattaacttattcattatgctagttatttatagttttttgggattttctttgtaaagaatcataacaggaaagtttgcacagttttatgccctttatttgattttcatccagtacaatgttggacaaaaaaaatagtaagaacaggaatcctcaccttgttcctggttttgaggagaaacaactcatcatttctctgttaaatatagtgctaagaatgcccttcattaattttaggaagttcctcttattcctagtttctgagagtttttatcacgaatagaagatgaattttgtcagatggtttttctatatccattgcaatgatcatatggttttttctttattctcttaatgtgattaactttttggtttattttcaaatgtttaacattgcatttctggaataaacctaaattgattataatatataattatttttgtattttgttggatttattcttataaatttttttccttcgtattgtcttggatttgctttggtaataatttaaggaattttgcacttgtatttatcagggatgttgtgatacaatgttttgaattgcgttttcagattttggtagtaggattatggtagcctggtaaaattagttgggcagtgttctttttttcctattccatcttgcccaggagcagaaatctggaccttttaaatattttctagttctctgctgatatttcatatccttttattcactataagaatatttcaatttttgtcgacatatatgtatgagtggctttaaagtttttgtaattctaacatctggatcatcttggggttggcatatgttggttttctcctccctagagagtgagtcacattttcctgactcttcatatattgggtaatactgcatagtattctggacattgtgaatgtaatttggtggaatctctggattttgttactttgttccaaaaaatgttgatgtttttattttagcaggtagttaacttggttaggctcaaactgtcatgcctgcaatgaacattggctcagattacagtgtagttcttttactcttaggcacaagcttctttctgtttgtctcatgcatgtgtagtataggattcagtcagagacttaggttgaatttaaacagaatttggggtgcccattctctgccttcctctattctggtatacttgattgcctgaccatttttccctggttcctctggtcagaaaggaagttgactttctgttggagtttgcagccaccctcagggaaaagccacagaaaaggggaatttcattttattggttgtttatgccaagttctgactcacctccaaaatatgcctgccattgatcagtctcaagaaccctcaagtagcaatttttgtattttatccatagtctatatttgttatccatagtctatatcttctatgagaggaccagtttgttgcatacttattcttttacaccagaagcagagctcctgtacattttattattatatatttttgctgtatcctcctggctaaatccgggttctaagcctgttactgctaagtctgtgaaattaatggataggaaatattttctgcggaaatcttttccttttcttagtggttgactaggtgtaggtccagtagaaacaacctgtaaatgacatttaaaagcagatgtgttaacttttgggacagctgccacaattttaaaaccttttttctgattgttatttattttcaatttggggggaagaattactacaggtgaagataaaatataccctaagctgtcaattctcaaagttattggtctcaagacctctttgtacccttaaaaatctcaaagaattcagtaatacatttttatgaaaaataagcatatttttctgaacaaaaggtttaattagcattacattgcttaaatattttgtgaatttaactgctattaagctaatgtctagcctaataaaagacacctggattttcacatctgcttctgcagtgaatctgttgcaatatcgtaagtctcgcagactctggtaaactccatcatacacttatgagaaaatgagagtggaaaagaggcatacagcttagtaatatgcgaatatgttttatcttacaagactctgtaaagatgtcaggaaccctcacaattcccaggaacatgcttgaggaacttttgacctaaggcaaaaagctttagctccaatatgatcaatgtgaagacacttgttccattactggttgaacatctcaaatcaaaaatccaaaatccaaaacactccaatgagcattttccttgagcatcatattggtgctcagaaagtttcagattttgtagcattttggacttcagattttaggatttggcatattcaacctataatatgttatttatacgttagtcatctttctgaaatgaatgtttaacatttcccatttttttggcagagactcataaataggaatgtgtgtatctgtgattttcagttcacatatagtgttgtataaaaacactaaaatctaattaaatgtaatctattggcgaaatatatgtgacattacacttggagtaaacagataaatagaacactgaaactcattagaagattatggaacattaagatctttgagcagttcatctttgatgcattagaaaggaagtagaactagatcccacatgggtttgtttactcatcagaaattggagccaacaattctggttttgaatgacttgatatatttctgtaaatgagccagtttctgaacatggaccataacacaaacactatacatatgccttcccatattaatgtagtatttagattaacttgtaaccttagttctttaaatctagaaaacatatctcagtatgtaccctggaatagagcaggttatcctcctagccaggcatatccctgtgttctctgaatatttgcttttctttttctgtattttctttctctgcccaggtagaattcaatttacatattttgtggaaaaattcaagttaagaaagttgaacacctcactctttgtgggaaaagattgcttcctaaagattttacctatctttttcctcagtgatgtaagaacaccttaggcttcttgattatactattgcattgctaaagaaaactcagattgtttcttcgttcctttttctttcataataaacagcctcattgactttttttccaattatttttgtggtaaaatacatataagatttatgatctcatttcatttttaaatgtacagcccagtggtattaaataccttcagaatgtcatgcaaccattatcaccatccatctccagaagtcttttaaactgaaactgtacgcattaaacactaactcctcgcctccctctactcccagcccctggcaactaccattctactttttgtctccgtgactttgactgtactctgagtaactcatataagtgaaatcatgcagtgtatacctttttatggctggctgtttcacttagtgtaatgtcctcaagcttcatccatggtgtagcatattgcagaaatttccttcctgattaaagctgaataatactgcattgtatgtatataccatattttgcttatccattcatttattgatagacactgggttgcttctgcgtcttagaaccttgtggacttttggtttctgtttttacagtggggtggcagggcaaaatggcttttatctccagtagacctaaattcatagaaagtagagaccatttctcattcatctagaagcatgcagtagggcctttattgatgtttggtttgttcaggaaaattgtttaggaatattctatgaaaggcatatttcatagacctttcaagctaaatataataatgattggaaataagtttttctgctgttttctcagcttgaatgtctttaacagatgatcataccatctgtttagaatcagtgtgtcagggatgagtaagaaagcatcttgggtgagaaatgatgctgtaagtacttttaatacattgccaaaaatcgttgtccatgcccgttgcttcaacgaggccataccatgatgcatctcactgagttcccacgcttcctcattgtgagtcaaatcaagatactaaccttttccttttaaagttttctatcagcttatcctggatcctggtaacctatttatttaatggatgagttttgtagttacaattttaattgtttactttataccttaggaaggagataaaaatttactagctataaccaaattgctgtttgcttaagatttatgtcataaaaaatgatgaaaagtgtattagtgacactgataaagactaggagagaagacacattcatagtgcagtaattatgtgtgtgcacacatatgcaggcacagacatattcattttggggacagaatttcagatttgtatctggaggtaaattcaggcaaggcttttggagaaaaaaagaggctgagtaaagtttaagcaatggtttgatgtagtatttatatggaaacgtaagttaacaaacaacaagtttaattgtatctctggctggtagaatgggtcaggaatttcattttattaaatgtgtattcagtaaaattgatttttaatgtaacttaaaaagtaaactttctttttcaaggtagttttagattcatagaaaaattaggcagaaagggccgggcatgatggctcatgcctgtaatcccagcactttgggaggccgaggcaggcggatcatgaggttgggagatcaagaccatcctggctaacatggtgaaaccctgtctctactaaaaatacaaaaaaattagccgggcgtggtcgcgggcgcctgtagtcccagttacttgtgaggctgaggcaggagaatggtgtgaacccgggaggcagagcttgcagtgagctgagattgtgccactgcactccagcctgggcaacagagcgagactccatctcaaaaaaaaaaaaaaaaaaaattaggcagaaagtacagagttcccatataacccaccccatccccaatttcttctgttaaaacatcttgtactcgtgtggtacaattgttatattgattaattaatattaatacattattattaactgaagtacatagtttacattagggtttactctttatgttatacagttctatgagttttgacaaatgtattatgtatccatcattacagcatcaaacagaatagttgcattgccctaaaaatatcctatcctccacgtgttcatccttttctccctcctctggcaactgatctttttactgtctctataattttaccttttccatgatttcatatagtaggaatcacacagtatgtagctttttcagactggcttctttcatttagcaatatgcatgtacaatttctcttttgatgggttgatagctcattttgtttcatcactgaatagtactccattgtatatataccacagtttatctgttgacctattgaagtatatcttggttgcttccaagttttggcaattatgaataaagttgttgtagacatttgtgtgtaggtttttgtgtaaacgtaagttttcagtatccaggttaatatataagagtatgattgctagattgtatagtaagactattttagctttgtgagaaactgccagactctgccaaagtggctgtaccattttgcatccccaccttcaatgaatgacagttcgtgttgttccatatctttgccagcatttggtggtgtgagagttttggattttattctaatgggtatgtagtcgtatcacattgttgttttaacttgcaatgccctaatgacttacgatgttaaacatcttttcatatgcttgccatctatatatcttctttgatgagatacctgttcagttctttgttgcatttttaaattgagttgttcattttctttttttttttggagatagagtctcgctctttcactcaggctggagtgctgtagcacgatcctggttcactgaaacctctacctcccaggttcaagcgattttcctccctcagcctcccaagtagctgggattacaggtgtacaccaccatgcccggctagatgtttttttgtatttttggtaaagacagggttttgccatgttggccaggctggtctcgaactcctgacctcagctaatctgccagccttggcctcccaatgtgctggtattacaggcatgagccaccgtgcccagccagggttgtttgttttcttaatgttgaattttaagagctctttgaggccaggcccaagtggtagatcacacttgggtaacatagtgagaccccgtctgtattttttttttttatgagagttctttgtatattttggagaccagttctttatcagatatgtttttttgcatagtttttctcccagtctgtggcttgtctttactcttaacacagtatcttttgcagattttaaagatttccaagataccaatttcttttttcatggatcttgcttttggtgttatgtctaaaaagttatctccaaacccagagtcttctgtattttctcctgtgttatcttctagaagtataatttttaatttcatgtttagatctgtgatctggtttgagttaattttttatgaacggtataagacctgtatctagattgattagtccctctcgcactcactctgtttcttccttctttcctttctttttttgcatgtggcggtccagtggtttcatcatttggtgaaaagactgtcctttctgcattgagttgcttttgtttctttgtcaaatattctttgactgtatttgtttgggtatatttctaggctctctgttccatttgattgatctgtttgtctgttcttttacccataccaccctgtcttgattactatagcttatggtaattctagacattggctactgtcagtcttccaactttgttcttctccttcaatattctgttgtatattctgggtcttttgcctttatataaactttagaatcagttttgatattaacaaaataatttgatggataattggataatttgattccacttgttcattgctgttacacaggaagacatctaactttttatacttattaattctatattctgcaatcttgctataattgctttttctaggagggtgtttttttgttttgtttgtcaattcttttggattttctatatggaaacaataatattatctgcagccaaagacagttttatttcttctttcccaacacgtgtagcttttctttctttttcttgtcttatttcattagctaggacttcaggtataactatggtgaataggagcgaaaggggatatccttgtcatgttctcaaacttaggggataagcatctagtttcttactattaagtatgatgttagctgtaggttatttggtagatgttctttaccagttaaggaagttcccctcttttcctagttagctgaaagtttttatcatgaatcgtagttggattttgtcacatgctttttctgcatctatcaatatgtatgatcataccattttttcttccttagcctgttgatgtgatgaattacattaactgctctttgaatgttgaaccaaccttgcctacccgggataaattacatgttgccatgttgtgtaattattcttatacattgttggatttgatttgctaatattttgtagtgtctttggtttttgtgttagggtgatgctggcttcatagaatgaattagcaagtgttcatcaacttctaatttctggaagagattctgaagaactggaattgtttctttttttttatactttaagttctagggtacatgtgcacaatgtgcagttttgttacatatgtatacatgtgccatgttggtgtgctgcacccattaactcgtcatttacattaggtatatctcctaatgctatccctcctccatccccccaacccacgacaggccctggtgtgtggtgttccccaccctgtgcccaagtgttctcattgttcaattcctgcctgtgagtgagaatgaggtgtttggttttctgtccttgcgatagtttgctcagaatgatggtttccagcttcatccatgtcactgcaaaggacatgaactcatccttttttatggctgcatagtattccatggtgtatatgtgccacattttcttaatccagtctatcattgatggacatttgggttgattccaagtctttgctattgtgaatagtgccgcaataaacatatgtgtgcatgtgtctttatagcagcatgattataatcctttgggtatatacccagtaacaggatggctgggccaaatggtatttctagttctagatccttgaggaattgccacctgtcttccacaatggttgaactagtttacagtcccaccaacagtgtaaaagcgttcctatttctccacgtcctctccagcacctcttgtttcctgactttttaatgatctctattctaactggtgtgagatggtatctcattgtggttttgatttgcatttctctgatggccagtgatgatgagcatttttaatgtgtctgttggctgcataaatgtcttcttttttttttttttttttttttttttgagacggagtctcgctctgtcgcccaggccggactgcggactgcagtggcgcaatctcggctcactgcaagctccgcttcccgggttcacgccattctcctgcctcagcctcccgagtagctgggactacaggcacccgccaccgcgcccggctaattttttgtatttttagtagagacggggtttcaccttgttagccaggatggtctcgatctcctgacctcacgatccacccgcctcggcctcccaaagtgctgggattacaggcgtgagccaccgcgcccggccaaatgtcttcttttgagaagtgtctgttcatactctttgcccactttttgatggggttgtttgattttttcttgtaaatttgtttaagatctttgtagattctggatattagccctttgtcagatgagtagattgcaaaaattttctcccattctgtaggttgcctgttcactctgatggtagtttcttttgctgcgtagaagctctttagtttaattagatcccatttgtcaattttggcttttgttgctgttgcttttggtgttttagacatgaagtccttgcccatgcctttgtcctgaatggtattgcctaggttttctcctaggggtttttatggttttaggtctgatgtttaagtctttaatccgtcttgaattaatttttgtataaggtgtaaggaagggatccagtttcagcttttgacatatggctagccagttttcccagcaccatttattaaataggatttcttgtttttgtcaggtttgtcaaagatcagatggttgtagatgtgtggtattatttctgagggctctgttctgttccattgatctatatctctgttttggtaccagtaccatgctgttttggttactgtagccttgtagtatagtttgaagtcaggtattgtgatgcctctagttttgttcttttggcttaggattgtcttggcaatgcgggctcttttttggttccatatgaactttaaagtagttttttccaattctgtgaagaaagtcattggtagcttgatggggatggcactgaatctataaattaccttgggcagtgtggccattttcacgatattgattcttcctatccatgagcatggaatgttcttccatttgtttgtgtcctcttttattttgttgagcagtggtttgtaattctccttaaagaggtccttcacatcccttgtaagttggattcctaggtattttattctctttgaagcagttgtgaatgggagttcactcatgatttggctctctgtttttctgttattggtgtataggaatgcttgtgatatttgcacattgattttgtatcctgagactttgctgcagttgcttatcagcttaaggagattttgggctgagatgatggggttttctaaatatacaatcatgtcatctgcaaacagggacaatttgacttcctcttttcctaattgaataccctttgtttctttctcctgcctaattgccctggccagaacttccaacactgtgttgaataggagtggtgaaagagggcatccctgtcttgtgccagttttcaaagggaatggttccagtttttgtccattcagtatgatattggctgtgggtttgtcataaatagctcttattattttgagatatgtcccatcaatacctaatttattgagagtttttagcatgaagggctgttgaattttgtcaaaggctttttctgcatctattgagataatcatgtggtttttgtctttggttctgtttatatgctggattacgtttattgatttgcatatgttgaaccagccttgcatcccagggatgaagcccacttgatcatggtggataagctctttgatgtgctgctggattcagtttgccagtgttttactgaggatttttacatcaatgttcatcagggatattgatctaaaattctcttttttcattgtgtctctgccaggctttggtatcaggatgatgctggcctcataaaatgagttagggaggattccctctttttcttttgattggagtagtttcataaggaatggtaccagctcctctttgtgcctctggtagaatttggctgtgaatctgtctggtcctggactttttttggttggtaggctcttaattattgcctcaatttcagagcctgttattgctctattcagcgattcagcttcttcctggtttagtcttgggatggtgtatgtgtccaggaatgtatctatttcttctagattttctagtttatttacatagaggtgtttatagtattatctgatggtagtttgtatctctgtgggatcggtggtgatatcccctttatcatttgttattgcgtctatttgattcttccttcttttcttctttattagtcttgctagcggtctgtcaattttgttgatcttttcaaaaaaccagctcctggattcattgatttttttgaaggtttttttgtgtctctatttccttcagttctgctctcatcttagttatttcttgccttctgctagcttttgaatgtgtttgctcttgcttctccagttcttttaattgtgatgttagggtgtcaattttagatctttcctgctttctcttgtgggcatttagtgctataaattcccctctaaacagtgctttaaatgtgtcccagagattctggtatgttgtgtctttgttctcattggtttcaaagaacatctttatttctgccttcatttcattatgtacccagtagtcattcaggagcaggttgttcagtttccatgtagttgagcggttttgagtgagtttcttaatcctgagttctagtttgattgcactgtggtctgagagacagtttgttataatttctgttcttttacatttgccgaggagggctttacttccaactatgtggtcaattttggagtaagtgcgatgtggtgctgagaagggtgtatattctgttgatttggggtggagagttctgtagatgtctattaggtctgcttggtgcagagagctgagttcaattcctggatatccttgttaactttctgtctcgttgatctgtctaatgttgacagtggggtgttaaagtctcccattattattgtgtgggactctaagtctctttgtaggtctctaaggacttgctttattaatctgggtgctcctgtattgggtgcatatatatttaggatagttagctcttctagttgaattgatctctttaccattatgtaatggccttctttgtctcttctgatctttgttggtttaaagtctgttttatcagagactaggattgcaacccctgcttttttgtgttttccatttgcttggtagatgttcctccatccctttattttgagcctatgtgtgtctctgcacgtgagatgggtttcctgaatacagcacacttatgggtcttgactccatcctatttgccagtctgtgtcttttaattggagcatttagcccatttacacttaaggttaatattgttacgtgtgaatttgatcctgtcattatgatgttagctgattattttgctcgttagttgatgcagtttcttcctagcatcgatgatctttacaatttggcatgtttttgcagtggctggtaccggttgttctttccatgtttagcgcttccttcaggagctcttgtagggcaggcctggtggtgacaaaatctctcagcatttgcttgtctgtaaaggattttatttctccttcacttatgaagcttagtttggctggatatgaaattccgggtcgaaaattcttttctttcagaatgttgaatattgcctccactcttttgtggcttgtagagtttctgccaagagatccgctgttagtctgatgggcttccctttgtgggtaacctgacctttctctctggctgcccttaacattttttccttcatttcaactttggtgaatctgacaattatgtgtcttggagttgctcttctcgaggagtatctttgtggtgttctctgtatttcctgaatttgaatgctggcctgccttgctaggttagggaagttctcctggataatatcctgcagagtgttttccaacttggttccatcctccccatcactttcaggtacaccaatcagacatagatttggtcttttcacatagtcccatatttgttggaggctttgttcatttctttttactcttttttctctaaacttctcttctagcttcatttcattcatttgatcttctatcactgataccctttcttccagttgatcgaatcggctactgaagcttgtgcatgcatcacatagttcttatgtcatggtttacagctccatcaggtcatttaaggtcttctctacgctgtttattctagttagccattcatccaatatttttcaaagtttttagcttctttgagatgggttcgaacatcctcctttagcttggagaattttgttattaccgatcttctgaatccttcttctctctgctcgtcaaagtctttctccgtctagctttgtttagttgctggcaaggagctgcattcctttggaggagaagaggtgctctgatttttagaattttcagcttttctgctctggtttctccccatctttgtggttttatctacctttggtcttcgatgatggtgacgtacagatggggttttggtgtggatatcctttctgtttgttagttttccttctaacactcaggaccctcagctgcaggtctgttggagtttgctggaggtccactccaggccccgtttgcctgggtatcaccagtggaggctgcagaactgcaaatattgcagaacggcaaatgttgctgcctgatcattcctctggaagcttcgtgtcagaggggcacctggccgtatgaggtgtcagtcggcccctgctgggaggtgcctcccagttaggctacttgggggtcagggacccacttgaggaggcagtctgtccgttcccatatctcaaactctgtgctgggagaaccactactctcttcaaagctgacagacagggatgtttaagtctgcagaagttttctgctgccttttgttcagctatgccctgcccccagaggtggagtctacagaggcaggcaggcctccttgagctgcggtgggctccacccagttcgagcttctgggcagctttgtttacctgctcaagcctcagcattggtgggcgcccctcccccagcctcgctgccgccttgcagtttgatctcagactgctgtgctagcagtgagcaaggctccgtgggcgtgggaccctctgagccaggcgcgggatataatcttctggtatgctgtttgctaagacctttggaaaagcacagtattagggtgggagtgacctgattttccgggtgcgattttccaggtgccgtctgtcgtggcttcccttggctgggaaagggagttccccgaccccttgtgcttccctggtgaggcgatgccttgccctgctttggctcacggtccgtgggctgcacccactgtcctacaagccccagtgagatgaacccggcacctcaattggaaatgcagaaatcatccatcttctgcgtcgctcacgctggaagctgtagactggagctattcctattcggccatcttggaacctccctgcctcttttttctggtattgtttcttacttaaacatttagtagaattcactgtgaaaccaactagaccttttttttttctcccctgtttctgaaggttagtaattgttaatttaatttctctctctctctctgttttgtttgtttgtttgttttttgagacagggtcttgctctgttgcctagactgagtatagtggcaggatcatggctcgctctagccttgaactcctgatctcaagtgatcctttcacctcagccttctgagtagctaggactataggtgcatgccaccgcatccagccaattttgttattttttatttttatggatggggtttcactgtattgcctaggctagtctccaacttctgggctcaagcaatcctcccacctgggcttcctaaagtgctgagattacagccatgtgccaatgtccagcctaattgctttattatctctttttcctactgtgagttttggtagattgtctttcaaagaattggtttatattagctaaattaccaaacttctgggcatagagttgtttatagtgtttttttattcttctgatgtttgtgagatcaattgtgataacccctctttcttcatattagtaaattttgccttttctcttttttccttgaagagtctggctagaattttttttttttttttgagatggagtttcactctcgttgcccaggctggagtgtaatggcgtgacctcgactaactgcaacctccacctcccaggttcaagcaattctcctgcctcagcctctcaagtatctgggattacaggtgcctgccaccatgcccagctaattttgtatttttagtagagatgaggttttgccatgttgactaggctggtctcaaactcctgacttcaggtgatccacgtgcctcagtctcccaaagtgctgggattacagacctggccctggctagagttttatcaattttatttaccttttcaaagaaccagttgttggtttcattgatttttctgtattggatttattctatttggatttaactggcttcttgaatatgtagatttctttcttctgcctaatttggtaagtttttaaatttaaaatttttagacagagtcttgccctgtcgcccagactggagtgtagtggcatgatcttggctcacggcaacctccacctcccaggttcaagcgatttttccgcctcagcctcccgaatagctgggattacaggtgcccactaccgtgcccggctaatttttatatttttagtagagatggggtttcactatgttggccaggctggtctcaaactcctggccccaagtgatctgcccacctcagcctcccaaaatgctggaattacaggtgtgagccactgtgcctgcccctaatttggcaagtttttagccactatttcttttcttttcgttttttttttgtgtgtgtgacagggtcttgctctgatacttaggctgaagtacaatggcatcatcatagcttaccgcagcctcaaactcctaggcttgaataatcctcctgcctcagccactgagtcgttgggattacaggcatgagccatcttgcctggctccattattttttcaaatactttttcagtccttctctgtttctcttttctttctagtattctgatgacacaaaagttagctcttttggtatagttacacaggtccctgatgttttgttcattttttttcaaggctattttctctcttgctaaaattggtagtttcagtattctgttcacagacttttccctgcttcctctgtgctgccattgagcccattcactgagtttttgttattttttgttctaaaatttccatttggttctttatatcttctgtttctttgctgagactttctagttttttttttcctactttttcatttgtttcaagcatgttcttaattgctattgaagcatttttatgttggctactttcaggtatttatcagaaaattgtaacacgtctatcatgtcagtattggcatctgttgtttgtcctttttcattttgtttggcattttcctggttcttggtgtggtgagtggtttttgattgaaacttggacattttgggcattaagttttaagtctctggatcttatttaagccctctgttttagctggcttcctctgagacctctctggtaggggaaagaagaggtgccatttcattactgccagatgagtatagaagtccagattccctatgcagcttccattggctaagtggcaggggagaaagctccccttgccttaattaatactggccaggagtggctccccactaggcctccaatgataaattcttagctgggaggaggagagatgccttgttacttctccccacatatcttccactgatatcacagaaaggagggtggcctcattagcactgggtagagtgaaagtgactctcaactaggccttctctaataccactgcattgggggtgggagagggttatcttattacagacaggtgggtggtaaaagtccaggatccccatgtggtgtcagtagttaccacatgggactcgtttggttactgcctagcagggatgaaaacctcaggcctctgcttggccttctttgaaacgggcaggggggttagagcacctcggtttggtttggcaaacgtggaaatctactttttgtttctatggatttgcctattctggacatttcatataaatggagccgtatagtgtgtggccttttaaaactggattctttaacatagcataatgtttttaaggttgatccatgttgtagcatttgtcattacttaatttctttttattacaaaataatatttgattgtatggataggccacattttatttatcctttcatcagttggtggacatttgggttttttatgtcgttcggctattatgagtaatgctgctatgaacattagtattcaggtttttgtgtggacatgtgttcagttctcttggtatatacctagaagtggaatttctgggtcttatggtacctctgtatttaactttttgagaacttacttattattaagttttaaaaatcttattgtattgtattgtggtatcagggaaggtacctgagatattttgtgtagtgtctgttgggtccccagacttaagatttacttttactcttattctttgcttatttctatatgattttcattaaaaggatggtgctggtaattaagttactcaagagttccataagtttgatgagtattaaaatgttttaagccattatttatttttaaacattgtgagtatgtaattattcatagtcatgacatttatattcataaatatacctgtgattttatttatttagaaaaaaaaaagtgaatgcctgcagttaaaaattttggtgcttcagaatgaactggaacggcagaagaaagctttgggacgggaggtggcattactgcataagcaacaaattgcattacaagacaaaggtgagtggaaataccatacaaacagcctaacctccacattcagtagttctcctttcttcttcttcacaagctcaaatagtcattttttgtgtaaatacagtcacacatcacttaatgacagggatatattctggaaatgcatcctttggtgatttccttgctgagctgccatcatagagtatgtttacacaagctcagatggtataaactactactacacacctaggctatatggctgtaaacttgtacagcatgttaccatactgaatactgtaggcaactataacacaatggtgagtatttatgtatctaaatatatctaagcatagaataaaaatactatgctataatctgtgggaccgccatcttgtatgtggtttgttgttgattaaaacatcatcatgcagtacatgattgtatggtgatagaattttctcaaatttttaaaatatttttgcaagtattttgaagttagtccatagagacaagtgtacagatctgtattcaaatcgtcccggacttacaatggtttgatttaatgatgatttaacgtacgatttttcagttttacaatgtgcaaaagttatatacatgtggtagaaaccatactatgaattttgaattttgatctttttccaggctagcagtatgtggtatgatattttcttgctatgctaggcagtgacagtgagctgcagctctcagtcagccacatgatcatgagggtgaacaaccggtactctataatgtactctgttgctagtgttttttggatattgtgttttatgttttcacatcccatcaagtctacaaagtgctcatctgtgtacggtattcaatgctgtgttataaaataagttttgtgttagatgattttgcccaactgtaagctaataaaagtgttctgacaccttaaaagtaggctaggctaaggtttcatgatcagtaggttaggtgtattaaatacattttcaatttatgatactttcaacttacaatgggtttatcaggatgtatccccatggtaagttatggagaagttgtgtccacagagcttgaattttcacaaagcaaacatacccatgtgagcagaatctcaatcaagaaacaggaccccaaagcctcctcacgcttccttccatttaccacatctccagccagactagccactgccaagactcaaaccggattggttttgcctaattttgaactttatagaaatagaatcatatatgtacatgtggtggctcttttcaacattatgtttgtagagtcattcttaccttcatgtggttgcagtttgttcgtgtttaatgccaaatagtattccattatataagtgtgaatttatttatctactcttgctgttggtttcagtaattttcattttgggaacattagagttaatgtttccatgaaccttctaggtttctgagtgaagaactttcatacgtttcttaataaagatttttaggtatttcagttgagtagaaactgaggagtagaattacagtcaagagaatgtacgtatcttcagctctagtagattgtgcccaatggttttccaatatgattgtgccagtttatctcccctctgtccagtgttgctccttcctacatccttgtcaggaatttcttttctttttttttttttttgtatattttgtatttatcgcatttggtaatttgtatttttcgttttagcctttctgttggatatgttgtaatatcctcttgcagttttaatttttattttcctgaagactaatgaagttagtctttcatatgttataaattttataaacatttcatatgcttcttgctgactgagatacactcttttgtgatatacctgtttgaatcttttgcccattaataaaaaaagtttggtttgactgtctttttgtttgtaagatttctttatatattatggatatgggttctttttttggcatatgcttaaaaatatattctcccattctgtggcttgctcgttcactctttaatgatacctttaaatgaacagaagttccattttatcagtctttcatagatgaggctttttgtgactacttggagaaatatttatctattttaagattttatagttgtttttctatgtgttctttaaaatactttactattttacttcttacatttatatctataattcatctggaattactttttgtatgtgatgtaaggtaggagtcgagattattttttttcgtattgatagtcagttgacccagcaccattcactgaagatcatcctttcaccattgcgttgcagttttgcttttctcataaatcagatgaccatttgcttgtaagtctgttaagaaccctctgttctgttctattgatctatttttctggtcctttgccattatcttgctgttttaatttttttcatgttataataggtgttgatatccattaaagttcttcagcttaattgtttttcttcaagattacctcagttatttttgccctatgtcattttcatgtgaatttctacatagaaaagaaaaccttgctaggatattttttcttaattgtcatacctcattgctgggatttgctaggattttgatggaactgcattgaatatatttatcaaatgtaattggggataatagacatctttacaatattgaggcttccttcccaagaaaatgatatatgcctttgtttattagatcttctttacaaaacgttatcgaaataagatagtgtatgggtctttcccatgattcattgaatttatttctattttttgttgttttatgatactattgtacatatctttaaatcttatttttactagtttctggtatatagatgtacaattaattagttttttttaagtggtattagtatttattatgtttaaagaaaaattcaccggaagccttatagacagattagtaattgttaatgttacagttacagccctgcagctgcagtcttgctgtggttatttatttacattctaatttagttgcattataattaaatttcattacactaaaattagtaatgattttaattatttgttacaaatataaaaaattgcagaaaattaaaaaatcagattattgagatataattcccataccatataattttgccattgaaagtgtataattcagtttttcttagtttattcacagagttgtgcagtgatcaccacaatctgattgtcctacctaaaagaaaactcatgtgcattagcagttattccacacttcccctcccccagttctaagtaaccacccccctaccttctgtctctagatttgccttttctggacattcttttataaacagaatcatgcaatattgtggtcttttatgaccaacttcatttgtttagcgtaatatttgtaaggttcatccacactgtatcatgcatcactaattcatttttactcctgaataatacattcagttatatggatatgtcacattttaaaaatccactcatcagttgttggacatttgggttgtttccgctttctgtctatcacagataaagctgcttatgagcattcatatacaactttttgtagggatgtttgatttcattcctgttacgtacacctggaagtggaattgctgggtcatatgagaactctatttttaactttttgaatgactgccaaccattttccacaacagctgttttacattcctaccaacaatatatgagggttccaatctccccattttctcaccaatatctgttattatctctccttttaattatagccatcctactgaatatagcattgtttctcattgtagttttgattcaaatttacctaatgacttacatgcttcttacaccagattttcgtatgttaattttatatccaaggaacttattaactagttctaataattgttagattgttttgaattttctgtttttacagtcatctcacctgcaaatgatggcatttttatttctcatttcctaatacgtatgcctttaaaacttttttcttacctgattgtgttgtctgagacatccagtacaatattaaatagaagtagtatcagtggatatccttttctcatttccagtctcagtgaaagcctttaatatttcatagagggtttaataaaacatagaaggtttactataagcatttttgtagttcttattttgtggtttaccgttttgcatcctttacccattttgtcatttttgcattaactgttttttttttttgagatggagtttcgctcttgtctcccagactggagtaaaatggcgtggtctcggctcactgcacccctctgcctgctaggttcaagcgattatcctgcctcagcctcccaagtagctgggattacaggcacctgccaccatgcctggctaatttttgtaattttagtggagatggggttttgccatgttggccaggctggtctcaaactcctgacctcaggtgatctgcccgccttggcctcccaaagtgctgcgattacaggcatgagccaccagcccggccgcattaactgttcttttaatgaattgataagagctcaatatgtgaattttcatttctttgttttttttattttcttaaaaatcagttttaatgaggtatattttacaatcaaattaatcaatttaaaatacacagtttgatgagtttagctaatgtattcaggcaggtagctaccaccacaatcagtgataacatttctatcattgtaaacagctttttggccttgttgtagtcagttctttcctccatcgtttgaccactagcaattactgatgtgctttctgataccattttccttttctagcatttcatatgaatggaatcatacaatatgcactttttatatctggctctttttcacttagcatagtagctttgggatttatgtggttgtatgtgtcaggaattcatcttttcattgctgagtagtattcactgtatgtacatacaacttgtttatacatttacctgttaatggccattgggtttgtttccagttttgaattattgtggataaagctgcatagatattcaagtataagcccttgtgtgggtatattctcttggttaaatattaataactaggtgtgggattgctggggtatagtaaatgtgtgtttaactttttaaaaactactaagctgttatgcattttcaactagcaatgtatgagagtttcacttagtccacatctaaacattaattttagattttagccatgttagtgggtatgtagtggtttctcattgttttaatttgtatttccctgataactattgtggctgagcatcttttcttgtgcttatctgttacctgtttctttcctctgatgaaatgtctgtttagatctttcatctgttttttggaaagtggggaagggggatggatggtaacgttattattaagttgtaagagttctttttatattctggatatgttctttatcaaatatacgctttatatgttttttcttccctatcttaacagtgtattttgagtttattcatcattttttttaaactttattcttttccttttttttgagatggggtctcactcttttgcccaggttggagtgcactggtgtcatctcagcccactgcagctttctgggttcaagagactctcctgcctcagcctcctcagtagctaggattacaggcgtgtaccaccacgcctgggtaatttttgaatttttagcagagacgtggtttcaccatgttgtccagcccggtcttgaactcctgaccccaagtgatccgcctacctcccaaagtgctaggattacaggtgtgagctaccatgcccggccacttctggaactttctttgtgtttgttcaccctctgcattgtggcctggaaacactccccatgtagtgatttggagccgttatagggctcacgtttcttgttttccttctctcaggaatcattatactaggctgcctcttatctattgtctgaaaactgttgttacatataattttgtatgactttctagttgtttacagtgggaggaaaatctgatgtatgttattccatcagtcagaaatagaagtcttttttacctctatacttgcttttatgagaacacactttactcatctctccttggtttagttcttttggttcttcaaagacatgctcaaatactacctctccttgaggcttttttctccctcaaatgaaagtttcctgctccttcttctgtgtccccatagtgttttgatgtcgtcttatcttcgcacttatttggtaagccctttcagggcagggactttgcacttttatggtatccttctcagtgcccaacactgaggccctcagtgagtattacacagcatgaatctttgaggggctttcatataggtaatgtaccattaaatgtagtacatgaattatttaaccttattttatttgttgcatccttttgtggtttcctgtttagtttttggtgtatttcacatagttgacattggtggataaatgagatataataggaaacagaaaacctactgtggcaagagtgtatttggaatgtgaataaagtaagtcatttttagcaggttttaaagttttgacctatatgaagtatagtttacattacaaagaataattttataaatgtgatttttcttcatttcagtaattttagaaaataagtttctaaaggaacaggctttgattcagaatgccttgtttcacaagcctacttcattgtttaccagctgtgtaaccttgtccaataacttagtgttatctctacaatggggttaatagtaatacttaaaactgtgtctcactgagttttaacaggcttccaagttctgctgatgtttctggtctgtgaaccacattttgtgtagcaagaatatgtataatatgatgatcagatgagttatgaagatgaaatggtctcataaaaataggagcaaaacaccatctgttttattcctatgtcatactctcgtgggtttctgtacctttaagataaaagtctcagcccaagatgacttacaaaggcctccaatggctcacctcaatctgaatgcttcaaccacacagaactcttttagttacttaagtatgctttgttctatcttacctgcatacaggcctttgcctaaatgttgttttcaccaggaaaccatcactggctcccttctctttctcctcccacccctaggttaaatgtactactgtgtgtttccatagcaccctatatttttccatgatagcactttgattattagtctatctccttctctagacagattctgagggcaggcactgttcaaggactacattaaatactcatatcttttaggcatggtatagtacctgggatatagtacacatagaataaatatttgttgaatgaaagcatcgtacttatgcttattggtgtcatgtcatgggtatcattgctaaagaaagacttctctaacttctagtttatcattcatatgggaagactgatactcttatgagaaagactgcagaaaaagtgtatgttgtttggcagtgataagtatctgcattccaatacaacttgcatatttataaatgagagtcaaaaggaataatgccatttaaaatcatgaagcattatgataaagtccatttgtctttgttagaatggccccaaataaatagacagttgttttgtacatacaaggcctgcttcaaaagatttcatcttctgtgaaaagacacatttcttacagtgctttggaagtaccatcaacttttactgtacttacattgcctgctatctgtggcatatatttctgcatatcttaccttttttaagatcattaactttcaaaatgaaaacactataaggttgtaaagggtttagggacttttgaccttttctagtaagagtaataatagtagcaataatgtatccagtacagtgcttattactataaatatgtaatattgtttaatcactacaataactttatgaggtagatgctattattatttaccttttatagctgaggaaactatgtcagggtcagagagattaagtaacttacttaaattcatgtagctaatgagaggtgatgttgagattaaaatctactgattccaaaactgtcaatcactgaataatactacatttttataactagcatgatatataaaaccaaggggtatatattattctagaatatggtaaaaagatagggagatatagttctttaactgtttctggttgtatatttgcctattaggatagaaagaggtcccaggatgtctatccttagattataagcaaatgaacatctaaacagtgatatctataccatttacaagactgaggtttaataataattgctcatatttagagaatatgagcttgtatttatattttatagaacacaagccggtattaattgctcttatatatagaatattagtgccaggaaatgtcatgttttctattctttatctaattttgtcctaatagtcctatacattaaagatactattattatccttctaataataaagatactacatattagtacccagtttgcagatgaggatgatttgtccaaaatcacataacaagttatgtgcccaaagccacatgcatagcaagttatggcagagcctgtgttcagagttactgctgcctaactgtgctgcgaagggagattatagaattttatagatatctcttctagtattttaattctgacagccaagtcagttgcacattcttgaatctctattttatcatggagagaaagaatggtaatcttcaagttaaatatgtatttgtcatggagggtcacaattgttgatttttaacactgagtttgtacttgaagtgccattttctcacttttatatatgtttttgagatgagaattactttgtattcccctggactattagaatccttagaaggttaggatctaatgttgatactttggttcctaacataagtaggagaaagagtgctgctgttggcttcactcttattcccattgcgaatgtttgtgggctgtggtgatcggcactggggagtgggaaagagggggatggctggatacagataaccacatttatttactagcataacctggtctactttttgggcacctgtgttcttcatagtggctgtgctaggtaaccagatacgtacttgttcttcaatattctattctaaacatatactattatatgcttgtgttgaacattattcttgtacatttacatgaaggtactatttaatgaatcttgagccaagttaaaatattttgaaagcaccatagtcactggtatttgctcaacgaaggtgaaaaaggtatttttctcttgcatttgcagctttgatttagtttgtttgctagggagtagtgaaatgatttgctgatatgaatattactagtgcgttcttacatattgtgactggcacttggtgcttatctaggtacttggttctgagtccaggagctcagttaggatataaagtcagtactatatcatatttaattgtgactttgctgctgattattctgaatgaccacaaaggaattatttactgtctgcatctttttacacatctgttcagtaaggatagctgctaataatactgacataggaattaatttgtgtaaacatttggaagaaaccaggtgcttatatttttgttcatgaaaatccattgcagcaggatgatttattggaaagtgccaaaaagacaatttttatccacgctgctgacttgctgagtggtcacataactccaaagggcctcattacttcacactcatacgttttcccttcctatccctcaaaggcagtggttctcaacttgtggtctatggcaacttccagctgggtcatgagctgatcttttcagtattaatgtttattagtgtatatattttcatttctggaaggtattagtagtttaacttaggatgtttaataaaaaccagatttcccctcagtaactcaagccaagtaatcttcccattaatgaattctgtgttgctttaccgggtcttttgtcctgacacaacccccaaatctttgaaaagcaacactctatcaaaattagtttgctggaaacttagctcaaaaaatggtatgaaatgttggttttatggaagtgtgttcagtagaatgtaggtttcttattgtattagtccatttttgcatcactataatgaaatacctgatgctgggtaatttatatagaaaagaagtttaattggcttacggttctgcaggctgtacaggaagcatgatgccaacatctgctccaggtgagagcctcaggaagctttcggtcatggtggaaggtgaagccagtacaggcgtatcacatggtgaaagtggaagtgaggggggtggggagaattgccatactcttttagacagccaggtctcctgtgaactaccaaagcaagaactcactatcaccaaggggatggcattaagccatttgtgagggatccatccccatgttccagtacttcccattattcctcccctccaacattgaggatcacatttcacacaagatttggaggagcacacgtccataccatatcacttataaacaaatgttgataaaaacccaagaatacttcagtggtgcctgggaagtggtattaactttataaaaggagagttctccaaactttgtgggaagaagctactttttaatacaattactttcttgataataaggataaccatacagttaaaaagtgcttatacagaagttcttatgtttgatccttaaagcatctctgaaagctaagtagggcagatgttaccctcattgtatatgtgaggtactgggaagttaaatgacttggccaggaacacacagacaattagcagcaaagttgagatgtggacccaaattcagcacagatttcaactctaaattctgtgcttttctcagtattccatactacctaaaactttgcaaaacattcgtttgaatcccacataaatcacatgaagtagataacttttattgaaatcctgtaacatgccagatattttagttttggtatattattaattcttaaaatagtcttaagatatcttttttaccttcttttcccaaatgaggaaaattagggctcagagacacttccctgaggtcccaattaagtgacagatccaaattcaaacattggtttctcttactccaaagcctgtcttgtttccactaaacgaaacgtcattactgctttctctagtatgtgtccgggtcaactcacagtttgctgtttttctatttggcctgtgaggtgttagctagagaactttgttttgctttgttcctttttattatagtatggctgaagtgaattttctccaaagattgctttgatttgggtctgccattttccaactttgtccttagacaggtctttcaactttttgagcttatttcctctgcataaacaaaacaaaacaaaaaattctgaattatacagtcaagatttctttcagctctattaagattttggttatctcagaaaggtaggactggtggaaatgatggtgatctgttcaccttttttaatgcctctctttattattgttattattataagtttaatgctgatgatatattttccagcattttataaaagttttttttttttttaatctttgacccaagtgtgtctatgattgttgcctgtttaatactgaaaagccatttggtgggaatgacctattagaattctgtaactagccatacttttctcctattttactttggcaattaagagcaaaaacaaacacattattttggtggcagtgaataggagaggtcagatatgtcagatttcattgctcagatttggggaaataaattacccttggtaatttcagtgaataaaaagttgttgccaaaataaatattttatgtgaagttcccatcaactgtaatagtttcttattgtcattttgaaaaaaaaaaaaaaagagtaattaaggtgacctacatatgtagtttgttctatttaattagcttctgcttggttagtaaattactgtgtccttttggtctgcatctcagataaaagaagaatcacacagtatatttaaattgatactttaatttctatcaaaagctcataggtttctatttgaagttgtaaatacattattaagtcttgcataacaattttttccttttcttaggtcatacagttacttatgaaaagttacttctcagtttttaaactcaaaatatatttatttgaaatgatggcaaaatttaaattttattagtttatatgtgttctgattttttaaataaccatctgacagaaattcttaaataggcatcttcaaaattattaatatctaactttcaaaaaaaagtctggacctgaggacagattctccctaggatttatgctattagcaataaaagccagacaacttgtggcaggggtattttgggggaagaggtaggtaaatatgagtcctgagcaaacttctgattttatttcagtttccatgtaagtatagtaatttattccagtaatgtcttatttgtttgtaggaatggcaaactgtcatattttaatctctgtttcccatgggaggtatagatgtgtagaaatatgccacctgacacaattgtatattggtttgtcataattttttctccacttactctcaaaatgcactggaagtaacatttacaaaaaaaaaaatacatttacatttaggtggttgaagatagaagtaaaaagagagcatatgacttgtaaaggaagtagaaggagcattgatttttatttttctgcatatatgcctttgtcaattcatttattcataatttgtggaacactttcaaagaaccagacattgcgattagagtcaacatggcaggtgtgataaatatgtaaccgaagtatatagaggatactgtaggaacacagaatataaacatgataatcagaacaacaggtacaggaggtgacacactgagcctagaagaatatatagtattgttctaactagggggagaaggtgagaccttccaggtaaagggagcagtttatacagaggcatggaggtagcttagggaattgtgagcaattccagtaaagcttactgggggcaggcacaataatgcaaatgttaagaatgaaattctccccattttacagatgaggaacatgaagttcagagaagttgaaacttgtctagagtcttgaaagtagcataggtaggatttcaacctagatctttctgattcataagtccatgggctttctaaatacagttcactgccttccatagaatctgcttattgttcttaagaactaatattagctctgacctcagctgtcaagccaattgtgtagaggtatgacagatatcgtttgttttacattgcctgttaataaggaagcctatcagttctttaaggggagaaataaaaatactctcttagcactaaatgcagagaataatttagtttcatatgtgcaatatattaaatatcataatgaaataaagtcagttgtaattttgcaaaagttacagcaagaaatatctgttaacccttgagaaaggcagcatcataaatcatagtatagaaaaggcatttctgcagggaaggaagctaaagtactccaagtatattgctttttggtcatctgacttaatgtggaaaacccagaagaatgacaatttattggttttaactgtaattttgacaggagctggccattggccagtctcagaccaaactctggtgagagagaaccaagagtctgtgttttgttttgttgctggaagcaagattcatagtctttagctattatatttataggagccaacattgacattttgctgttaaaattatattgcctgacttgtgttcttgctgaacagagaggctatctgatttaacagagtagaacattgatatatgcctggacagggtcaaagcagttttggaagatggtaaaccaagctccggcatttttgttccctctctcccaatgacctattgatgtgataataaatatacatgtataaagaatgaaaccatggtaatggtagaaacaaaagaggatgtcattgggatagcaaaggttttggcacagttctccaagatacaaagtagataggactgttttgatgaataaactaaagtagagaaaaactgcagcctagaacacaaatagaaacggctgcaggtagggttcctgatagaaccatcagaggcttcaagcttggaatttgccagtattgagatcaagaattaagtagagcaataatcagggtaattgagcctgttggcccattctccttcttgtgtgcatttggagcagctttctataacatttgctgtagctgctttctaaacataatggattcctgacctgcttaggtcccacggtataagtgtttgacatggtagaaagttgcagtagaacttaaagtgactggacttttatcgccaacccagaggaaaacatgaaagacaactctactcaagagtgaaatacctaccccaaataaaatcccagtgtgaagctcccttgacagttgcagtaatttgaagtaaaagtataccttctcccagcatatatacccagaaggaaagcctagttgtcaacaggaccagctcacttatactaatggcactaaggggtgaggctttttatggaaataaatctcatagctccagaggaaacctatgccagttgtctatactaatcagtctaatcacttattcatgggtttgaaaggagcactaaggatcatcagatatttgaggaaaacagcatgaatgagacctagttgaataaacagaatagctgacccaaaataaacagacaatacaaagaatggagaacttttaaaaaatcaaattaatatcctcagattttccttccagcctctgcctaagatgtaggtgaaaggagtttcacttctaccctgagaataaagaaaaaaaaacactggataatatacaaagtcataacttttcttaaatccatcagaaaactaggatctcaaggcaacgaagtagcttgagtgtaaggaaagacagacaacctccaaggagaggtaggatgtgagcactgattactaatggtagagcatgggaagaagttgggggctgctgtgtaataaggtgaaataattgagctaaagcttttaacaaatcgttaatgaccaagtgtagactagtatgtgactacggcagatataaggcagtttttactagcttgcagtttcttctgcatagacctcttttggatattcacaagaaagattgaggacaggttaggaaatctttgttcttctgcaggtaatgtgtcttttttctatggctgccttggacattttctcttcatttcttgtcttcagcagtttgaatatgatggtctggggtgtggtggagcaagaaggagggaggaagggaatatgtgtgttttcaggtggatcacctgaggtcaggagttcaagaccagcctggccaacatggtgaaaccccatttctactaaaaatacaaaaattagccagacatggtggcgggtgcctgtaatcccagctactggggaggctgaggcaggagaattgcttgaacccaggaggcagaggttgcagtgagctgagatagcaccactacactccagcctgggtgaccgggcaagactctgcctcagagaaaaaaaaaaaaagatagtcaactttctaaggcaaaaataatggtgtttgtgggcttatagcatacataaagtaaaatgtatgaagaatttaaaaactgggaaaaggaagaattgaaagtatacttttttcagttgtttttttgtttgtttatttgtttgtttttttgagacagagtctcactctgtcacccaggctggagtgcagtggtgcaatctcggcttactgcaacctccacctcctgggttcaagtgattcctgcctcagcctcccgagtagctgggattacaggcgcacaccaccacacccggctaatttttgtatttttagtagagacggggtttcactatgttggtcaggctggtctcgaactcctgaccttgtgatctgcccgccttggcctcccaaagtgctgggattacaggtgtgagccaccgtgcccagccatatttttagtttttttatgctctacatgaagtggtataatattacaagctgaatatttctaatcagaaaatctgaaagccaaaatattccaaaatttaaaacgttttgggtgccaacatgatgctcaaaggaaatgctctttggagcatttcagatttcagattttagggtttaggttgttgaaccagtatgtataatgcaaatattccaaaatctgaaaaaaaattaaatctaaaacacttcccatcccaagcatttcggataaggtatgctcaacttgtttttgaaggtagactatgcttaattaaagatacattttgtgaactcctgggcaaccaataaacatttttaaagagcttaaaaaataagccaatagtgaagaaaaatgaaatactgaaaaatactcaatccaatagcatttaaaaagagagagaaaggaacaaagaagaaatggaacatactgaaaacagctagcaaaatggtagattttaatcataacaatgtttatattaggtgtaagtagtctgaatattctagttacaaaagggattgtccagatttgatttacaacaaaacaaaaaacaagacccaaataaatactatctacaagaaatccactttgaatataaaggtagatatattcccaggtgtggtggctcacatgtgtagtcctagcactttgggaggccaaagcaggaggattgcttgaagccaggagttcgagaccagcctgggcaacatggtgagactccatcaacacacacaaaaaaacttaaaaattcaccaggcatgatggagtgcacctgtagtcctagctacttgggaggctgagacaggaggattgcttgagttgaggagttggaggctgcagtaagctgagattacaccattgcacactgcagcatagcctgggcaacagagtgagaccctgtttcttaaaaaaaaaaggaaaaaaagaaaaaagttagatagattaaaagttaaagaatggaaaaagatgtaccatgcaaataacagtcaaaagaaaactgtagtgtctatattaatatctggcaaagtagacttcaaaacaaggattactacctggaataaagagggatattacattttggtgaagaggtcagttcaccaaaagacgtaacaattctaaatatgtgtgaacatagcaatattattttaatacagataaagcaaaaatagatagaactgaaaggagaaataagcaaatgcacaattatagttagaaaccacaacactcatcctcagtgataaagacaagtagagagaaaatcagttaaaagacattactatcaattttcttcacctaattgatagcataccactccactgaacactagcagaatctgcatttctttcaagtatacatggaacattcagttagaccacatttggtaccataagacaaacaaatacaaaataattaaaatcatacaaagtatgttttctcaccaaaacagagtaaactggaagttactaacagaaaaatgtctggaaaattccaaatattccacaattacacaatatatatatcataaaccacgggtcaaagaagaaatcacaagaaaattggaaagtattttgaaatgaatgaaaatgaaaatacatttgaagtttgaggtaaatttatagcatttcatgccaatattagaaaagaaggtctccagtcaataatctaagcttgtaccttaacaaattagaaaagaggagcaaattaactaaacccaagtcaaatcgaaggaaggaaataataaaggccactaatcagtgaaactggaaactgaaagagtagaggatatcaatgaaaccaaaaggtagttccttgaaaagatcactaaaattgataaacctgtagccatattaactaagtaaaaagagagaaaataagaattaccaatatcaggaatgagaggggacatcactacagatcctacagaaattaagattataatgtagtattttaaaaaacatgatggcagcatctcacaaggactttagaggcaggttgaagagagtcccactggttgaatctgggatcacttaagcaccaaataattatgtacagtaatgagttataaatcattgaaaaataaaaaggagttaatgattctttactgataatggatagttaatagagaagatgggggggcttctgcttagagaagaatgctgagtgctgactgatgattatggaggaattactgaagttggaatattatttttcagcatgtttagtaaagattgatttaaacagaaaccattaatcaagctcattctagggagaaatttatatgagaagcaggacgtatgcatgctcttaaacatggacatcattgcttccagatgtgatacccttagaaggacacaacatcagtcatgtagtattcaggttggtaatataaaacctgaacaacccctgtagagcttgagtataccattgcatcagtattattacttattttgaagtgacttttagaatttaggttgagttttctggagtatcttcaaatacttagttcttctctatctgagcctaaataacccaaactgcttcagttttattccagagcccactcctatggaaccaataagctgtattacctttcatagagaaatgaatgtggtatgttacattttgttagctgattgggatattttttttaatttcctttctaccacattgcaaggagttttcttgaggggaggtcatgtaataacacattctagagtcttctgaactgaggaaggggacactcatttgtgttttgaagaccagatctgtctttggtccctatttgtggtcttgttaacattgagttgaggcagcctaaattatctgggatgaagaatgatactgcacgtttctctagtggtagaagaattcatatactttctgatgaagtatgtggggatagagggtgtcaacctaaatgtcttaaaaaatcactaaggtgaagatttgggaaggagttatattgtgggctaaaaagttaagttgtgttccttggttaaattctgttggggtcagagttcccaacttactggtcttcatagtatgttgaaagagaagagaagggtgcttaaatatgttgggaaggccgggcactgtagctcacacctgtagtcctagctctttgggaggccacggcaggcggatggcttgagctcaggagttcaagatcagcctggacaacatggtgaaaccctatctttacaaaaaaatacaaaaattagttgggcattgtgacatgtgtctgttgtcccagatacttaggaggctgaggcaggaggatcacctcagcttggggaagttgaggctacatttagctgtcatcatgccactgtattccagcttgggtgacagaaaccctgtctaaaaaaaaagaaaaaaagaattgaggtatgagggtatcatttaaaatgtgaaatattcctgtaattcacattcatggagttaaattttgtacagccataactcagactatctgtcgtcatgtaaaaatagttgaaaaatcagaatacacatttcctatacactatgattttcacgaaaatactgatttttttttttttttttttttttttttttggagacagagtctcgttctcttgcccaggctggagtgcagtgtcatgatcttggctcactgcaacctccacctcccaggttcaagcgatttccagctaatttttgtatttttagtagagacggggtttcaccatgttagccaggctggtctcgaactcctgacctcaagtgatctgccagccttggcctcccaaagtgctgggattacaggcatgagccaccgcacctggcctaaaataatgatatttatgaggaagatgacggttcataaaaactcctttatttatgaactatattttagtagtcaaaatacaggtacttttttactcttttttaaaatatactttcagtaatgttattccgtagcatttttggttggaaaggaattaatcactcatttttttaaagtgaagtctgaattttgatatcttatcaattgctgaccatctttctcagtcattaattgagaaatatctataggcagagagtcttaggcgtatactcttaggcttctgccagaggctggacttatgtgaaaactggaccaatagggaagtttattctagctactctccccaaaaaatctctgtactcaacccactttccctaactctttttatttccctctcacagtcagggatttggcttggcctctttggttgtgattgagtaatcctatgttacatatggaattatctccttccttttctttctaggaagtgcattttcagctgagcacctcaaacttcaactccagaaggaatccctaaatgagctgaggaaggagtgcactgcaaaaaggtaaatgcacactgagaagaattgctgtgagtgtggagtttactgcgaggatagatttgaaaaagtagcattctttaaagctgctggtattaatttatagcccatatacctcagtaccacattcgtttattcaacacatattcattaattaagcacctactgtgtgtcatgcactgtgccagaggtcagttatgaaagctcctagtatgtagttataatcagaaacatgaaccctattcaagtttctcaggccacagcatcgtggtttaatgtttgaatttcttccttctgtcttctacatgcggtttagcttataggttttttttcaataattttttcagatttacttctgcttcttgttagctcatttggattacttcagcaactagattatctctctaacatcagtctcttcatctttccagattgttctccatgctacgatcagacctctcctcttaaaataccatttttaccttattttttatcttctttttttaatgtggagaaacatttcattcattcattcattcattcattcattcattcatagacagggtctcactctgtcacccaggctggagtgcagtggtgcagtcgtagctcactatggcctcgaacttctggcctcaagtgatgctccacctcaacctcccaaagtgctgggattacaggtgtgagccatcatgcctggcatttttatcttcttaatatggtgattcttttgcttaactttcaaatagcctgtaataaattggcaccttgcaactgtagttaattttagtcgctctcccaacattcgtttaacaaatgccaatagtttttctcttcattttttccaacatatgcttaattcgttggtacctctgttcttttggtcatcttcacttgcttttcctggaaaatccatccatcatgcacttttcttcaaaaaactttagcagttggggattcaaaaatgctagactggccgggcatggtggctcacacctgtaatcccagcactttgggaggccgaggcaggcagagcatgcagtcaggagatcaagaccatcctggctaacacggtgaaaccctgtctctactaaaaatacaaaaaattagccaggtgtggtggcggatgcctatagtcccagctactcgggaggctgaggcaggagaatggcgtgagcccgggcggtggagcttgcagtgagccgagatggcgccactgcactccagtctgggcgacagagcgagacgccatcttaaaaaaaaaaaagtgctagacctatagaaaaccatagagattatctattccaattctctcaatttgcagataggaagtcaatgctctggtaagttactgtttgtccaactcactagcaaagccaggactagatcccgttgtcttcagtgctgttttagataactaaaaaaccagtgattttcgtactgttacacaccactcaatacaacacttttaacattagattctccagcagaccctcactgtatgtcttagaatttctcactctgtcttcctgcaaatagtatcagatcccacagaattaaggactcattcccacaagactgcctcaccacatcaggtgccatttggcaagccccaggttgtgacctgtgcttctgatcgacctgctttaaatagaggttcccataacccactccttggattcgattaatttgctagagcagctcacagaactcagagaaacatttacttaacccttactggtttattataaaggacattacaaaagataccgatgagcaagatggaaggcatgcatagggcaaggtatgggggagggagcatggagcttccatgccccgtctgtgcacatcaatctccagacactgccagtctggaagctcattagatcttgttgtgcaagatctccagccctcttctcagagtttggtgggtggggaagaaagtccaaccttctaatctcttggtttttctagtgaccagttccatcctgaggctgtctaggagcccctgccttaagtcatctcatagcataaactgtggtgtaatcaaaaggggctcataatgaatagcaaaagacactcttatcgctcaggaaattccaaggtttttaggtgctctgtaataagaaccgggggcaaagaccatatatatgtcatgttatactttgatctacagtttctcctaaattccttttgttcttaaattcttgacacagttgatcaggcaacttactttacaggtattttatgtattgatcatgtttcttaagtagtgcaagaaaagagctggtgccaggcaaggtgtctcatgcctgtgatcccagcactttgggaggctgaaacaggcagatagcttgagcctatgagtttgagaccagcctgggcaacatggtgaaacactgtctctacaaaaaatacaaaaattagctcagcatggttgggcatacctgtagtcccagcttctcaggaagctgaggtgagaggatcagctgagcccgggaaggtcgaggctgcaatgagccaagatcgtgccactgtactccagcctgagtgttaaagtgagaccccgtctcaaaaaaaaaaaaaaaaaaaaaaaaaaagagagagagaagggtaatttcatactatagctttttatttgttgtttttactttttttcttacagtccaacatattggtttttgaggtaattataatatgtaattgtgagtgaaatatagaatactttttgaggaaataccatccagatctttcttgaaatcaaattggcctcattaaattgactgtgaaatcttggtcacattactcagactctctaaatattgtttccttgtttataaatagatataacagtatcaacctgctagagttgttagaataaataaggccatttgtagatgcctagtgaatgattatttgtaccctttacatttcttttttttcaaagacaaggtcttgctctggtgcctaggctggagtgcagtggcatgatcagggctcactgcagcttcaacctcccaggccccagcagtccttctacatcagcctcccaagtagctgggaccgcaggcatacgtcaccaagccaggctaatttttttatttttgtagagacggggtctccctatattgcccaggctggtcttgaactcctgggcctcccaaagtgctgggattatgggagtgagccaccactcccagccccctttacatttcttagcatggtactaatcacacacagtagcactcagtatatagttagcttgattgatactatttggagataggtcaagacttacggtaactattatttatgcttctacttctgagtttctgtggcctattacagacagtataatctttctttggattaattgtgtggaaataaatgttacaaagcatgcaagcatatattttttaataaatgtattttttctttcctcattagagaactcttcttgaagactaatgctcagttgacaattcgttgcaggcagttactctctgagctttcctacatttaccctattgatttggtaagtttcaaattttctgaaaatatttttcgttttgaaaagatgatttctgtatgacatttcctctcaatgaaaaaactcattgctttaggcttaatcatatgctctgtcatgattcattcaggagctaatgtctatttaaaacatagatttagacttgtttggccttaggtcctactatttcatttatatcactttggtggtgggatgcactcatcatctgaaagactgccaaattatttttggtttctttaggatctttttacttaaccacattatccattatcaccacttttttttttttgagacggagtttcgctctgtcacccaggctggagtgcagtgatgcgatcttggctcactgcaagctccccttcccgggttcacgccattctcctgcctcagcctcccgagtagctgggactgcaggcgcccgccaccacgatgcctggctaatttttttgtatttttagagagacagggtttcaccacgttagccaggatggtctcgatctcctgacctcgtgatccacccacctcagcctcccaaagtgctcgcatatcaggtgtgagccactgcaccctgcccattatcaccatttctgacatacacatgcaaatatatgtgcactgctttaaaaatatgattgataattttcatgtattagtgttacttaagatattcctggggtaactgtcaggctgttaggtttttgagcctagtttcttagaatgaatgaaaaaaggaaaacttcaataaaattgattaggattatttttcagagaactaaatctgctaaatttgatagttttctttttaatgaaaatttgtttaaaagactaattttcagagaagaaagctaataggatttgagtttgcttatagaatcttattaaaccatttatatatgtgaatgaaataaggatatttttatgatgataattttacatggctttttccttggacatgatgtcttaaatgttattatagaaaatttcaagtatatgtaaatgtagggagagagtagaatgaatcaccatgtactcatcatccagcttcaacaattatgataatacttggagtttagaacagtgttttgagtcagcaccgacctgctgatctgagatttaacttagagtttctttgctttatttattaattttattctttaattaaattcacagaatgaacataaggattactttgtatgcggtgtcaagttgcctaattctgaggacttccaaggtattttattttttattttgaagatttgttatatattaatatatggaaatagaatatcttgaaatgctggttgcctagcactttatccaaaggaatttttggactttctgtcctttcccaattgcaagtatgtatatcagactccttgatgggagatagaatgttaggtctgatcatagaaaaataattactgaaccttatattagaaatttaaaagaaaatagtttttaaatgggctttaagcaaattagacagtcaggttcttaagaatacaaataatcgcccttccttttggtttgatttttatgaaaaatttgtgtatggttgggagcagaggaacagcaaacaaaatctgttctgttattatttagaaagtcatattactgctgacctgaaaagtatttgaaaatttaattttgtgaagtttccattaccacaggcttaatttgttatactatcatttctgttatcttttaactaaaaataaagaaagaaattacattaaaggtattatagaatatgatccttagtaatttctatattttaaaatcttttgtttttcctactctgcaaatattccaaagaatttattttctttggcatatcagtgatcatttttattgttagccaagtgggttcttttcccttagcctaaacaatgctttgaggcctactaaatatctttatagattattcccaagccagcgttttatctacttgagaagttactaaagaagagagcattgctagttttgatcaggactttcattttcttataaagaagctgttgttattggtgatcatttaacatctaagagtgttttgttaccctgttgggcccttacctgtaagtactttggacgtgataaaaggagagtgataaaccaggagttggaaaacctgtgttcaagtcctgattgcccctgtataaaccatgtaatttggaacaagtaatgtaacctttgagttgatttcctaattgattgaatgaactattaatttatgccctacctgtcttatatgattgttgtggaaaataagtgaggtataccagtagctataaatgcataagattttgcctaatctttaatactcacaaaaacaaagggatcctataaggaaaatggtattcagtgacttgcttgaggccacaaaactaggtaataatatagctaggatttgtctggtttccatttcatagtgctccctcagatatctgtaagacattcacaaaaatgtgttttgatattaattttaggcaaagttgtggtatcttgaagcccatggcgcatcattttcctcattgattcatttagtaaacatattgagtacttttgtcccgtaccagtttcctgggatacagaacattattcattgaaaaaaatgttcattgaacacctaaatgccaggcacatgatgcagaaagtaaacatgttctctccttccatggagcttattgggggagacagccaataaacaagaaactaagtaactagcaagtatttaataaaggaatatgctatcccagagaatggaagaaactgctttagataaagcagtcagagaagacctctctaaggagaaatataaaattgagggctaaaaggagccaactatgctacagctgggggaagagcatttctaggagaagggtcaccaagtacaaaggtgatgatgaaggaggaatgggcttggcatctctcaaaaaactcagcgtttggggaatgtgagaaaagacttgtattttgggtaaatcatgtaatctttcagcttaatttcttataagatatctatatctgtaatttcttgtgatgattgaatgaaatcacatttgaaaaagcttttcatataggaggtactcaataaatataattggaatttgttgcaaaagagagaggcaggaaggacagtaaagaccagacgtgtgcagctggagcatagtgagcgagggaagagctacgttagaagaggtaggagagggcagccagggccttgaggtcactataaggagttgatattttattctcgaggaagtaggaaatgcctgagggacttcaagaagcaggatggcatgagctgagttaggcttttaaaagtcactctggctgctaaatacagaatgatttgaagggggcagtcagagaagtaggaatatcaggagtggtggtctgattactctgagatgtgtcttgattctattttgttttctttgaaattccttgtctcctagtttttcatagcttttgtagttatctacacttacaatgcccaacaagctgaatacagtctccctaccctttaataaattagtgtagctttttagtgcagttgttgaaaaacaaaatgtgagataaaatgaaataaatgtttaattttactctaaggtcatattcattcccattccccattacccttaggaatcagaaattttaagaagcacatgcagtaatattggactttaaaaatcttacattggccgggtgcggtggctcacgcctgtaattccagcactttgggaggctgaagtgtgcagatcatttgaggtcaagagtttgagaccagcctgaccgatatggtgaaacactgtttctactaaaaatacaaaaaattagctgggtgtggtggcacacacctgtaatctcagctacttgggaggctgaggcacgagaatcacttgaacccagaggcaaaggttgcagtgggctgagattgcaccactgcactccagcctgagtgacagagtgagactctgtctaaaaacaaaaacaaacaaataaaatcttatgttaatatcctgcaggcacttgcatttactaaatgtattgagtgttctgtgtatgtcatccatggtgccaggtgttgagggtgtaagagatggttaagacattgatcctgcctcagtgagattatagtccagttgaggatatcagatttgtaatcaagacagtcagtaagtatttattgaattcatactctgtgtcaggcacttagaagtttatagcaggtacatggtactcaaaaaagtgagaataatcacttctatcaggagcgatcaggaaaacttttatagagaagatgatttcagtgtcttaagaaataaaatgatgttttccagtagaaaaaagagtaagaagacattttaggctgggtgagtagaaatatagtaacataggctgggcatggtggctcatgcctgtaatcctagcactttgggggactgaggtgggaggattgcttgtgaccaggagtttgaggctgtagtgagctatgattttgccactgtactccagtctaggtgacagagtgagaacccatttcaaaatagaaaataagaaagggaaataaatatgataacatggaacatcatgatgttctcacatttaccctaattctcacaactgtgagaattaattccatctgtaaggaaaggaattaccctcaatttaaaaaaggaaaaaaaaaaagaaaaagaaaattgaagctcagagagattagttaattttttcaaggagtcatattaaacagtgataaacctaaggttattcctggtctgcctgattctaagattcgtataattcttgccacaattcagttttcttcctcgctttgaataataacctctttaaacctgtgacaactttttagtattctatagcagctgctttctgggagagactctagtgaaggaactccaagctggttattctgtgatattcatgagactttgctgggatagactttatgctgcatggggtgatactgtttgagaaactccaccgtagtgctccaacattagtgtgcttttctaagtgggtaagttactgttgcagtatgccaaggagacctggacacagtgggagaaaaatgtccagtgaagggtgttcatctgagttccactgaccgagacatttagcttaaaaaaaaaatgtttgtgtgtgtgtgtgtgtgtgtgtgtgtgtgtgtgtgtgtgtgtgtgtgtttaagtaatccataacacgagagccttttgtggtaatgagacccagatttccttctgtgtctgtatccctttatgcaggcatgatttcttggaaaggagagtccatatgtcaaacaatgtctcattgagaacatggaatgattccatagatgctgtggcagtgattagagtcttaaatattttgtcctgtctggatcagtgggtgcttggttccttaacaaatcagctgcctcagtgattgggaaggcaggatggtaagagcttttagatcacttattgtacttggatgcgtttgaatattaatagtttgtccaacatataaatcaaaggaacatttgaatgcatttataatgttatggccattgcgtgtttgtggaatttgttgtcataaaaattatacaaaagctacagccttgagtggttacctacattttaaaaataaaccaggaatatttattatgaggaaactgggttttaattttattttcaagccccttaaaagtttgttggaattagcatctttttcacatacctgagtcttaaggttcattcgtgtttctccctggaccgtccactcctgctccaacttctcactaacaaaactattgtctgtgacctttctaacccccagaacagcataaggtacacaaacttctgctctgccttaggtgttagggacgtcattaatgcttactggaaaagcacaccccagagagctgggttttggctgtggcaggtaaaaaaatctttcagatcttgcaatgctggaaaccttaaaccttttggttttttagctaaagtgattggcaacagaatgtgacatctgaggttgcatggcctgcaatagccataattaaccacatgagctcacattttcccactggagattcagtggtcttggggtgatgaaagtgacttccctaccaggaggtggttttccttttgagggtattgaaatacccttgggccctgtaatgcttcacccatggtccttttaaaatgctttttaatataaaggttcaatattggaaatctaacaccacagtgtttaacactgagtctgtgatggagcactatggcctggaatgggaaacctagaatttttaataggtggagtgggaagacttgtggcaagaatggtgagtgtgaataacctgaatcaaagctgatttccaatattattcaattttcagtgtgtgctatttctttttgttttatttctgtgtgtagacttctcttagagatgcctttttatctttaaacaaagttgttttgttcattggtgggaagtgatgttagaaaatcaacttttggttattttaatagagatgtggatgtagtctcaaaatatacaaatataattctttagcagtcctcctttcataatatggggaaaatgtagatgcttgaatgtttagcattagatagatagttttgaaacattcattgtttgcatttgacttgcttgaaaggctaatttaagaggcctgctcctttctggaagttttcaaatcctcttctgtcaggtcatataggaaaggaaaagctttgtataaagcacatagagggaagttgcaacttagcatagtattatctgtctttaagtcctcatcttcttcctcttcccctctctcttcaaaaggtggttattgaagatcaagtccttttactgacaggaatattttaaatttgataagacctaatctttacggaaagcacgaggcagaattcagtcacctgtgaagaaactcacagttacagctgtgactccacacctgtataggtattctggaggattgtggacacaattctttcagttacttcatcactcatagtttctacctatgtggctttgaccaagccatttataccacctgggtctcatttctctcttctccaagttggtagcatcagagtcagtgattgtgaaagtttctcttagttctattattgtatgataatgaatttataatgtaacaaatttataatgtaaagtacttttagtccctaaggtagtctgatgtacgggtttcagcagaaggaaagtgttgtagtagtattcaaggtacttgggtgggactggggcaagaggacacggtctctaaaaataattaggattctagttagttagagcatgactcagtagttggttgaaaattactgctgtttgatttttttccatgggtttgttttagagaacagacattccttgagaagcccattttctgttgagtactatgcaagtcatcgaggactctcagactttttatgtgctctttgctcttactagaaaactgtgaagaaactaaggtggtacacgtgtgtcatatgcttggtacattcgaggctcccaagttaaaaaattgttatatgctgggcacagtggcacaaacctgtagtcccagttacttgggaggctgaggcatgaggattgctcgagcccaggagtttgaggtcggcctgggcaacatagtgagacctcatctttttttaaaaaataattgttatattaatgtttaacaataaatttatgagacagtacagtagactggttaatcgtggaagattgggtgtcaagccaacctgtttactagctgtattactttggaaggattccttaatctctgagccttagtttgtttatctgtaaaaggaatgcaatagcatttaaaaggtgtttaacattgttagtgaatgaatgaatgtcatatataaagtactatagacagttctggacagaaaaaagtatatatataaaaaaatatataaatagttacctatttttataagactaccaaagaaaaacaaatagtctgctatggtagttaagggtagagaattcactgaggaatggatctctgtagtggcacttctaccataagaaggtagtgcttacgtaattaagtggaaacagaaagaagaatgcgaaaatttttattggtaattgaggttaaagccacccttagaagtcagggaatagtcaaggcatggtcattgtgatcatttcagcccttcttctctagccagatgggatattccagattatgtgttaaatgttttagtgtatgagtgcacacacgtgcacttgtgcacttttaaaagcatttaggaatactgtataccaagaagatcctgtttccttcctcttgggggaagtttaaaactttctgttgtattactcccttagcccctgaatcatcatttatcacttgatagatagtggcagaaatctggataagtttagaaaatgtaattgtctgtggctttttgaaagctagatgcttatgtctgattataagatacctgcattttttcctagtagttgcttccacctatattacataaatagggtggtatatgaacagtgtggtttttcaccttttgcttttgctgtttaaagcattttcccccttaacccatatttaacttcatagacttattatgtaaccctgtctttttcaatatcaagaacataccccataagaatgattatactatttcatttccctttagaattaataatgttgtaaaatagtacaactatattgtctaggaaattcttaatgaataaaatgtataaccactgtatagtgtgttaagtttaaacctctgaagctaattttcatatcatgtaatagactcaagtattaattcatcctgtaaaaatgctgggaaagaaagcaatggttatttggacatagtaagagttcttgctttaaggtatatatcaaatgttaatctcatcacattaattattgggaaatagtttaaaatacagttagtagatgaagtttcaagtcttgttaatgtgtttacatttgcataaaatttatataatttagataagtggttaatattttatgtaccacatatttttataaaatattctttgaaaattatttattatcttatggttatttataaggtaaatagttattttcttttcctctgcttttgaatttacagcaaaagatgatggaagcattgctgttgcccttggttatactgcacatctggtctccatgatttcctttttcctacaagtgcccctcagatatcctataattcataaggggtctagatcaacaatcaaagacaatatcaatgacaaactgacggaaaaggagagagagtaagtgtcttttttttaaaaaaatgattttaacatcaagccagtataaaacatggggtataacaaaatacataaaatgtaatctaaattatgacaacttttatataacctttgtagagtgcctcattcatttaaatcaaatgtagttattatgtgaaactagttattcatataaattttaatgactcaacccctgggcttccaagaattgctaatggtggcaaaaatttacttaagtttcatttactttcttcttacttttgtgaggataagtgtcatatgatctacaaatattcacctagtacctcttgcctgccactcaacaagtaaaatgttaaaagatttgtcagagatctaactaggaaaagatataatggcagattgaacatagctgaaaagtagattagtgaattggaagataggtcagcagaaaatacaagtgtctaatatacatataatttcaggcacagagaggctggaaagattgtgaggtaaacacaaaattttaagagataatgactaagaattttcaaatttaacaaaagacatgaaattacaaattcaagaagcactaacaaaacagaatgacaataaagaaaacatacctggggaaattaaacagctgaatatcaaagagaaagtgaaaatactaaaagcaactagagagaaagacatgatagcatgaaaagattgatagtaagactgaaagctgatttctcaatggaacaatggaagccagatggtgatgcagtgacattttaaaatatggaaaaaacagaactgtccacttagaattctatacccagtgaaaatattattcaaaagtacaggcaaaataaagatatttcagaccatcaaaactgagaaaatatatcgcagcagacctgcagtaaaggaaatactaaaggaagaataaaaataatttcaaaaagaaacatggaaatacagtacagaacaaagaataagagaaaggaacaaagaataagagaaaggataaagatgtatttctaaattcattttgactataaataaatactaatgtcttcttaaatataacatgcatatacataataatatatgtaggtttataatgcatggttctaacacaaaaagtaaaaagggttgagtggggttaaagtgctcagagatcttagcattgtctggaaaatggtaaaggtactaatttatattcagactaataaacatgcatattgtacttttctttttttttgccttcagcactttaaatatgtaacatcactctctcctgtcctgttagtcttccactgtaaagtctgctgccagatgaatgggagctccattgtatgttacttgtttctttaaaaaaaaaaaagatagagctttattgtgaaaaatcatttgattgctaatgtaatccaattatttggttccactgtgttttttttgttgttgttgtttgtttttttgagatggagtcttgctctgttgccaggctggagggcagtggcgcaatctcggctcactgcaacctccacctcctgggttcaacaattctcctgcctcagcctcccgagtagctgggaatacaggcacgcaccagcacgcccagctaatttttgtatttttagtagagacgaggtttcaccatgttggccaggatggtctcaatctcttgacctcatgatccacccaccttggccttccagagtactgggattacaggccattgtgtgattttatagcattctttgccattgctttatttatatttatccttgtttcttttctcctgctgcttttaggatcttctctttatacttgacctttgggagtttgattgttaaatgctttaaggtagtcttctttgagttaaatctgtgtggtgttctgtaaccttcttgtacttgaatattgatattttttcctaggtttgggaagttctctgttattattcctttctactcctatctctttctcgacctcctctttaaggccagtaactcttaggtttgccctttgaggctattttctagttctgtaggcatgcttcattcttttttattcttttttcttttgtctcctctgactgagcattttcaaatagcctgtcttcaagaccactaattctatcttcttcttgatcaattctgctattaagagactttgatgcattcttcagtatttcagttgcatttttcacctctagaatatccacttgattctttttaattatttcaatctctttgttaaatttatctgatagaagtctgaattccttctctgtattatcttgaatttctttgtgtttccacaaaacggctattttgaattctctgtccgaaagatcacatacctctgtttctccagaattggtccctgatgccttatttagttaatttggggaggtcatgttttccttgatggccttgatgcttgtggatgtttgccagtgtctgggcattgaagagtttaggtatttactatagtctccacagtgtgggcttgtttatacctgtctttcttgggaaggctttccaggtttttgaaaggacttggatgttgtgatctaagctgtatctgcattagggggaacactaagctcagtaacactgtggttcttgcagtcttgtagaggtaccacttggtggtcttggataagatccagaagggttctctggattaccaggcagagattcctgttctctaccattactttttctcagtctctctctctatgctgagccatctggagctgggagtagggagacacaatcaccctcgtggcctccaccactgggatttccctggttcagacctgatgccagcataggactgggtcttatcctaggccctgtgtaacctctacctggctaccacctatgtttgctcaagaccctgtggctctacaattagcaggtggtgaagccagccaggattgtgtccttcccttcagggcagcaagtttcccccggcccctgagcaggtccagagatgctgtttaggaggcaaagactggagtccaaaaccttagaaatctatctggttctctattctattgcggctaagctggtgcttaaactctaagacaaagtccttcccacttttccctctccttattatacgcagaggtttctcttcacttggccaccatcacctagacccacggtgggtactgtcaggctatcactgatgttcacttaaggctcaagggctcttcagttagcttgtggcgaatgctgccacacctgggagtcacacttcagggcagagggttcccctctggaccaggacacgtccagaaatgccatccaagagccaaggcctggaatcagggaccccaaaagcccatttggtgctctactccactgtggccaagctggtacctgaaaacagcacatctcagagtctcacccaaggcccacagcttactgtctagctattactcctggttcttcagggcccaagggctttttggtcacaggtgatgaatcctgccaggacttggtccttccttttaaggcaacacattcccttctggcccagcgtgggtctagatatgtcatctgggagctagggcctggaatgggggcctcatgattgcccagtgccctatcctattgtggctaagctggtatccaagatgcaagacaaagtctcccttctcccaacaagcagaaagaaggagtcttttttttttttttttttttttttgctgcaggctgcgctgcctaaggttggtgaaggggtgtcacaagaacttccttagccaccccggctagtgtcccatgtccattgcctctaaggccagcactagcactaggacttacctaggaattgcagtcttcacagcctagactgtctttcaagattatttagaaccccagagcaccttttccgtggtagaaagttttgccaaaactcaagttctaaccactgggatgggcgattcccctctgactagggctgatctaaatgctgcctccatggatgggcattggctgagtttagtccagttttgtttcccactgtgacagagcagcactgagttgaatgcaaagtaccacaatcgctgtgctctccctccctcaagagcacagatgctctgtatctcatggccgctgctgaaggagtggggaaggggcggcgtcagcaattcaagtctgtctttcctaccgtcttcaatgcctttttcagctatatgaagttaaaaccaggtactgtgattgcttacctgatttttggttcttatgtaggtgcttttttgtgtgtgtagatggttgttaaattggtgttcctgcaaggttagcaggggaacaatcggtgaaagcatctattcagccatcttgcttcaccctcctcatggtgttttcttataatccttttcatttctgtaaggtttgtagtaatgtccccactttcatttctcattttactgcattttctttcttctttttcatagtcattctagttaaagatttgtcaatttcttttcaaagaaaagacttgtggttttgttgattctctctagtgtttttttgctctccattttgtgtatctctgctcttatctttattatctccttcattctgctagctttgtgttttattttcttttttctctagtttcttaaagatggcaacttaggttaatgagatctttcttttataatgtcagtgtttacacctataaaatagtttccataccccattcatttttgtatgttatgtttttttaaattaaagtcaaagtattttctaatttccctgtgatttctttattgaccactggttgtttatgagagcattctttggctgggcctagtggctcatgcctgtaatcccagcactctgggaggccaaggcaggcagatactttgaggccaggagtttgagaccagcctagacaacatggcgagacactgtctttacaaaaaatacaaaaattagctgagcgtggtggtgtgcacctatagtcccagctactcaagaagctgaggtgggataattgattaagcccaggaggcgaaggctgcagtgagccaagattgcagcactgcattccagcctgggtgacagagcaagaccctgtctcaaaaaaaaaaagagcattaattttcacatatttgtgaattttctagttttcctttcattattgagttctcgttttattccattgtgacagagaagcagagatgatagttttatgattgtaatattttttaaattatgaagacttgttttgtggcctaatgtattgtctatcctggagaacattctacatgcacttgagaaaaatgtgtattctgctgtcattagatgctatttatgtctgttagatctagttggtttatgatgttctcaagtcctcgatttccttattgatcttctgtctaaatgttccatttatgactgggaatagagtattgaattcttcaactattagtgtaaaactgtatatttctcctttcaattctgtcaacatttgcttcatatattttagacctctgttgttttgtgcacatatttcttgttatgtctgcctgatgaattgacccttttattggtatatttttgcctcttataacaacttttgaccaaaagactgttttatctgatattagtatgaccaccccagctctcctttggttactatttgcatggactgtctttcccatcttttcactttgaacctttttatctagaataagtctcttgaagatggcatatagttggagcatgccttttatgcattcctccaatctctgcctttggattagagtttttaatccacttacacttagttactggtagggaaaaacttacttatgccactttgctatttgttttctgtatgtcttatgctttttttgtgtctcatttcctttattactgccttcttttgtgcttagttgatattttttgaggtgtacccttttgattcctttctcatttccttttctgtgtattttatagattttttatggttatgatgggattttaattaacaccctacatttataacattctagtttgaactgataccagttagcttcagtagcatataaaaactctgtttctatacacctctcctcctccctcccatctttatgttgttgttgtcacaaattgcatcattatacattgtgtgcccataatactgtcttttttatttacatatgtaattaccttttctggatttttatttctttatacagcttcaagttactatctatggtcctttaatttcagttgaaggccttagccttcactttctggttgcactaagcctagctgtcagccagaggggaaagtgtaggcccttcaggttttttctgaacatgcatcttgtttcgggcatgaatgtagcttctacattccccactatacttggacacttttgaatgacctaatttctcaaagaaactctctccagcttttcttcccaggctttaggcaatctgttttatgtctgaactgtaatttttttgccccaggtggctctgggttgtttgtttgccttactgcttgaacatttgttagctgcttttcagttctgagtgagttcagactaggtgaggaacaagggaaagtgacttgcattagtccttcaggtagccaccagacaagttagaacagacacactttgtttttagaataagaatctgatcaaaaaatgaggtgtcatactgagagggcaggctgttgtcttcaagacctatgctgagctggagaggagggtggggccaaggcaagtcaaaaagctgcaaaactttcttcctggttttgagtttcttttttcttgatttaatgttcagacaattgatataaacctttgactgttttccggggttttgacaaagttgattttgacaatttttcttgattttttctttttagatgtttccctggagggataggtctttggctatatctactgtaccatttttgctgacatcatttggtttgtttaatgatgaaaaacatggcttataagggatgaagggacgcctagatgattttaagcaaaagagaataccatgaccagatatatacttaagaaagatcaccttgtagttctctggagactgggatatttccaaccagccttctcctagtgccgtaatgttcaaattaagtgtctttccagatttttatcaaaatttttcatgataatcagactttaaaattagttatccaggaaaatcactttgcgagcttgcaggaagggtgttccttgagatggtaaatattcttgctccagatcagttgcacactttaatttgtgaagtagcaacttaatatgtgggcaatttcaagtagcatgccccagtgtgagtagcagcagtgatttattaattgattggttgattttctcgagtgatctggtaaggccagctggttttaggtgattatgttatcccttttttccttggcagccagaggaaccacaggaattgcattttggtgaatgaattttatattcttcctctatcttcctccttttgctgaaacacaaattgtattttgttgattttgatatatacattttgggcattttaatattgataaaaatgagatgcatcttataattaatgggcatgtcatattataattgatagtacttttcttagtgttacataagttaatgatgcattttacaattgatgctgtcttagattttaggaactcttaagtgttttagctggttttatgcatttttgtgaagtacttcaaatcctttttggaataacatggatgtataaataaatatataaatagaaatatgtttagtgattatgcttatgcctcagttattcttagcctggatcactgaaagagcaaattagacatggtttttctttctcttgttttcaattttgatgtaaacctttccaggacattagatggaatcagatcttcatgggagatggcaagtagaaattgaatgactcattggataaattataattaatgtaatggccctaggaattttcagcctctcccctctctgattatctatctcatctggctattggcacttgagatgttaaagttcaaagctctatttagccagttttgctggaagagaaaaagaccgatttcttttctttgtctggccagtttgaaacacaggcctggactgatgccttgtctaaaccattacttgtgcacctgcatactgtaaagggaaactctgaaatctttgctgcgtttcactgtgaggctcagaccacaaaacatgaggaatgtaaccagagtccagctgcagtgttcctccaccccccacttctttcactgaggactgaaaagtatgttttaaagtgatttttggaatgaaattcattagtcattgttattgtgctacttaactgtctggtagataataaattcagaatggattagtgaaacaagccatgagttaggacctagctgatcagagcatatggctttttcaaggccttaaaagatgtctgaagtttgttttattctcaggaggagaaacagggggtggtataattggcaggcacttttgaaactttctggcctgctcacaacaatacttttataaatctctaaaagatggtcagccatttttctgttgtagaattattggaacttagagaaatggtaatgctgtttccttgattttgtgtacttatgtttgttcctatggaggatcctgaccttaccaaaaccccaagagttgccctttttacctgattgattctgatttcaagacagaatttctaaagtataaagaaattgtgatgtgttcaaaatcagataatattgggccaagatcatagtcattgcatgtggacctgattctcattagagtggaatggtctaacaccttttttgtgactaggtgcataaggcggtcatatatcctatgtataaagaggttggccaaacaggtccccaagtcttatgacctgcgttttttattattcttgcagccacatagacaggtcaagaggattatggaccttcccgttctgcatagctagtttgcattttaccaagagggaagagacaaaggagttttcagagtagcagtgagcaggctgattccttatctctgtattccctcagcctacctcttggctgagcaacactaacttgataaataaatgaatgaaaatgtctttctgatggcctcttcttgaaacaattagaataccttgagctttatttgtataagtaataagttttctgtagaaatagtgagtggcacccagaattttattggtaaaaagcttatattgaaaacataaatgaaaattccagaactctagttttcagactgctgtaattctgactcctcatttctattattacctgcttcaggcatacttaaacacctgttgacaacatcttatattaagaattacatattccttcctataaaaattctcagcttctgtttgttaatcaagctattttagtgcagagagttcagaaatgattgttgttttcactagattagcatctgtttgctttcatggcatccaattaaatctgatggccttcttccagaaatggggaattttcatatcatgcttaggcttaaatgctatggccttcatttccaactctcttctgtgtatcctataaattagaacatttcttataacctttcatcttcattttattgtaggttgttgctcagatgttggcatttagagcactcagtagacccagaccctaaacctttaaattggatgataaatacattgacttgaggcagtggaaaagagtggaccaaatgctttggttctctatcttccttgctatgcaactttaaagtataattaagcaaatatttttcagggtgactaatactactgaaatgaatgaaaattgttagttcttttggattttccacttgattacaggaatttgacctaacttgaaaaatctctgttcatgtgaaaactttcccaaatgtctgtagtccaattctctataattacctaacagtacaccatggaacagaaatcaaggtgaaaaaaaaaaagtccatgcagaattgtagacttactgtgttttagaaccagtcggaatattattacatcatctgattgaacccttcatttcacaaatggagaaacaggttgaaagatgaagtgaggtcatacaagttaactaagcattcattttgatatgcccccctgaggagaggcaagcccagaagatgaagtgctaattattaagttttgtacttgtaaagcaaacatataggagatggaagaagtatttttatcaaaatgggtctgcactggagcctgaaatactcccttttcctgatttagggaaagcactcttgtaaagaatgcagaaatgtgaatctctgaatattaagcagttactctgttactttctcactgaaaatgttaattattcaaatcacacttattagttagttcattcgacatttgttttttctctaaaaggtatggtgcaaaatgcatctctttttttctctcttgcctccaatttaaacttgacaaaatttttgttttttatttccaattattttggactttggggtcatgttggcttctctcttattgctgagtgactgtggcaatgttctcctctctgagtcttggttctcctggcatagtacctatgtcactatgccactaggttgttgtaaggattaaataagcgcagtgcttggcatacagaaaatgcttaacaaaattttgcaactactgttatgtatacgttgagctttgcaataggaatcctaggcatgtaagtttttattctgtgtgctagatagaagatgggcctaataaagggcaaggaatattaaaaatgtaatccagtgggaaagtactgtatttccttttgtaatagtgttgtgaggtacatcatctttaagtcaatggtctaagtgcagaggactagtgaagttccccataatgcagggataaaaactggtgtaggtctgaaggcttgtctgtttacaggcatacctcatttttttgcattttacattattgtgcttcatagagactgcattttttacaaattgaaggtttgtggtaaccttgcatcaagcaagtctgtcagtggtatttttccaacagcatgtgctcactttgtgtctctgtcacattttattaactttcacaatatttcaagcttttcattattattatatctattgtggtgacctataatcaatgatctttcatgttattgttgtaattattttgggacaatacaaaccacaccaatataagatggcagacttaatcaatgttgtgtgtgttctgactgctccactgaccagctcttcccccatctctctccctctcctcaaacctccatagtccctgagacacaacattattgaaactagaccaattaatatagccctataatggcctctaagtgttcaagtgaaaggaagagttccaatatctcattttaaattaaaagctaggaatgattgagcttaatgaggaaagaatgtgaaaagctgagatgggctgaaagctaggcctcttgtgtgaaagagccaagttgtaaattcaaaggaaaagtccttgaaagaaattaaaagtgctactccagtgaacatacaaatgataagaaagtgaaaagacttattgctgatatggatagagttttagtggtctggataaaaaagtcaaaccagccgcaacattcccataagccaaagcctaatccagagcaacgacctaactttcttcagttacttgaaatctgagagaaatgaggaagctgcaggagaaaagttggaagctacagaggttggttaatgaggtttaaggaaagaagccatccctagaacacagaagtacaaggtgaagcaggaagtgctgatagagaagctgcagcaagttatccagaagatctagctaagagtattgatgcaggtggctacactaaacaacagattttcaaggtagacaaaaatagccttctgttggaagaaaatgccatctaggacttcgatagctggaaaggagaagtcaatgcctgactgcaaagattcaaaggaaaagctgactcttttattaggggctaatacagctgctaactttaagctaatgctcagtgaccattctgaaaatcctggggcccttaagaatgatgctaactatactctgtgttctataaatgtaacatcaaatcctatatgacagcacatctgtttacaacatggtttattgaatattttaaggcccctgttgagacctacggctcagaaaaaaatattcctttcaaaatattactgttcattgaaaacacacctggttacccacaagtgctgaatggaagttgtcttcatgcctgctaacatagtatccattccgcaacccatggatgacttttaagtcttcttatttaagaaacacatttcatcacatttcataagactgtagctgccatacatagtgattcctctgatggatctgggcaaaatcaatggaaaactttctggacagtattcaccattctaaatgcgattcagaatattcatgattcatgggaggagataaaaatatcagcattaacagaagtttggaagaagttgattccaaccctcatggatgattttgaagggttcaagacttcagtggaagaaataactatttcatgataaaagtttaacaatgaggagttgcatcttatggatgagcaaagaaagtggttccttgagatggaacctaattctagtgaagatgatgtaaaaaaaggatttagaatgttacataaacttagttgacaaggaagtggcagggtttgagaggaaggattgactccaattgtaaaagaagttctactgtgggtaaatgctatcaaacagcattgcatgctacatgaaaggcaaagtcaattgatgccaaaaacttcattgtcttattttaagaaattgtcacagccactccaaccttcagcaaccaccaccctgattagtcaatagctattgccaagtaggcaagaccctccaccagcaaaaacattatgactctctgaaggctcagatgatcattagcattttttagcaataatatgtttttaaactaagatacgtacgttgttttaaactatatattttgtattttctttaattttttccatgaacacatgttcaaagatatttttaaaacataatgctattttcatatatactgggaaacaaaaaaaaaactgtatgagtcactctttattgagatactcactttatttatttttatttttatttgtagagaaagggtgccgctatgttgaccaggctgatctcaaactcctggcatcaagcgatacttctctctcaccctcccaaaatgctgggattacagctgtgagccacaacacccggccaagatactaacttttctgcagtggtttgggaccaaacccacaatatatccagtgtatgtctgtacttcaaataggccgagagttaactgtctacagtctgctaagtagtcacgtaagcatgtgtgccttggaagatacgggttagtgaatgctgaagcccttattcttacaaggaatgcagagcattttcaaactaaatagttctcaccctggcccactatttacttttttagtcatatccccaggttccttcccagttcgtaacctatgcttcagtcagactgaacaattggttgttttccaaacacatcacagtatttcctaccttgatactcattgtccatgctattctatttgtctggaatgccctccctagccatctctagcatcaaaactgtgcttgtacatgaagccctcccttattatcaaaactttcatcgtaagctctttcttgatttcccatagtttggtaaactgtaattcttttggattcctgtgaactattctctctatatagtatcacagaaatgaagttctttatatgtactttaatttaataacagcccaactcaatgatgcaggtagtgtatttgagttatttatccttgtctgaaatattttcagggtagaaactgcatcttacttggtgtcagacttccctgacttgcagagaggcttgtattttgtagacactcaataaatatttcttgaattaggagagtaaaaggaacattcagtttttgcaaattctattaggtaatctgacactctactctgtgacccattgttttaactctggatgctctggccaggacaatcattatttcatagagtcccttgggactgtggcaagctattaacttctgtgctgttgtaatccaaggcacaggcatcagcactgatggggttatgttcaggggtgtgagcaaagaacatgttttaaaataaggaatccccatggaaattcaggcagtaaagatcaacaaaataaaaatgcagaaggtggctgctgggtgagacaggaaatgaacaccttgtgaagattaggcattccgctgagagaggagaaatgtggaaaatgagtcaagagaaattgtgcagctatttcatcactgacacttggaggtatattgttgtgtgtgttgtttttaatgaagtgtgcttttatagtgctgatgttattatctggatgaggaagtcttctctagtattactgtcatctcagctttctgtaaccaactaaattaaaatacagtaatgtaatgggacagtgggataagaaagaaaaccagatgactctgacatgtgaccccaacctgaacttactgcttttctagttttcggtatactcaaataaaaatagagtccagtgtaatgcttgcaggggctggggggactggacagaggaataatatatttagttaatagtggggtatgtcccacattcaatactgttacattattaatatatgtgaaatcagtgtttctcaacaggactcccaacacatcagtgagcgtgccagtagttcatggactatttgcagtccattattatttatcataggacagcatagatgctttgtgttctgatatgaagtaatcattgaatttaataaagctttattttattggtgttgcatgaaagtagctctgttcttttctttaattcttgtatgtttgaattttttggtaagcaaagaatgggagaatgagggtaattatatcaagccagagagtttgcagtaggtaatttgggggaatattttggtttcctgacaaaaatgaatggaaggaaagagtaaaaattatttttaggtagatgtgaaattattttaacttccaaaagcatctcataatagttctctagacagttttctaaggataataacatttatgtcctgggtaatggtatcattataaaacaaatttatgtcactctttaatccagatagttttaactaccatatttttatacctctcttttggatgatttacaattattaaggatgatcaccaaaagtagtttctgaatcagattaaatgatcaattagtttttaatagttgcttttcttctctaattcattgaaaatgaaaaactgatataacatttaattcatatatagttaaatcataagagagttcagttgtaagaggggacatcgcaagaaagccaaccatgtttattgagcactaggacatactagtcactgcacaagatgctagaattaggtaaagttacctggctctgaactggcatcaggatgcacagcaagtcagcagagtcattctccacataataagacccatgctagagatcagcacagggttgggttgcaggtagtcagcagaggcatgcttgatgagatggcccctaagcatctgagctgctgagtatggaataggattaggagctgtccaagtgacccagatgtaatgaaacacgtacactggcacaaagcagataatacacctttccatggaccaaagcctccactttctcaccttgcctcataagtgaattcactttacactgctgaacagttaacattgagacatgtataagagaagagtattaatatttagtctaagtataaattaaacttaccttcaaagatgattagctttaagtggttaatattaaaatacatttgttcaaaggatagaaacctatctataaagtatttttgatcacggattggttgtaataaatatatgactaatttgatttaaacagagtttcttccacatgtaactatctaacagagataagccatgttggcttttaaataataaaacttgtatattctaaattaggaaaggaaaaatcatggctttcctgtttcactcttctgaaagaactttggcatcagatacaccttgaaccagtttattccacctctctagcctcagaatactcttttggaaagcaaaaataatggcttcacagaaaggtggagaagaatagagagaatttatataaaatgacctttgcatataatagtcactcagtaaatatttgtatactgataaatgaacctagtagtcacgatattaatttttcccttctagttgaatttatcttatattattccagtagaaatgagactcataagtttttagaatttgaaaaatccttggctttgaatttagaaaggatttcttaactaaatcacagaaacaagaccatattatgagaaatggtctataagtttgatttaagaaaaaaaaaccttgtctataattcatagcttttagattaactaaatgtcaggatccagaatatatatttttaaaacctttatttataaacaagtaaaggagcaatcaacctaataaaaatatggacataatatatgaagaagctgttacagaagaacaaaccctagatgtttaataacataagaaaaatactcagcctcactaataatcaggaaatgcatgttaaaaccagaaggagatgccattttatatccatcaaactggcaaaaattagaatgtctatttagtaccagatttagtgagcacatagaggaagagaaactctcatcctttgcttgtgagagtttcagttcatttgtttcagaaagcagtttaacaatacagttaaatctgcaggaaccccactcaacctaagaacctcaatcctggttatatactagtctgttgagtagctgttacatatatgcatcctacaaatatttattatgtctgtattatatagatatttaaaccttatatcttagttaccattattgtgttttggaattattcataattatatagctaatatttaattgttttaagagcctgtgtcctcttgtactatccctttcagagccattatttctgtgcaacattattttctgtctatttctatttttttgaaacaaggtctcactctgtcactcaggctggaatgcagtagtgtagtcatagcagctttgacctcctggtctcaagcacatctcccacctcagcctcccgaatacctgggattatagtcttatgccagcatgcccagctattttttctaattgtatttttttgtagagatgagttctccctgtgttgcccgggctggtcctgaactcctgggctaaagtgattatcccgccttggcctcccaaagtgctgggattacagtcgtgagctacccgcacctggcccattattttatttaacgtttttttaaaggctactttttaaaagtctaggatatatgtttctctgtacctagcttctttctttttattaacataaggtcaatgtgggtggttacttttttcttataattcatgtcattttcatacaccagttctggcttcttgattggttttaattttatagtagcagtttgccatatttccttttgagcaaagactggtgttaataatgcctagaattttgagtgctattcatttatattattggaaacctttaaaaagacttacaaaagcattaattcttcccatgatgctcattagttactcccattaatataaatgatggctcccaggttcatgatgtggagagtctagtgatgaaatactagaagtattaactgtagctagttatgggaatttactgttgtaaattaattaaacacaccaataagcaacggaaactttttattattttaatttgtataaatataaggttggtaagctaatgagaagtggcaggtctcttggagttgattgacacctatacttaaactcttttaaatgtgtagatgacgaatttattgagacaacttctgttgtaagatgttccatacagcgaatatttatttttgagtgtgtagtacacaattttgtcatttccagctttaaaaacttagttactaggagaaaaactttttagaagccacctcctaatattgaatttgctgagtcatgttctgtgtgagagatataagaattttgtattatattctggtttctgtattggtggtttctgtataaatcacaaaatgggaggttcatagttgcttagaaggaatttggtaaatagcatgttatttcactcagcaatttctatgagaaaatgatagatagtattcctttctaagatgatgcagtttggtttaaagaaatttccttttctatttttgtattattttaattggaaactgccctgttttgtagtatgcaatttggaatagacacttaactcagttttgtattattaaatactaattcaaaatcaagagtcacagtctcagaatgataaatatacaaatgaacctgttcacctattcatgcattcattaaatgtttaattagtacatagtatgtgacaggtattgttctattgataggtctttgtgatttagtaaagaacagtaacaacaattaaaaatgttctgtctttaaaagaaatggacagtttaaagtaaattctgtaaatactgctgaatatctaccatatgaatatacttcatgccatatatttttatgaaacagactaagaaagtgagcatactatcagcttattatctagtttcagagataacaaaaatcgccttgtttcatgccttttatttaataacactcctttctttacctggcatgcccttgtctcatgagtaaatacattgcaagattcattaggtatccctaggggtagaaagaagtacaatctgattttaagcaaaaataaggttggttcataggtggtttgggacctgtctcaagtgtcaatttgtcattaagagtaaaggctcgataattgactggaaagagctttttaaagtttcaggatcaacttaaaatttactttgctcagaatatctatttaatgtttagttctcactcctgcaaaaatatactaaatcaggatctagttgtttgacaaaactgaagcaaaggaacagtgagtagtgtttatcctctcaactagccaatgaaatgaaaggttaaaacgttaaattaggctgggcacggcagctcatgcctgtaatctgaacactttgggaggccaaggctggaggatcacttgagcccaggagtttgagacttcagcctaggcaacatactgaaaccccatccctaaaaaaatagaaagattaaccaagtgtgatggcacccagctactgaggaggctgaagtgggaggatcacttgagcccaggaggtcaaggctgcagtgagccatgatcctgccactacccgacttcaacttgtgcaatagagtgagaccctgtctcaaaaaaaaagaaaattaaattagaaataccatgcatgattcattgtcatgagtttcaaatgtggatgtgcataaaagaagttatgggacatggaaaatgattgagaggtgtcaacatatatctaaggggaattctaggaataaagattagaagacatggcaagaaagaaatattcaaaacatggtggctgagttaaaaaaaaaaacacagacaatattaagaacaaaaaaaggagacacatgtgccacacagattgaaaactcataagaacatactgtgaacagtttttaaaaggtaggtggaatagtcttttttagaaaaaaatataaaataacaaaattgatccaaaaagaaatgggaaaactgaataggagctgcttccagagtatagtagcatagatatcttgaccaacactgaaactgcttgagaaaaacaaattctttaattatatttattagttcacaagaaaataaagaatacttaggtcaaaaactgagtaaaggcaagaacctaaagaaataaggtgaacactgaagccagctttttccttgaaggcatttaataaactgaataagtgtgaatttgataaaacaacctgaacaggacaatagaagaaaacaaaagttatagacaaatatctttcatactaagttgccacttttgtatgaaagacatacaaaacaaaacatatgcaagctgaatctggcaattcaggaatgagtcaatggctcagcatttaaaaagctttccacataactcacccattaacagattaagaaaaatatcatatcatttcaatagatacaaaaaaagcattcaataaaattagatacttatttagaaaggcaatatacgttttgattaggaacatacattctcagcagggcgcagtggctcacgcctgtaatcccagcactttgggaggttgcagcgggcagattgcttgatcccaggagttagagaccagcctgggcaacatttcaagactttgtctttacaaaaaaaaaaaaaaaaaaaaaaaatcagctgggcgtggtggcatacctgtaagtcccagctactcaagaggctgaggtgggagaatcacttgagcctgggaggttgagactgcagtgagctgtgttcacaccactacactccagactgggtgaaagagcaagaccctgtcgcaaggaaaggggtggtgggggcgggtacttaaattctggaaccagataatgagagtttgaatccagactgttatttagtgtaaatggtaggcagaatttgaaacagcactcaagattcccattatcctggtgtacatgtccgtataaatgtcttccccttcagtgtgggcaagacttgtgaatatatagtcggccctctcaatctgcagattcaaccagccacggatagaaaatatttagacaaaaacaaacaaaaggtaacaatacaaaaattttaaaaatacagattttttttttattttcaaagtatttaggaattctttaattagaaaattaaaggcaatgggattatctattggttctagaagtacccatgaattaaatcacttacatctcccacttaaaaaacaaaacaaaaccttaaatcacattgctgttaagctttcatacagtaagaaataagaccaagctatgctggagtacaaaaacctgaaattgtgagcatgaaaataatttattgattagacatcttgcttactcaagcattaggtctactggagatagaattaacacagttcatgaaaatggaaaaaaattccattcagcacctgcttcctttcaaatttcctggggacatggtttatgcaaaaaaaaaatacaaattgcaaaaaaaatacaaatttaaaaacaacagacataactatttacatagcatttgcattgtattaggtattataagtaatttagagataatttgaagtatacaggacttatgtacataagttatatttgtaggttatattaaaatacaaattttatatcaggggcttgagcttacttggattttggcatccacaagggtcctggaatcaatcctccacagatactgagagatgaatgtaatagaattttcctcccatgattaaggttcccaaccatttgactttgagttaatttaaagcaaaattatctgtgtaggcttggcctaatcaagtgaacccttgagagccaagaagcagtagcagatgctcttctgctagcccacaagaaagcaaacagaactcctcatggagggagccatgtggctaggacctgagggtggctcctaagaactgggagtgaaatatggctgacagctagcaaggaactagctcagccctaccaccacaaggaactcaattctgccaacaacctgaatgagcttggaagatgaccctgagctacacatgagaagcctggccaacaccttgattttagatttcttagatcctgagcagagaactcatttatactgtgcctagagttctgacctacagaaaccatgagatagtaaatgagtgttttaagctgctaagcttgttttattttttaaagcagtcatagaaaactaatatattgtgtgactttggacaagttacttgatcaccctatgtgccttactgtcattgttaaatggagagataacagcacccacttcatagggtatctaggtggattaaatgagtgaatacatggaaaatatatgtggtacttggtaaagcatcaaatgttggccaataatagtagtagtggttgttataagaactcattgtaaagtagaaaatgaaaggaatttccttaaaatgccaaaagatgattatcacaaacctatagcaagcattagacttaatagtgaaactttgtaaggactccactaaaatcagaaggcacataaggatgccagttgtctttacaataaaatattgtatttgtggccctggccaatagaattatatgagaaaaagaaatgaagtttacatatttgaaaaaagggaaaaaaagcttacaaactgaaaatgaatacaatacaagcacctagcaatatggttaataaaaagggtgaggccaggcgcagtggctcacacctgtaatcccagcactttgggaggctgagtcaggtggatcacctaaggttgggagtttgagaccagcctggccagcatggcgaaaccctgtctctactaaaaacacaaaaattagccggatgtgggggtgggcacctgtagtcccagctacttgggaggctgaggcaggaggatcgcttgaacccaggaggcggaggttgcagtgagccaagattgtgccactgcactccagcctgggcaatgagagcaaaactctgcctcaaaattttaaaaaataaataaaaagggtgaaagacctttatcaaagaaaaatataaaacattataaaaatgatagtgaaaaacacaaaagttctgaataaatggatgcacacacatatatacataccttgtttagctatgccttatgcttctctgatttggcataatactatttgtatatatatttttaagttgtttttgaatttgaaataattcattgcagtatattgtaaatctttttttccctgggcattatcaagtgttctctgcctatagccaagtagaagaactttgacccataaagactaactaaagtatgcaaataacagcactagatctgcagcaaagaagtagaagaagcggccgggcatggtggatcacgaggtcaggagatcgagaccatcctggctaacacagtgaaaccccgtctctactaaaaatacaaaaaattagccgggcatggtggcgggcgcctgtagtcccagctacttgggaggctaagccaggagaatggtgtgaacctgggaggtggagcttgcagtgagccgagatcacaccactgcactcagcctgggcgacagtgtgatactccatctcaaaaaaaaaaaaaaaggaaagaaagaaatagaagatgcacaacacactggatttttggttttttgtttgtttgtttgttttgttttgttttttggttggggcggggacggagttttgctctgttgccaggctggagtgcagtggcgcggtctcgactcactgcaacctctgcctcctgggatcaagcaattctcgtgcctcagcctcccgagtagctgggattacaggcacgcgcaaccacacccggcttaatttttgtatttttagtagagacgaggtttcaccatgttggccaggatggtctcgatcttctgactttgtgatccgcctgccttggcctcccaaggtgctgggattacaggtgtgagccaccgggcctggccaacacactggattttaaaatgcaagtgttaagtggaaatagaaaacacggtaacaatcagcagacaaggagggtttggttgaagttacttgacaataagaagaatatcatgcacattactgcaaccctagaaagactgattaacaattatatgaaagtatatcagaaatgagtttgtgagtgaaaattttagcacataaatagcaaaaaaagaaaaaaaattccaatgcaagaacccttagggaaaatggttaaaagacaaaccactcaattaaaaaattatcaaagggtattgtatcaatcatgtttcagtcagaaaagcagaattagtgtgaatattatggtctgatggatttattgggacaagatcgtacgcaattgtggaagaagctacagaaataagagtgcaaaagcagggcttggagatcagagaaaagtcactaccccagcccttctgaagctctggtgcaggtagacaactcaggcaaagaagtaggaagtgaggtatatccagctgctgcgtggaaccccagaggagagcaggtggagacatctatggaaggctgttgccactgcatctgatagtgggaagggagttggtattggtcagcagggccagcagctgggaagaagagctagatgcagaatggaagcacagacaccaaatggaatctgcaagcagccttgcatctgtggattactgtgtctaacaccatgccctgccaccatgccagtgtagtggctgctgccatggccagttattatctttggaagacaatgaagtgaattctatcttccaaatcttacccaaatttatcttttgttcatctgtaacctggatccatataggcagtcgtcttctggtaaatacttccagcttagccaggttgacacagttaaaaaattacagtggatataaacaggccttatattatattctagtaatacaaagattaatagcaataatagtaatcactcagaaaattatagttgctcttgcgatctttcaggtactgttctacacgtgaattgtcacaaaagcagtatgagattaatgatattattatctacattatattcacaaattgtgtcacagagagttcaagaaaaaatacttccaagactacatgttgttctctagggttagcagtaccaacaatttgtcagaatctagtaaaacggtttcgagtacatactgtttagaagtttgtcccctagagaaacttgctcaaaggagggcatataaagatgtttagtacatcattacttgtactggtgaaaaaattagaaacaacctaaatcccctttagtaagggagtggagaaataaaatattgaacatccataagatggaatactaatcaggagttcaaaggaatattttagatacacacacagacaaaaatagctttcagaaaacactatggagtgaaaaaaagtaagttgcagaatggtacgtatggttcattgtttttcatagaaacacttgtattttaaaagtataaaaagcagtaaacacagatattaaccaaattataaaaggagtggcttgtggagagaagatatgacaggtgctgttggttacctaaccatggtcattcctgtttctcaagaggtccctattgttagtaattaactctcttcttgggtatgtggaaagtgggttccagtctcagtgccagggagtgaactacaattggctttttactaatcatgtgatcccactccactcaacagtgatggatttaggagttgattcacaattctggccagttctatggggtactgctgggaatagttttatgcactaagacagacacgtggctgtgatgctggtaatattcaatttcttggtctgggtgctggtttcataaaagtattaattctgtgaacattaagggagtttgcccttacctatctgtatgttatacattaataaaaagtttatatattaaaaaagacacacaggagaaaagtctgccattttctactagatgtctctacagatgagagctgattgtgtaccaaccatcctgtgatcatgaatgggccttgcccaattttctaaggatggcagagtggaaagatgggaagacctgggtcccaattaatgtaataaagtttctgagttagccatttctttttcttctttgaatcagtgatttggtttttctgtcacttgaggttaaaatgatcctaactaatggaggaagggggagtccctgaattggtaaacaaagaaggctcacttgatctgtaatgttttatttattttaactaaaaaataatatctgttgtcaactctgcgtagtgagtatgtaggtcattattctctaattttaaaatgaagtgggtagtattatttaaactgttctttaattttttttaaaaaaaggaagaaaaagtatcagatgagttgttgctcatcaggaacaaaaatgagggagtgattattttaagttgaggggcaactgggaaataatatttctcagcaaatgaatcaaaagccaatttgtttatattcatttaataaatacttagtgggcttttactgtgtataagctactgtgacattctgtttggacctatatttgaaatcactaggtttttgtaaagaacatcttgatatattggtatgtgtcttcaataggaagttatatgttctagaggacacccatatgtctgggttaaagtctgtattttaaattagagtgtctctagtagtatattcaaatttggcaaaaaacttatgtaagtatttttgtatgatacagaaacatatgtttccatcatttagctaagtaaaattcataaaacaaattattcttatgtctagtagaagtgtacatagaattctgactcccaagtttgtattatttcttgagatagtaaccatgctcaaccctcaaattatgacatacatatgtatgtgttccaagatacaataatttaaagaaagtctttggttaaaaatacacactgtggtgtaagacctgagttagaatccagctctttgtcaccttaaccctgggcaagttacttctctaagcttcagtatggggaatagtgtcattgtggagtttgtatgtaatggaaacctcaaattaacaatgacttaaataaaattttattttcaggcataaaaatccagggatcagtaatccagggctggagtggcagttccgtaaatgcttcaggaaatgcaggctgcttcaaggtctctgctctgccatccctggattgtggccctcatggtccaagatggttgttggaatgtcagtcattatgtagccaacaggaagtgggcattcctccctcctctaaggactcctctaaggacctctgtaggaggttgagaaatgtcttttttctaagtggcttttaaacttcaggggttctgttaacaacagaagaagagaatgggcattggggcacaatcagcagtctctgtcacagggttgttttaagaattaaccagtacatataaagcccagcacacagagcctgacatggaaacaaaggctgctattttaatcactagtagtaaatgtcaaacttctgactgaacaaatgtgcttatcttttctcaccaaaatgccaatgaaataacagtatacggattaaaatttaaaaagcaggccaggcgccgcggctcacggctgtaatcccagcactttgggaggctgaggcgggcagattgcctgagctcaggagtttgaaaccagcttgggcaacacagtgaaaccctgtctctactaaaatatcaaaaacattagccgggcatggcagcatgtgcctgtagtcccagctactcgggaggctgaggcaggagaattgcttgaacctgggagacggaggctgtagtgagccgagattgtgctactgcactccagcctaggctacggagcgagactccatctcctaaaaaaaagaaaaaagaaagaaaaaaaattttaaaaagcataagtaaggaacaggagaggcaacctccagagcagagaaactgtgaaatcaacaaaattgtgagaactgaacagcaggtgaaagtagcaattgacgtagcagactggaaaaatgaaaatctaagagctcgcaagggggaaggttaagaagcaagctgattcatgctgcagaagtccagaaagtctcagaattggaggccaggagtctttgaaggtgagtcgggtatgtctggaagtctgtattagaagccagtataccctgacaacctctctcaggcaactacctttcacttcaccagcagaaaacctgatgtttactctagagaggtcgaactagactaatgctggattcagagacagctagcataactgagggcagaggtgccagctgaaaaaaggaattgattgtacatataagaacgtggaaaactgatccaagagaagatacatacagcttcttagagttgtacatctccatatgaaatttccagttctctgctaataaccccagagtgaaacctgccttttggccagttctgtcaatgcacatctttcaatatgtgtgctctttagtgccttgcttttaaaaatgattaaccaaagaattaccagacatttgaggaaacttgagaagccaaaatcatgaaaaagaaatgtggaggaaagaaagaatatagggataaataaaaatcaatagtttgttgggattttttttaggagactttaaataatatcctcagagagacaagggaaagtactatgtccaagaacaaaaacaagatgatataaaaatgaacatttagaaaagatgaagcgtggcaaattaaaatgaaggaagtgttttaaaaattcaacagaatgctggaggtaaagttgtttttctcttaaaaaaaaaaaaaaagccggagatcaaagataagaaagaaaagataagaaattagaggatttcctcaaatatttgatgatccaacaatccagatagcagtgagtacaaaaaagaaacagaaaagggaaggtaggaagttatccaacaaataataatgcaagaaaattctaataattaaaatacttgatttcaaatggaaagagtcgagcccagtgagtgcctagcacaataacattttaaaagcccacactaaggtacatcactgtgaaattatggaattctagaggtaaagtgaagattctaaaagcttgcagagaaaaaaaaatacatacaaaggaataggagtcataatatccgactcctcaaaggcagcactgaaagttagaaagcaatggaacaatccttcaaagtactgagggaaaattatttctataacctatatttaaatcaagctatcagtcaaataaaagggtagaaaaaagacttttcaggcatgaaagtcctatgcacctttcctaggaaacttctggaagatgtgctctattaatataaaggaataaaccaagtaagaagaaaacattattcatggaaaaggagggatctcagggtgaagggaaaccatagatgatcagcccccgcactggccaatggagcaagagatcgaaggcaccaagaaagagtgaaactgaaagaggatttaaccatagcaagagggaattttcattgcttccaggggttctgggaataaattagtgagaggtacgtaaatttagcaaatgaaaaaactaggttgttattaactccagggaaaaccaagtttaaaagaattaaaatatgatacattatatggctctgctcaaaaaaataacatggttataatactgtaatgttgcatactgatttaaccaaaaattatgatgttgaccctagtgaatggattggaggaaggggaagtgtaggtattttggaagaggtggggaagcagtgtgtaagagagctatatcctcatcttccccagtatattgtcagtagatcatttttaaagccatagggtcgagaaacaggaataaaaggatattaattagaaacatagagggaaaataccagggggaaaaagcagcctaaagtgatgagaataataagcttggaggtctaggaatggagataaagctctagggtattttaactaataaacatgtaaactaatgtttttagtatcaggcttgtagaacaattttgttttttcaaccatgtatatgttttattttgataaaaaaacattgatttttaagtgtgcttttggtggcttcatttgtacaaagtctttgcaaactaacaatacaattcagtgaacatttattcaatacctgctctgttagaccattgtacaagagacagacatgtaaacatatgattgtaaaacaaagcctaatgtgattacctgctcccaaatgatgaataaatactgatatctcatagaagcacctcacttcttttgggactaggggaaggcttcagagaggatagaacatttgcactgggccctgaagggtgggagcaatctgaagaggaggttcagtgccagctgtggccagtgttgtccaatcccaccatcactggaaaaggagatgtgtttaggaaagaagtctggtggagctgtgggaggctgttttgacttctctgcctctcctagacatttatattagtcatttcttcctgaggattttctcctccctgccctatcacccagacacccttaattttagtattgactttaccatgctgagttatattgtggttctctccccactggcaccctgcctcttaaacttttggtctaatttagagaaggacaagggaagggaaaagaaaatattggtttcacctggccagatgtagattcccgaatataaagataggaactctctttcctaacctcataggctactaggtatagctgttatcttttttgaggcactaagattaaactgtcattttcacagtttgaacgtaatttttagaaccctcaagagtaatataggacacatctaattttttcaaagaagtataattgtttcacaactataaaatatttctctgtgaagatgcttttcagaagtaactgggcaagtcattatggtgtgtgtacatgtgtaacatcctccaactttagaattttgtgccctggatttgttttcttttatattgttgggtccaaaagaggaaaggctggcttagaactaaatagcagaactaaaccatatgttttataccaaattagaaacaggtgaaggttgttaaaatccagcaagcacttagaaaagcttgagacacaagtttgtattaaaggcaggtggttatatgtacaataaaaaacagtcaccagcacactggctgattgatacatatgtgattgatctttttggataaaaacaaggaggagttaataaatcactgcacatagctataaagatgtttgggcttgaaagcctagcctgtaagagcaaatgtgggccctgaaggaaatttatgaagcctagatccttttagctttacttaacagctaacatctgactgacccagggggaccatggaaatttattgctgggccattcaaatatttaagctgttgtgtgatgcagaacaggtaaagattagcccaataacaaatatgaggctataaaataaaatgagatttcgatgacttgtaagtacttgtcagaggtcagctccaaatgactggtcagaaatggtaaaaacttgttgataattaaaggggattgactatgacaacctagatgtttgcattggttgctgtcagatcagtgatccttggaatttccttctcctttgaagtccatgcttaacaaaatgacttaggggcctctaaattgtctttttgtgctctgaaattgggcaagatgatgaattgaggtgattccttttgcaattttatcattgaaatatgtctttctcaaatacattctgaatataatgcaattcctagacagcatattcactttagaaaactgactttagctaacttatgtgtgtaattttgagcattgacatccagaaagcaggtaaagtttttaggctttttatgatagatgatctaaaatcagcctttaaaacttaagtagtttaacagatttatgcacaccattattgaaaagttgatttagtggaattaagtggatgtaaggaacatggctgtgctgcagccaagcaggcatagggcagcaggcataagccgaggtaaacagcccacatgactcagcgggattggggcgcaagcgcacagtatcatatcttatataatcatagccatgtagacacagcatagagaagctccccacctggctctcagccgctattgtttgtgtagtgtataaatgtaacactaaccctgtgaaggggctgctgaataaagccatgtctcatctacctgctgtctcttgagtgttcttccagctccctgccccacatccacccactccgctcagccctcagctggggctggaatctgaccctgagcatgacagtggatttttcaaaaactttccaaatattctacccacatttatttaagccccaaaagcaataatgtatataatattgttaataggactatggaagttacatgaatgagatctacagttattggtattgacaatctttgcctttttgactttaaacataaaatgtagatttgatggttttcagagtgccagcttatcaaatcacttggtaaatttggcagtgatttggcatatgaacatctgatttgtggggagaagaaatcccttagtttttaatagaaatcttgtatgaaatgaaatttacaaataatacagctttacaaaatggggttattacttgatggagagcatggaatagaataaaaagcagaggcttagaagtcagacaggcatgggttggaagtagctccgccacttctacttcacccatacattcacccctccctccattccacaaataaatgtgttccagatgcagggctcttggaactgggatacagcatcagtaaggacttcggctcatagttcacattcctttggaagattcaaggaataaacaagcaactacaatacagtgtcaaaggtaccctgttagggattgtacagggttcgtgaagacacatggggagaaataactgattcaaacttggggcaggggtgaagtgaattggagatgggtggctgttgtggagtgttaggaaacgctatgtgaccatgggcactaaattaatagtgcctgcaggacaattgctaggattgtatagataaagtataataagtacaatacctgctgcataataatattccataaatgcaatccagcatcaacatcattgttattgctgtcatcttatcagtactcactggcgtttgctctaatagtagacggctctacctgctgttaatctgtggcaaacaccattctgtaatttaggatcttctctcaaccaaataatttttcttttgagcagaactcaaagcactttctaaaaataagagttggttgtctaggtatattaaaaccaagaaagaaagagtaataagaacatacctgaatcttgaaatcttccgtattgattcctgtgttttgttttttaattcacagaactatatgttacttagttctccttcagtatttacttaatatattcatttgtttaatcattcatttgcagatatttgttgaatacccactttcaataagaatctgagcttaacacccatgtcctcaaggaaattgcgttttaattcaggaagtaagacatttgtataaacagacatttgtataaaatattgagtagaaagtgccaggtgcataagaatactttttgatttcagaaggcaacaaaatgaataaaatatgctgtctctcttgagacacttacagataggagtggaggaaaagaaaagggaaatcaagcataccgttaagaaaggtaataataataattgaatgcctgctgtatcctactaactgtgctgggtcatagattttttttaaatgcattttgttatgtagatttgaggttgagtcatagattttcttgtttaattttcacagcaatccttaaagattgctattattaaacctattttagagttttggaaacaatttcagagtagcatgttctagttcataccacaagtgaataacaaagttctgtccctctgacttcaaagccttaacttattgtacctaaatagcccttttgcctttctcctcttctcatctcaaaataggtatcagcacaaaaattaaataaacaatttttatataaaggattgagtacctgttatcagcactgtataaggaagcaatttatagacaatatagaattaggtgtcctgatacgtttaagcaaatcaatattatatgcacacattgtgaagtgttgtctttagatatttcaagtggtgaataggttttcttccaaatttatgttccagatggaaaatatcttctggcattaccaagtatttatgcaccttgcatgcttaattgtggatttggtgtttttttttttcttaacatttacagatttttgtgggaaacaggtgctgttaaatccaggcaaatgcaggatggctgttaatgttgtggaatgtgattttgatttgcttggcagaatttttatttaacaaaattgactattaaaaaaagacatggtttccatcctttaattttactctgttcactgaaatttgcctgtggactgtttttcaacagttacaaaaagggtgtggaaaaactggaaggtttctataaggaaattgatattgagttctttaacaatttccacagccctgcaacttacaagtaaaaaaaaggaggggggattatttttaaccttcttactaaaattacctggaattcaatttccctgaaattccattctttttttagtatagctctgtctaaaatattgtatataatattggcaaagagaatgttctggtgtaaatcttctcattacatgatttctcctttaaaaactttggggtgatattttatttcctgttatatcaaatttaacctcttttggttggcacatacgtctcatattttctcttttttcttcccccaaagaaggaggaaaaaacaatcactcctctttttgttcttccatgaggacttttaggatagagatcagcccatggtctggcgtggtgtgtgtagagggccctacctaatctgtcacataccttcctatgcaacttcaaagtcgtcccttgccattcctccttcagtccagttctgttggccttcttgccaatccttgaagcagcatgtctcctccttccacagggcctttacacaagctgcttcctctaaccagaacatttcttcctttagcacctacccatctcatttattaggctgattatatgagcactatctgtctaacccactggactttaacctcatgtttgtgtttgcccagccttatatccctaccacctaacaccatacctggcacatagtatgagttctttgaaaacttgttgaatgaataaacagcatccacagtggtcattttccttcatccccccggttatgatgaaagagttgcccttgtctcacctgctgtctaaggcagacccttctgtactctcacctgtgtggtaaggaagctatcctctttcacctcaggacatgtttcctgctgtgcctcaccacatccctgcagctgctgagctcccctctctctatgccaggcttcccaccagcttcatttccttacctctagccactgctgaactcataccagtcggccttcatcccctgctacttcagttaaactttcatttaccatattatcagcgctacctaccagtgaacccacagagtcaatccagtagacgtttaattttgagattcgcttgacctgtctgcagcacttaactgttgatagcgtccttcttacattagcagtttgtctgagcttttctggtgagatacttcttggttttcctcatatcttttaaccagtccttttctggctccttctccccatccttcgttcatattctcaaggctctgaagtggttctcttgtataccatttctttaggccatctcattcatacctatggctttggtttccatctaaaatgtttataattccctattcgatattttcggcccaaattttgtcacctcatttcatttatatataataaatatactttgtttatattatagagtatctatatactatagagtatataggtataaatatatatagtttataagtgtattatatttatatataataaatatatagccaggcactgtggctcacgcctgtaatcccagcactttgggaggccaaagtgggtgaatcaccgaaggtcaggagttcaagaccagcctggccaacatggcgaaaccccatctctactaaaaatacaaaaattagctgggtatggtggtgtacacctgtaatcccagctactcaggaggctgaggcaggagaattgccccaacccaggaggcagaggttgcagtgagcccagatcataccactgcactccagcctgggcaacagagtgagactctgtctcaaaacacacacacacacacacacacacacacacacacaaaaataaatatgcacctgctccttctcccgtgtttcccatcacaattcacagataccgccatctgcctcgtttctcaattgagaaacgaaagggtcatctttgactcctcccctctttaccattttgtaacaatcaatccatcacaaaattctttcagttcttcccacatatctattcacatatcttcctctctacttctggaaccctaaccaaaactgttatttctggcctggattttgcaataacctcctatccaggtcctgttcacctttatttaccacactgtagccagtctggtctttaaaaaacataaacacccatgctttaaaaagttattatcctcccagctgggcacggtggctcacacctgtaatcccagaactttgggaggccaaagcaggcggatcatgaggtcaggagatcgagaccagcctggccaacatggtgaaaccccgtttctactaaaatacaaaaaattagccacacatggtggcatgcgcctgtaatccctgctactcgggaggctgaggcaggggaatcatttgaacctgggaagcggaggttgcagtgagccgagattgcgccactgcactccagcctggtgacagagcaagactccatctcaaaaaaaaaaaaaaaaaaagttattatcctctcattttccttaaggatacagtataggtttggttttcttgtggtttataaacccttgcatagtctggtacctgctgatcttagcagcctaatcttacggcacttcacccctcacactctttttttaaccctagctcctagctgtttaatttcacccgtaattttataaaaagatggcaattccattctgtcagttgcttaggtccaaaactttgaagtcatccttgactcctcttcctctcacacctcatagaagatctgtcaccagatcatgttggctctgtcttcaaaatgagagaatccaaccacttctcaccacctccacagccaccatcttggttcaaaccgctgtcttctcttgcctaaatttttgcagtagcctccccttgtttcttttcttgctcccctgcagtttatcctcacagagcagccattaaaccctccagtgcttctcctgtcattcagagtaaaaactgaagtccttgctgtgacctccaggaccctgcatgatgtaaaccgattcctttgctgacctcatctcctggtcctttttcccttactctgctccaggcactctggtctgccttcacttccttgaatgtgactataccaggcattcctgtctcaaggcctttgcacttttcgtttcacctgcctggaacactcttccccagatagcttcaagactttctctcacttccttcaggtttttgttcaaatgtaatcttctcagtgaacctcctcttatttgtcatgtctctctcactgaagtgtaagcttcatgaagacaggaactttttttgtcattttgttcactgtgttagcacctagaagagtgcctatcacaaggtgatgatgcagtaactattgctaaacaagtgaatgaagaatagtatttgctttatttgtccagtgctcattagagtctttggtataaagtaagtaaatcatttattgattgaatcagttcttttactctaatttcaaatgctcttacgtcttctctctttcaaatttctgacctttactttcttcaaaactagttttaaattttccacctataggaagctgcctacgattaatcctgtcactcagactggagtgcagtggtgtgatctcagctcactgcaaccttcatctcctgggctcaagtgatcctcccacctcagcctcccaagtagctgggattacaggcatacaccatcatgcctggctaatttttgtatttttagtagagacaggattttgccatactacccaagctggtctcaaactcctgggctcaaaggatccacctgccttggtcccccaaagtgctgagattataggcatgagccaccgcaccagcctgtttttctcttattatttactattagctaaaccttttgtttgtttatttatgttgtatcccaagattttattatgaaaatttctaaacatacagaaaagttgaaagaatcttgtagtgaacacccatacacccaccacctagattctgcggttacatttgctgtacctgtgttattgtatctttccatttatctatctgtttatctattatatcaacctatttatttccgtgaatcttaaagtaagtttcagatatcagtagacttcccctcaatgcttcatcatgcatatgattaaccagagctcagtatttgtttatggttcttttttcttttgaggtaaaatttatatgtaatgaaatatacaaaccttttttttttgagacggagtctcactctgtcacccaggctggagtccagtggcaggatctcggctcactgcaagctccgcctcccaggttcatgctattcccctgcctcagcctcctgagtagctgggactacaggtgcccgccaccacacctggctaattttttgtatttttagtagagatggggtttcactgtgttagccaggatggtctcgatctcctgaccttgtgatctgcccacctcggcctcccaaagtgctgggattacaggcgtgagccactgtgcccggccagaaatatacaaatcttaaatgaactattctgagttccatcaaatacataggcatctgtgcagtccagcacgtcaagatacagatcattgactctcccctgaaacttccctctctcttttttctagtgaatcactgtctttcccagtcccctgcttaaccattgtttaaccgtaagcatgcagtatgaacttctttacataaggcttctttcacttggcatattattgtaggttctttcatcctcaacacttaggtggttttcagtttttggctattgtgagtaaagttgctgtgaacatttttgtacatggtatttttgtgggcaaatgttttcatatttcttgggtaaatacgcaggaacagaattgctacatcataggataagtgtatgtttagttttataagtaactgccagacctttttccgtagagcgtaatgtacattttatactcccactcaacaatatataagagttctggttgctccacatcttaagtctcttttaatctgaaggttctctccttctttatttttccttgcatttttttccttgttgtataagttaaacttactctgcagatccctgtaaagttcctcacattttgaattttgctgatggtattaacatgtttatctttcccctgtgttacctataaactggagataaaaacttagttgatcatattcagttttcttggcaagaatacttcataggtgttactgatgctcccttttatatcacatttggaagcatattatgtctagttatcttttttgtgtgtgtaatgttaaaattgattagtacccctggccactcttagtctaatctgccctcagtaatctttctgaggaaggattttagattgagtgacctgcagtggtctctctaagggtgattctgatcaaaggctagaatgacaggaaagtgtcagctctgggaagatttaaggagcaaacacttaaaaaacagagaatagcaagttcaaaagtcccaaagtaggaaacaatcttggcatgttcagggaacagaaggaaaaccagcatgacttgagcatagtgagtgccaaggagaatgacatgaggtagcagtggctttagccacgtaaggccctgtgggctaccctgtgtggtttaaattttatttcaagtgcagtggaaaatcttttgatggttctaagtaggagactgggtgccacaatcagatttgattttttaggatcagttggctatgggaaagagggggaaaatgtccattgttaatcatgcttttcatagattataactttagcccgaaccaatggatatctgttactttctgtgttactttaaattgattatgatgtttaaaatgagatatcacttatgggggaaggttaaatggcccttagtgtaaagttattaatccaaagaagaatggaaacttaaaaaatagatttgaatacagttaaaatattaaatgataaatggaaacagaaatattattttaaaatggcttattttttaaagagtacattttggactggttaataaatgtaactttttaacatggaaacagatgctgaaatattttcagtccccagtgtaaccccccacagccagccatttccatctcacgtgcctatggcctgccttatgctttcacagcattaccatcaacagttaaaacttcagtgacactatacaatgtagcagaaaaatgcaagatgtttttttttttccccctctttagtcttggcagggtaaaacatggtcctttttactctaccaggtgctttactttggccataataatttagtatgggtctatagcttttggtcacttcccttactcgatcatgggggaaaaataggggcagcttgcatgctgctggcattttacattaacatttttttcacaggtttttgttgttgttgttgttattgtcgccctggaggacttgaatgaggctcgtgtggttttttttgttgttgttgttttgttaattgcttctttgaagtgcatgtagccttaacacttatcatagccaaccaagaactggttgctcctgatagtaggtcatcccaccagttatacagactggtattccacaggaggagcccagtaggtattcatgttataatctatcccaatttctgaacccctaagcataccagagttaactcacaatttactatagttgttgtaggggggactttgggaaaataaacattgaaaaacgtcttttaaaatgagttttaggtccgggcatggtcactcatgcctgtaatcttaacactttgggaggctgaagtgggaggattgcttgagcccaggagttcaagaccagcccgggcaacatagtgagaccttgtctctatcctcccgtgcaaaaagttagccaggtgtggtagtgcacacctgcagtcccagctacctgggagactgaggcaggagtattccttgtgcccgggaggtcagaggctgcagtgagtcatgatcatgccactgcactccagcctgggagacagagcaagaccctatctccaaaaaaaaaaaaaaaaaaaattattgtctttggcagataccctgatttaattttggtcacttctttaaatgtgatatagctgtcaaataaagcatgaggcagcaagaacaagaattatgcacatgtgaatgtgaatcatgaaatgtgggaaaattaatgcactaccaccagagcatgagataaatgaatatggaaacaactaccaatcaatctctaggcattaaatgggcaacaggaaggtcaaaggagaatcattgagtcctggagtggtcaagggcaatttaaaaaggaatgtgacaacttgaactagatctcataaaggatggaatagtatttagataggaaagcaagaaagatggacaccttcgagaagtaagtaaaggcagagaaagaaaagtgaacttgatgtgtttgtgacactgtgaggaaacctcttgagcaaaaggtgacagataaattgggcagatgggtcagatcacttaggcctcgaaaggtaggcagaggagttgaaatttaaaacaataactgattatgaagcagggctgagaagtgacatgataagaggtcttacttaaaagaaaataataacttatatttgtgtcatgctttacagttgcagtgtactttctcaatcttgtggtgttgtatcctcacaagatacttgtgaagaaggcaggaaagatgatagtttctccactttacagcttaagaacttagcattaaactagttatgatttacccaagttcatataacaactaagtatgtaatggagctgagactagaaaaactatgtcttttctgttgtaattcagtttttagaaacctactgggcttcctaaaatcaatctgacagtgatatggagaatgaactggcattaaggattctggctaggtagtaagcaaattgataagagcttggaccaatgattctcaactggaggcagtttgaactcctttccccacccacccaggcaacattgggtgatgtctagagacatttttggttatcacagctgggagtcgagtgctattggcttttagtgagtagaggatagagatgctgacctttctaaacatcctgtagtatataggacagcaccccacaacaaagaattatccagagtggcagcaggaatggagaatgttacagaggggaaatgatttgtcagcttggtgaagcactgcatatgtaaaaggcaaatcaggtgggtaaagttgaatgccactctaagtccaagtaattgatagagaaaagtagtaatggcaaactagtctggacaggagaaagtataccgagtttgaggtaaagtcattgcctcagaatatattgagtccatgttgtcacattttctataaatacgaatggcagaagtaatcttaatatgtatgatttaaaaatttgaattaactatagccatgtcctcatccccagttgccatcaaataactaaatctggatgtgaggctctgaaggtgaaggcaagaaactattagcagcttggagtcctttgtagaaatgtctgggttggtggggagagggtagtgtttataacagtgtatcttttataaatatttaaagtttgaaaatcagtttcttttcacagtttttttcaagttgtgtgtgatctatttttcatgtgttgcgtctctgtaggtgtgtatatgatatatatgtgaattagtaaaaaagaaaaatcctgctcagactcagcctgtacataggaatttctttttttggtactttacttaccagatttcagtcggtctactttgcaaccttacctgctacctatcatgatgactctttggcattagagtctcaaatctttcttggttcctgaaggaaaaaatgaaattgaggggtgacagcgtgctgacagccctcactcgctctcagcgcctcttctgcctgggctcccactttggcggcacttgaggagcccttcagcccaccgctgcactgtgggagcccctttctgggctggccaaggccggagccggctccttcagcttgcagggaggtgtggagggagaggcgcgagcgggaaccagggctgcagcacggcgcttgcgggccagctggagttccgggtgggcgtgggtttggcggccccgcactcggagtggccggccggccctgctggccccaggcagtgaggggcttagcacccgggccagtggctgccgagggtgtgctgggtcccccagcagtgccagcacaccggcgctgcactcgatttctcgccaggcctcagctgcctccccgtggggcagggcttgggacctgcagcccgccatgcctgagcctccccctcctccgtggggatcctgtgtggcccaagcctccccgacgagcactgtcccctgctccatggcgcccagtgccatcgaacacccaagggctgaggagtgcgggcgcatggcgcgggactggcaggcagctccacctgcggccctggtgcgggatctactgggtgaagccagctgggctcctgagtctggtggggacttggagaacctttatgtctagctaagggattgtaaatacaccagtcggcactctgtatctagctcaaggtttgtaaacacaccaatcagcaccctgtgtctagctcagggtttgtgaatgcaccagtccacactctgtatctagctactctggtggggacttggagaacctttgtgttgacactctgtatctagctcatctagtggggaggtggagaacctttgtgtctagctcagggattgtaaacgcgccaatcagcgccctgtcaaagcagaccactcggctctctgtaaaatgaaccaatcagcaggatgtgggtggggccagataagagaataaatgcaggctgcaggcaccagcagtggcaacccgctggggtccccttccactctgtggaagctttgttgtttcgttctttgcaataaatcttgctgctgctcgctctttgggtccacactgtgtttatgagctgtaacactcaccgcgaaggtctgcagcttcactcctgaagccagcgagaccacgaacccaccgggaggaacgaacaactccagacgcgccaccttaagagctgtaacactcactgcggaggtcccagcttcacacctgagccagcgagaccacgaaccccaccagaaggaagaaactcccaacacatccgaacatcagaaggaacaaactccggacacaccgccattaagaactgtaacactcaccgcgagggtccgcagcttcattcttgaagttagtgagaccaagaacccaccaattccggactcaaaattatattcagtatgtttagtttcacatattgagaattataacatcttggagttggaggagatactatacctcattgagtccagtggatcatccagtatttgattcctcctgtgttagtctctcaagctactgtaaattaccagaaacttgatgagataaacagcagaaatttgcctcacacagttctggaggccagaagtccaaaatcaaagtgtcatcagggccacactcctttctttatcctttccagcttctggtggctccaggcattgcccggcttgtggctgcataactaagctctgcctccatctgcacacaacctcttttccctttgtctcacctctgtgtttccttattacgatacttactagattgagggcccacctgaataataaaaaatgatctcaactcaagatccttaactattttagatcttttcatcaaataagttaacttaggtcccaaggattagaatatggacatatctttttggaggccgccgtgtaacccgctacatccactgaatacatgtgcattgtttgtgtttgtcgcccttctctacttggctgcctgtaaccaagatctttaggattttgaataactctgtagtgaaatcaatctcctgtaacgcatataccattcactttggttctccctgcttgaagccatgcagaaaaaaacgaattctttttctctctgaaagtccttcatttgttgtccctgagactgctatcctccaggacaaacacctctggttccttcaacaatttctctcaatactgacttctgttcccctaatcatcctgggtttgcttctctaaagcattcagaggcagtagagagaatactggatttattattgaagacctaatactgaagccatgtctcttccacttcctacttaggtgaccaagccaaatcagtttattttaaataacaataatactgactacttcattgtttcactgcatgctttatatagttaaatgagattgttataaacgttctctagaaacataacctttaagtaaggatatgagtgttcttctgtctatttataaaatactttcactcccagaactgaacataggtctctcggtacagtctaacctagtacaaagtagttatcactatcacgttccccagctgagctgctctgcttctgttaccgcagcctgggatcgcattagcttttttggtagtcatcgcataattcttaactcatattgaaactgttctgtactaaagagttccaaatatttttcacaaataatcttttttaaaaaaaattcaacaaatatttattgcgttctgctagtagcagtgcgtagagacttgacagagaggcaaagaggaagaaaataaaatttctgccctcttggagcctacagtatcataagggagacacacatgaaccaagtaatcacacagtgagtgtaaatttacaatctgagacagactggaaaaagaaagggttgcaaactgacctaagccagtttgatagttcacaatgatacaagtatttacagtagataaaggtgggctctgataattaagattggatttctgcagttctccccactaacctcttcaccacctgttgttagttagagtgacagtaaggctcagatggaattctgtcacacacgtaatctatttattgctttctaattccttgatttttctactatttatagaaagagctacaaggtatggttcaaataaggccatttgaagacagtagagtcggtgaattttcaatgtggaaatttaatttaatttgaaaataatattagccattttaattgaatataataataaattgtattgaatcttcataggaaatatatagttcatcctccagttatttaatgtaatactcctttaatgagtcctctttgtggtgttatggacctgcttctggttgtactttaatgaccacattcttatctaaagcttctatagcttgctaatgtaattctccaatataagatttgtatcttatgttctgacgataataggttttaccctttaaaatgggtatttttcaagattgatagatctataaatacatgtacttttgtaaagtaagatgaatgcatgatagttataagctattatactattcaacttcaagtgacctaagaatttgaaagcaatataaaatgtaaattctgtcctaatattcgatctgtctttgcattgccttatccgaaccataccttgtggctttttgtataaataagtcccactgaagtcataataaagtcaaatgttgtgaaatcaattttttaggaatgttgaagcttggttttcaatgtatgctgatctcaatttactcttctaacatacgaaacagtttctagatttataccttgaaaatagagatagctatgggtttggagagctgttcagatagtctacatttgaagcttatagaataacagctagacagcacagaggtttaggaccgtagtagattttctctaaagtgcccctgttgggtacttgcaaatacgtcgtttctttgcaggctaccccatctgaatttgaatgattcccagacatcttgcaacagcctggtgttacactttgcttatcctgaatttgctatgctgtcatttttatgcatctcaatttgaggccaaaccacatgtcctagtttattttttactgtttcaattaaatatgaagctctgtcttcttgatgggtgtgtgaagcatttggtgttcctttagtagagaataaatacagttcaggaccttgctcagtccccagtgcctataattttatagtgtaacaaatttacctttggatactatatagccagcaactcctgagaatttaatataaagcccttaaattctatttcctttattttattttctctagaaaataatatcctctaggctttatggaatgtatcttttcctcaggcaattaaaagacaattgaaattaagactagtaattgtcacctgccattcatttcaataagattattttattcttgagaataattgtatatcgcagaagtaaggaagatgaagttttcttcttgaccctaagtaataattgatctgtttgtaaagaaatctgtatcagatgctaaaacttttgcttgatcttaagaatcagaaaacaatgactagactataggtatgctctaaacttttcttcatttgcaggtgtaaagaaggggaatagtgaggggagttactctctaaaataactcattatctttatgaagatccagatctcatgcctttgttgctccagtgaggcaggttaaaatggaaattcatgtatgagagccttatggcatgagcacattgccttagagaagttgcatccaaatagccatccctgtaaatgtgaatgaatattttaatgaattttggctcatattggcactgttgatttcactggtcaccttaaaagaaacagaaatcttatatattgcttctaagtctgatttcttttccttcttaatcttcctctcccatttagtagaagttgagatgtcaggtccaagatattagagggaaaaatttctggtatcttaatcttagctaaggtggcaagtttatgatatgtaaataggaaccagtggcctcaactccttggggtgggttggtcactttcttaaacattagttccttgttctgtgacctgttcactttttcttttgaaagaaagcagccgttattctgacttaattaatattatgaagatgtcagtagattgcaatgactatagctaggtgacttagtccaattcagatgtttatgctgtatctaagaaacttcagcctctgttgacaacttggaggttgtatttactcagcttttgaaaatatctgatccttttttacctttcttaggtttccactgtatccaaaaggaggggagaagttgcagtttgattatggtgtctatcttctgaacaaaaatatagcacaggtaagtctctgttcttcacttctctcctacttcccatgcacagcctgtttccttagattgccagccttttttctttataaatatgcactgcagttgaccctcgcatttaaccagttacattagtaatacacagttcttttttttgatcacagtctttttccgtgcccttaaaatgactacagagaagcaatgaatacaaattggaatcctcttgctacttgctaaactcagaatctttttttgtatttttacttgctggtagactatacttcgatgtgtgggcttcatcatctcttgcctctgcagcttgaccaattgtaattttcttagactatttctagggactcaatttgcattgttgtttatggagtaaaagttcagtgcctttgcaagtacttcatggtctcctcactttattattcagggcccgaaggaaaagaccaagcacatgacccttccagtctgtcttagatgtttgtggcactctcaacatcacatcagttagtatgccacttaaataatgtctttccgtatgccgtagtaagactatcagatgcctaggtttgtattttcctgaaagaaatatgtagcatttctttagaacttctggccctacttcaagatgtaggcattccacaagttttctaattataaaggaagactaacttcctttgttttttatttttttttgtttttgtttttgagatggagtcttgctgtgtcacccaggctggagtgcaatggcgcgatctcggctcactgcaacctctacctcccgggttcaagtgattctcttgcctcagcctcccaagtaggtgggattacaggcgcatgccaccacgctcagctaatgttttgtgtttttagtagagacggggtttcaccgtgttaggcagatggtctcgatctgctgacctcgtgatccgcctgcctcagcctcccaaagtgctgggattacaggtgtgagcctttaaaacacccagcctatttatttttataaataacaagtgttttgttttgttttcattggacatccttccaactggaatatcacatggatgagtatccacaatttggcttttatttaaatacattgtgagctatatcctcagaccttttggttttaccaaagtaataagatttacgatgcttttgtttttgttggcctgtgttgccatttatccacatgaacctaacgacttgctaaacattcccttattcatttctgatcagtctagaattattcctctatgtggtgtcatctgccactcttccccttaaccaacctcagtttaatggtggagatttttttaatttgttttttattaagattgttgttctcttctgaaattgggtcagatttctggattgcaatcctcagtttatcatttgcttcatccttcacactcattgtcctctcaaccatactacttttactgttacttccactccagctccaggaaagcagccctctgacagtctctggcccatgactcacctttccatgtgccattcttcccacaactgatgcttgcccattctgcatttttggcagacaagtatttcattcaaagaagcagggctttaattccaagactgccgagctcccactccgctgatcacagttctgtcatgccatggaaaaggcagtgcttaaacagaacttgtcaaaagtgctcagactgaggccaggtgtggtggctcatgcctgtaatcccggtactttgggaggccgagatgggtggatcgcttgtggccaggagttggagaccagcctgggcaacatggcaaaaccccatctctactaaaaaatacaaaaattagccaggtgtggtggcatgcacctgtaatcccagctactggagaggctgaggcatgagaacctcttgaacccgggaggcagaagttgcagtgagctgagatcgtgccagtgcacttccagcctgggtgacagagcaagattctgtctcaaaaaaaaaaaagtgctcggactaagactgcactaaggaagaagtaaattagagggctcctccagcgatgtcagccgtggtggaaagagcatgtagatactacaggatccagtttgagagtaaaactggcatcatttagtagaactaagttctgatttgagttcagaacttctcttcttgccctattttctctttcttgctctaggcacttagatcctaaggtcagaaggctattggaagcttcctggtgaaacttactcctgctgaaatgcctgtatttcctcatatattccagcttcaaacatacacacaatatgcacatgtgtacagatatacacacacatgcacaaacacacttctttcttctcaagggcccaaaaggatggtatgccaaaagatcatataaagtgttgctaagaataccacagcttgctttgggagcaagaccaagatggaggctatgtgcaggggaaaacttagcaaagtcagccctcctcatcagactctcaactctagggcctgtttgatccccacttcccaagaggcctctgactttattattaactgaaccagggccacaagtatgctgacctagttttactcatctgagaaatggattgcttgtagtaattgtgtatcctctccagctttatatatgctctttgaaaattgagagaacaatcaataggttaactactctgaatccatagggagcaagtatcctcctctgtggattttctttttttaatcacactggaggcagttttaaaaggaggggacagtaaacttcttaaaaactggcttttttatatttcaaaatgtattcgggaagccctttaagcagttagaaacttttagaacagttgtgacctttcactttttttgcttcagctctgtctgttctgtctctcgctgtttctcagggaagctttcattttgtctttgaccttactgccatcactttttcacgttttgatttgtaacaaatgaaagaaccattaattgttatggctcctaagcgagcattgtagcaatcaggtatttccagcttttgaaggtttatttttatagacatatagactaatatatgttgtcaaaggggagtttgtcttctcagccagttccatatgtacccatcttttaagatgtgaacaaatcatactattaaaatggcctcacctcagtaatttataagccacattagtggaggtggatgaaagcattggcatgtgttaaagtgccagagaaaaaggagtgaagtcatttaatactgcatccataacttggttgaggatttgaatagtcaataggacctttcatcacaaccagaagtagtagtaaaatcacttttttggtagaggaaatgacagaatttagtaatatttgttacttcagtatttgggatcagtccagcccaagttttgaaagcacaagcttagagagacaggccttcaagtagaaatcctcaagtgttgtttgaagagctgagagcactggtaaggcctgcttgccctcttcatgtcactgctgtctaaaggtgtgtgtgtgtgctggattaagtactgagagtgagtgaagcaaaatgccttgttttcagcaccatatattaatatttgttaagtgccagcctcttcagttagaaatagccttccttcttggctagcatgtaatgctataggaatgggcctgtcaaaattcaggtgcagtataattgacgttgactttaaaaaccagatcctgccataatttcagttagttcataagtacattatattagaatttgtatagagaacagaaatttgcttttaattctcagagcataaaaattaaatggaaaacaaaaattataatacttttatcttatatttgtgggagccttatagtttgtaaagtacatgcatataaattcacatgatccctatcatcaccctgcaaagtaaaaagggcagatgctattaaatcgatttgaggacagcttggcttttgacatttgtccctccagtgtcatatcacataatttgataagtgtggcagagatccccttacttctatatacttcactgttctatatatttccatccttaaagtgcaccaaatcaaagaagacgacattcccagatagaaaaggaagcaaacgttttttgagaatggagacaaaaactattttgcacatcataatttttccattagcaagcacaatgccagaaacactgtaagttctaaagaaattaataatgaatggtgatatagcaccatcacacaagaaactaagatctagaaaagttaagtgactttaatgaattttaaaaattgtgatacacaaacacaacgcacacacacacaaatagaatattattcagcctctgtaaaggacatactgccatttgtgacaatacagatgaacctggaggatattatgctaagtgaaataagccagacactgaaagacaaagactgtatgatctcagtcatatgcagaatcttaaatgtaaaagttgaataactagaaacagagagtaggatagtgattcagtgggagggagaggaggaaataggaagaagcaggctaaagggtatacaaatttgcagttagataggctgcataagtctagggatataatatacagaatgaggattatagttagtaatattgtattgtgtactgaaaatttgtcaagagagtagatttctacagtttttatcacacacacccatgaatatgttaatttgtttgactgctataatcatttcactatgtatatgtatatcaaaacatcatgtataccttcaaacatcttgtaccccttaaattgatacaatataaaatttttttaaagttaggtgacttgcttataattcattagtttattcaacagtatttgttgagcatgtactgtgtgctgtgtacgctgagttaggttgcagtgggtagagcaatgaataagatacactagatccctgatccctgcctcgttaatatgctagacacaaaaggacaaatattgtagcgttccatttatataagtatctacaaaaagcaaactcatggagtcagaaagccacattagagggctgggggaataggagagctatattgcttaatgattacagtttccgttggggtgatgaaaaagttttggaaataggtggtgacaaccattatatatcattgtgtatgtaatcaatgtcactgaattttacacttaaacatggtttaaatggcaaatttgagttgtacactttaaatgggtgaattgtatgttatgtgaatcatatctcaataaagctgttttaataaaagaaaaagaaagatccctgtctcgttaagcttataacctgatgggaagagacatacaataaacagagaaagtcattttagattgcaataagtgctgtgatggaaattaattaggtgatataatagaaaataagtggaaaaggacctactttagattaaattgtcaaataacccttattgaggaagtgactgttgagcttagatatgaatgatgacaaggaactagccatgcaaccagctaaggaacagaaagttcctgaaggtcatgggaatagcaagggcaaagtccctgaggtaggaaagagctatgttgaggtaacagatggaaggctgatgtggcaggagtgtagtaattgagtggcagaggtacccagggagcatagcacataaaacctcagagaccacagcagagtttcctaaattattctaaatacaaagggaaaccattgagggaagatttaagcaggaaagtggcatgatttgatatgttttttcccaacgatcattctagctactacttttttttggccccacccacccatctccacattctagctactttaatggattgcagggaactagagttgaagcagagttaccagttagaaggctatttcagaagaccagattaggggcaatggtggtttggatcaggatggtaggggtagagatggagagaagtgaacagatttgaaatatattatgggacatgaactagtggactgaacgtgggagatgagggaaaaaaaggaatgtcaagaatgactcctaggttttgtgtatgagcaactcctttaatgttactgccatttattgagatggagaaagatccaggagatgggagtggggcaaccaaaagatcttctttgcaaatgttaagtttgagttacctattagaaatccaagtagacaacaggatatataagtctggatctcaggactggaggtcagtacagggtatagaaatttgggactcatcaacataaggatggtatttaaatccagagaactagatgagattacccagggagagaacgcagagctgaaaagagagagagacaaatacagacacacacgtacagtgggatttaatcctgggaaattacatttagaagttgaatagaggaggaagaaccagcaaaaactgagaggaatggacagtcaggtagggagaaaatgaagagagagtagtaatttggaaactaagaggagtaaatttctgaatagaagaagtcatcagtatgtccagttatgggtttgtaactggagatgactatgggattaagggaagtttctttttgtttttgtttttgttttcaacctgtttgttttgtgggaatgtagaatggtttgtttgctttgttttttaagatggcagatatcaaggcatgtttatgctgatgagagtgagcctttgctcttgccacttatcccaaattgcctttttcagatgcatgaaggatggtgggctctgggtaaggaagagaacagggaaaaagtccagctcattatttatcttataaaaggaagacttttgataggtatgatataaatgtatagttcttaaccacaactcacaccatactgtgaatatatttttaatgtgaagatgaattggccatctatataggcattgaattagtttaacttttgaatacagtgaagagagctatactgaaactaaataattttcttccagattgttggtactgagcctttagtagattttctgaatagtttcacatgagtgtgccaactgtacagaatttaagtgacagattcctttttcttctagagcagcagtgtaatcagtccctggttccttggggatccccaacaccctcagtaggtctgggagggcggaattattttcataataatactaagacatttttgcctgtttcactgtattgacatttacatgatggtggctaaaattgctggccacttagaacaaatcaaggcagagggactaaactcagctagcagtatttgtcttctgtaagactgtgtactcatagtttatatatatatatttaaaatggggttcaattaagaatgtccttaatgaagcagtaaaaattattgattatattaaatcatgacccctgagtgcacaccttcttaatattctgtgtgttggaaagagaatatgcataaatcacttctgctgcatactgaagtacagtggttgtttcaaggaaaagcacatgtgcaatcgagttgctaagtgaactaccttcttttttaaaagccttgtctttacttgaaagaatgactgacaaattatggttatttagacttaagtatttggcaaacattttctcaaaactgaatgaagtgagcctgtctcttaaaggaaatcaactgatgataaaattcaggattttaaatgaaaattagaattccagatcgcttgtgtctgccaccatgagattggcagctgcccaatccttaaggatttttttgataagattggtagtgataataacacatgtgatttttaaatagtttataatggaatgtgtcagcattaaaaatatatataactcaatgagccaatgttttccaaatgaccattgtataatgctatgaaatcatacgtaggtaaagatcctttcaaagtgccagaaagaccaatggattttaatgtaaaagagtatgaaaactttattgatagggtttcagattctgcattgctactagtacctttaaaaagctattacttaatgaggttgggagtagtatcaaacaagaatatccacaaccatctgaaaaagcacttaaaatactcctttctttttcagctgcgtatctgtataaggctggattttcttactaaacaacacatggtaacaatgagtgcagaagacaatgtgagactccagctggcttctattaagctagacattgcaaaacagacttgcaaaaatgtaaaacaatgtcactcatctcactaagtttcttttttggaaaatttgcttatttttcattaaaaatattatttatattaacaagtaatagattgctattgctatttttggaagaattcacaaacatgcaaaagttttcttaatttcaatttttaatatgataattattgatacatatgacccatataaatgaaagccctttggggtcctcagtcattttaagagtataaagggatcttgagactaaacttttgagaaccactgtcttagagaatgtggccatccagattttctgtgaaactcttcaattgctccaagacacatgtgtcatttccccaaatgtggaaacataatatgagagacctaccaatttgcattccaggaatgatatgtagtacaagtcagaaggctagcagctatcagtggattcttccttgttgcttttgtaagccaggcctcttctctccttttctgaaagctcaatatttaagagtattactttgagggtatattgtacaaataataatgatgatttacatttgtatagaatgtaatggctttggagtgtgtatttttatttgtgtagctcatttcatactctatgaagtatgttgaccaagtctgtctttagagataagaaattgagctgctgctatgctgatttcctggggatgacaaagctattaaatggcaagcaattcaaaaccaaatccagttatatcctactaacattatttgtttttctttttaatttgggccttcctacaattctgtgagttagacagggcatagacaattatctgcattttacagaagagccccctgagacagtgagttaagtagaagagctaaaattagaacctggggatttcatgactcccttccttttaccctattacttctcttccccttcaagttaagacttcatagaaagtaaaaatagcttctccatccaaaacagctgggaacccctgttctgccaaggacgtgatccttctgtaaatctttactcctggggcccacagtgcacagctatttagaagggatcaatgccagcttctacccagcagcttaaattcatgtatatttctttaacatacagccaaatgtatgtgacacatgagaagaaaatatgcttttattttcataattcttggaatcaaaaatataaattccaaggatgttttaatagtcaaaatgcctttccccaactactgcatacaaaatttgccaataataatggtggaagctctttataaaaagtactaaatttaaaaaaaagtttactgagatatatttcacataacatacaattaacccatttaaattgtacaattcaggccaggcgtggtggctcacacctgtaatgccagcactttgggaggccgaggtgggcggatcacttgaggtcaggagtttgagaccagcctggccaacatggtgaaaccctgtctctactaaaaaaatacaaaaattagccgggcagggttgcagtcgcctgtaatcccagctacttgggaggctgaggcaggagtgaaggagtggcttgtacctgggaggcggaggttgcatgagccatgccactgcactccagcctaggcaatagaacaagactgtgtctcaaaaaaaaaaaaaagtatatagttcagtggcttttaatatattcaccaaattgtgcaactatcaccacggtcaattatagaacattttcattgcccccaaaagaaaccctgtacccactagtagtcattcctcattccctcaggttccccatccctgggcagctaccagcctactttctgtttctatagatttgctgttctggacatttcttacaaatggaatcataaaatatgtggtcttctgtaactggctttatttgctttccataggctcaaggtttatccattttgtagcatgtatgagtcattcctttttgtagccaatttttgcagttggaagatgtgtatgtatatacgacatgttatttatccatttacgagttgatagacttttgggatgtttccatttcttggctgttataagaatgctgttatgaacatttgggtacaagtttttgtggggatatagttttcattattttggggtgtatacctaggagtggaattgctgagccatatggtagctatgtttaaatttgaggaattgccagactgttttctaaagtggcaacaccattttacattcccactactaatgtacaaaggttctgtattagtctgttctcatgctgctaataaagacatagccatgactgggtaatttataaaggaaagaggcttaatggactcacagatccacatgactagggaggcctcacgatcatggtagaaggcaaagtagaagcaattttactgtgttacatggcagcaagcaagagggcgtgtgcaggggaactcccctttataaatctgatctcacatcagatcttgtgagacttattcactatcacaagaacagcacaggaaagacctgctcccatgattcaattacctcccactgggtccctcccatgacacgtggaattatgggagctacaattcaagatgagatttgggtggggacacagccaaacggtatcaggttccaattgctctgtatcctcaccaacacttatttttcttttttattatagccatcctactagttgtaaatggttttgacttgaattttttctaatggctaatgatgttgagtgtcattactcttttatgtacttattggccatttgtatatcttctttggagaaataactattccaaccctttgaccatttttaaattaggttgtatttatttatttatttatttatttatttattagaggcagatgacaagaccccataataaaaaaattagcagggtgtggtggtgtccaactgtggttccagccacttgggaggctgagatgggaaaatcacctgagtccaggaggtcaaggctgcagtgagctgtgattgtaccattgcactccagcctgggcgacatggcaaaccctgtctcaaaaaaaaaaaaagatgtctattgaaagaatgaatgatgaatgagtcagtcagagattgttctttcctctttaaggttgataattaaacaactcatttctgtttaatgtatattatatattgtatatataaaatatataatatatgtaaatattatatatacacacacacacatctcttgtatctatttaatgttttaattgaggtcaaaaaattatatttatttatacatagttttttccaaaagttctattctgtgtttaaagggataacatactgcatttttctagttgcaaatgattggttaagtgttcatgtattaatttttctgagagccatcattagctattaaccaatgtgctagacatttttaatgtcattgactatgattactgtactctttgattgctgaaagtgtaaattgataaaactttttatctcagttggacattttttccttttaaactgaaactacaaatacagtgccaaaaatatatttccaaatgaaaaataaaacaattgtaacttacatatatagcttattttagggcacagggccctttcacatatattatttcttttatcctttgcagaaacccttaaagtgttggtattattatcttcattttacatttagataaactgagcctctgaagggtgagtcttttgctcatagtcacacagctgttagataaacaaagaaattcagaccctaatatctgactctaagttcaggagaccgtacttgctgctttccttttgtcagacaggaagaaacatcttacataacaggcttccctttttttctgtggctaatagctcaatataaatttagcaccttacttggcttaccatctttgataacatctatctcttcctttatcctagttgttttaaaagattcactttagcctttttacttgttcagtaataagattagccttttccaaagcaccaccatgagtgacatcttttgctgggaggaaaatatttaaagaatgtacctcaactgaaatgaaatatgcagtgctagctagttcagagaggatggcatataaattctcactatactttttatgattaagcatcatgaaatgaattatgagctatatgaaaaatgaatttggtctgattttagttggcatcaaagtgaccggcatagcttaggtgtaagctctttaaagagatgagctccaaaaaaatggtttatattgcctgattcaaaacccaaagtctctagattttaggggaaggtagcacagtagatttgaaattctaaattttggaacttttaatgatgttatgttttgctaatttatctttttgaaagagagactactttcaccaacatacccacagttatctgtggatagacccatatcataattctgtatttaaaataataactttgtagatatttctgtaaattattggtttaaaaatatatatattataaatgcagactagcactttacatttaaataattaaattatttaggtagatgcaatgaaaggaatgaaattttgtcatccacagatttcaaaaaggtggatgaaatgatttaatggaaagaacataacaccaacaattagaaatttcaaggttagaccgggtgcggtggctcacacctgtaatcccagcactttgggaggccgaggtgtgcggatcacgaggtcaggagattgagaccatcctggctaacacagtgaaaccctgtctttactctactaaaaatacaaaaaaaaaaaaaaaaaaaaaaaaaaaattagctgggtgtggtggcggacacctgtagtcccagctactcaggaggctgaggcaggagaatgatgtgaacccaggaggcggagctggcagtgagctgagatcgcaccactgcactccagcctgggctacagagcaagactctgtctcagaaaaaaaagaaatttcagggttatattccatcacttttaacttgccagtaccttgggcagatagtatctttctgctgtgtctcagacttctcatctaaagaatcaaaaagttgagtattatgtgccctgagccccatgtcagcaccatgttctttacatctctgcttcttaactttaccactcttataatttagtctgttcattgctttttcaaaatcacttttaagttgtttgactcgcgacagcatgatcaaaaaggttttaagattcttgcaaggtgcagtggctcaagcctgtaattccaacattttgggaggccaaggcaggaggatcacttgagctcaggagttcgagaccagcctgggcagcacaacaagacctcatctctacaaaaaattaaaaaaattatccggacatagtggcttgtgcctgtagtcccaactactcaggaggctgaggcaggaggattgtttgagcctaggtgttaaaggctttagtgagctatgattgtgccactgcactccagccagggcgacagtgaaaccctgtctcaaaaaaaagaaaaaaaaaaagattaagatgaaatgtacaaatagtatgcttatatattggtgattttgtttttagaaaatattcagagatttatggagtaccatactaggcttatgtaagtccaatacaatatggacttataaaactaatgataatactatcttacatttatgtagtgccttacagttttcaaagcattctcataagaagctcatatacttaccctcacaattttttctctgaagtagaattagtaagaatttctgcctttgatttagtagttcatcttgggaactctagcataaggaaataattctaacttcctgaaaacagttaaatatgtttatcataactgaaaatagttatctgggaataggttaaataaatgaaggagcattgccttcattcgttttctgctgctataacagaatatcatggactaggtaattaataaagaaaagagatttgtttggctcatggttcgggaagctgggacgtctgagagcatggcaccaacatcaagcaagcatcaacccatggcagatgtgagatggagagaggaaaattggactgaattcacccctttattaggagcccactcttgtagtaatggcattaatccattcatgagggtggagccttcatgacctaatcacctcttaaaggttccaccccttaatactgtgacagtggcaaccaaatttcaacatgaggtttggaggggacatttaaaacatagcaagcattcactgtgattaaaatttttgtgaagattaggtagcatagaaatacctttgttattagtgtagaaaagagagcatggggttgaaggcacactgtggttacagatattaaaataattttaaaggcaccaaacaaactaccctgtatataggagggaaaagactgcctggttgtataccaaaactgtgttacatgtttgttttgtgggacttcagataatccttctacttacctttttatttatttttattgagcacatattgcttttataatagaatatatatatataaattatttttttcagacaaaaactgaatcctagtgaagttttttgacattctcaaaatggtacaaatggttaatggtgaacctgggacaagaaaccagttttcttctcttaatctattcgttagtacgttcaaattatagaatattccagcagatacagaaatttcagctttaaagaggctggtcaagctatgtattttttctcagtaacgtgtacttcctctttaagattcattagcccatagtcaaattgacaaaatcagtgttattttttcatactttgtaaaacacagctatattccctctagctgagtatgtttccagacagtatatgtggttaggagaacaagtacagacagacatggattcacttcctgatcagtgttgccacttgataactgtggccttgtgagtttctaggcctcagtttccctacttaaataatgagattcacaaattccgttgtaaaacgtaatgctaacttttctaaactgccctaaaacatttctgtgtctgtccccattgtgttcacatttataaatagtagttgtatttcattgtttccagattcccttgcaaggcagcttaatgccttggaaagagctctagattgtgttctagcttcagagttgcttctaactctttggttttctaactcattgtccctcttattcactgtaacattgagccagtctctctctttttttttttgagatggtctcgctctgttgcccaggctggagtacaatggcgcaatcttgactcactgcaacctccacctcctgggttcaggccattctcctacctcagcctcccgagtagctgagattacaggcacctgccaccacgcccaactagtttttatatttttagtagagacagagtttcaccatgttggccaggctggttctgaactcctgacctccaatgatctgcccgcctctgcctcccaaagtgctgggattacaggtgtgagtgaccgaccgcacctggccaagttagtctctaatttttctaagccttggctccttctaaaataagaaacttgaagtaaataatcttttcatttccttctaacagtaatattctacaatttctcccagtctagttttgagcacatgtatgattttaaaaaaaaacaataataaaccggttactcttaaattagaggtgatgggagggtagattgatcatttaaaaaaataatttgacattatgcagtgaaattgaagatttgtatatgagaatgtttatagcaccactattcataatagctgaagattagaaacaacttaaaatatatcgacaatatgttcatcattaattaaggtatatttatgtaatcaaatactgtgcagccatgaaaccatagcaatgatagggacgaatttcaccagcatgatgtagagtaaaagaaccaaagcaaaaaaaaaaaaaaaaatccacaatcatcctctatttatgtatagttcaaaaccaagcaagattaaacgatattatttaggaatgaaaactatacaaaaaaacaagggtagtgactaactacctctggaagtgagaaggggttataatgagaaaggggcttgtggaaggcttctggggcaccagcagcattgtatttcttgaccgagtggtggtaacacaggggtttgctttataatcctgatcctttaaacaatgtgtatgtgtgtttcatttatttttctatatgcatattatatcttgccattaaaaaatcataggtggctaggcacggtggctcacgcctgtaatcccagcactttgggaggccgaggcgggcagatcacgaggtcaggagatcgagaccatcctggctaacacggtgaaaccctgtctctactaaaaatacaaaaaattagccaggcgtggtgtcgggcgcctgtaatcccagctactcgggaggctgaggcaggagaatggcatgaacccgggaggcggagcttgcagtgagcggagatggcaccactgcactccagcctgggcaacagagcgagactccgtcccaaaaaaaaaaaaaaaaaaaaacataggtaacaattttttaaactgtataacactatttcatcaaattcttgtcatctcttgaaaaataattgccattacaaaggatggcaaggacttcgtatttcagcatcatatatcagaagaaaaagaattttcagctagagcgcttaagcattgtcttagctttacacataagaatatctactttgggccaggtatggtggctcatgcttgtaatcctagcactttgggagaccgaggcagatggatcacttgagcccaggagttcaagaccaacctgagcaacatgatgaaacctcatctctactaaaaatgcaaaaaaatcctagctgggtgtggtgattcacacctctagtcccaattacttaggaggctgaggtgggaggattgattcccaggaggtcaaggccacagtgagctgagattgcaccactgcactccagcctgggtgacagagaccgtgtctcaaaaaaagagtatctgcttttgatcacacaatatatccttgtaacaaatctgcatgtgtaccccctgaatctaaaagtttaaactaaaacaaaaaagaatatctgcttttattgatacctatatgcaaagagtgtcttattctttattcctagtcttcacaataacctttcaggtttttgttattatcctcattttacaggtgaggaaacaggtatagaatattttggtggatgaggaatttttaaaaaataattgaaacatctgcatggaccatttttggtatttttttttctccttcatgttataaaaagataaattacaaacaagatttgtgaccattttagggatgtatactattaaaataagccctaaacaaaagaatagactgagttttggctgttttttctttcaaatgtacctggaagtatgtaagatttcccaaatgcctaatagtaaacgagcttttgggtattggggcatttgccacttataggtcaagcccctgcactgagtgttgaaataaagcctaattagaagagaaagtgagagaaacaatgtctacatttttaatacactaattgtggtggtcactctatacaaagtttgctgaactatgaccactaagctaaccgggaagaggaaattactttgtataaccaagccaaaaaatttttttttagatttagttcataatgtcacttaagattcttctgaaaggcttgtgaacctttgccttcttttaataagccttcataatgacaaggtcccctgagaatgaaatcatctgaacggaatgtgcctgtgtcttaaaatctgataaacatcacttcatgttattcaggagatcaaaagagacttaaaacacgtaaatgttactttcaggttattataaccaaggaagcctgtggcccagctatcaaaataacttagctttagcaagttctaagcagtgggcttagccaggttggttagtgctgccttaggactgaccgcactgtcttttgagttgacctgtaactttcaatgtagaatgtaagtgcttcatctctgaggcacatttatgtgtcccttagctcctgacactaattcatcatttgctttatagtaattccactcagacatcatcatcaagccccagtggaggctactaaatgatgtgagtggatatatttcctaatcagtgacattagtttatatctccttattaagatacccattaaattcataccaggagagataacatgaacgctaatgcactttacatcttccatcagtgctttcttatttatttctataaaggcggtattaatatctgaatttaagagtccaagagaatgtaccgcttttattaatggtctaagatcttttattttgttaagaaatggaagatgtgaaaagcaaagacatttattatcatgttgtcatttttattctctttccctgcctagaacatagccattaaaatatacatactatcatttatttttaaagttgttaatatattttatatactttttccaataaaatgtatgatccgagttttcctgtattttatctttataagttatcttatttttctcattttagtctgaaactcagaatatatatagtgttttgtggacgttttggatataccagccaaaaagtattaattgaatatactatactaggctctgggtggtggtggagggaaacagaagaagttgctttatgtgacaaatagttcacatgtgtataaaatctaattgttctggccagtcgcagtggctcatgcctgtaatcccagcactttgggaggctgaggaaggcagatcacttggggtcaggagttggagaccagcctggccaatgtgaaaccccatttctactaaaaatgccccccaaaaattagccaggcatggtggcgggtgcctgtaatcccagctactcaagaggctgaggcgtgagaattgcttgaacctgggaggcagaggttgcagtgagccgagattgcaccattgcactccagcctgggggacagagcgagaccctgtctcaaaaaaaaaaaaaaaaaaaaaaaaaatctaattgttctgatgaatcccccaccacattgccttaaccagaatagtttgttcaacagatatttcttcatttattatatccttttgagacatttggcaaagttactaatgtgatttatcatttgaggaatccataaattactgtgttcaggaactatagcaacatcatggcaatgtggtcccctttgtttggctctggctttttgctgttattgctttctcagaactgataactttttttaacaattaaagtataaattgtgctgggattgtctgtgtcagtgctcgtcaaagtgtgatccacaggccagcaggcagtctgtagtccatagagcttgttgtcagtctgcagtaagataaggaaattgtaccaaatgtgaatcaattgtgtcaccaaacacactacttagttcagatgcaaatttttcttttgtatcaagacattctggatgaaggaagcagggcatttatttatattctctcactagcttctttgttacatactggcactttagccttggagtttaggcaaatataaaaagcagaatataatatccttttaaaaatcagattttctttttcaccttgcagggactttattatatatacatctgcttgtctgctacaggggaaaccactctaagctgggcattggcaaatcacattacttatgtcagtggaaggcacatttagcatttttcagcattaggtcttgtgatcaaggtaagcaggtttgtcattgtcatatttccacgtccttttccatgtgtgtttttcacaactcatctatcagcttgtatttctggagctctttctacatgtcagacaccccatgcctgctgacacccagtgccctcattctactctgttaaagccatgagccctgaagttggtgcaccaccaaaatccactttccctcccagttccatagtatgcaaagttccattccctcagtaagcagatagctgactaactgaagggaaaacaacctgctttaaataagtaacacgggtaattcaccttctgcttacatatttgtaatttaaaattcgggcctgttaatggaactatataagacatatttttgaaccatggatgccctcgcttaatcatgaacttaaatctttctttagttttttccatcatgtattctagaaagatttgtctttacacatctgtaaagctgctcactcctgccctaaagtgggtattggattttcccacaaccttttactttgtttggtaaccttcttgcatggaataaccttggacagggagacatgaatccaggaaaccaatcagaactattcttcgtatgtttaaggatttaaagtattggctgtattttgttttcagttgtaagtatcctttcatatttgaaattaattagatagagatttggtctattttttaatgtgttcccagatctttgatggcttgttaacatgatgtagtagactaggaacttctagttttgctttcatacttttaaaaactaaagtgcatgtttcataaaattaaagtgcctcaagagtcagctaatataaagtaatattttaccaaggtcataagtgatttaatatgaaagatcatattttatcataagcataacagacttaacaaaatctagacagacaaattgctagtttagaaatgatctgaacttatttttcccaaaaaaacaaagacccgcaagactgtgtatatatggcaacaggcattatttcattgatccccaaggctgtggatctagcagcagctattataacatgctttgttttcattattgcaatgcttagttagtcatctgaattctagctgttgctgtttatagcaagaaatagcatcccagctgaggcagcacagctagtcatacctttttattgatgtaatttaacttattttgtttcctttcctagtgtctaacattttgtgaagccctaacataaattattggcttgtataacccactgcatcaacttcacttggagatttgctgcctatgcagttccttaattttcaagtgtgagagatttatttttcctcagtgagtcctaatgtttctacatgcgcacacacatacatgtgcttgtgaatgtgtgtgtaggtacataggaatgccagtgagaaagtcaaacatattcttggttaattcctgcatgatattctggagaagtatttacaattacagatatgagttgccatgttctaaaattgaccggtgagcagtatggtaggtagtgtttttaaattttgtccctactttgttttcttttccttagagactctgactaattaggactctgcacgcttcatgtcctcagtgaatacttattgactgcatcacagaccaattgatttatcatacaccaatgtaaatggctaaaatactgccacagatgataatcataattactgtgtgtcagacaaggcacttcagtcctcatagcatgaggactgtaatatagatggaattctccctggtttacaaatgagaacttcgaagctcggaaaaattaaacaaattgcccttgttatacagctttataaatgaaggatcaagatactttatcaaagtatttttatgtgtattatttcctttgatccttatagcattccttaaggtggacagaacaagtccttctctattcccattttagaactgagtaaagaggtttagtaatttacccatggttactacagcgggcctgattgtcaggactatcctctgaaccctgatactacttggcatttgtaagcgtttagttgttttggttttttgttttgttttgttttgtttttgagacaagatctcactctgttgctcagactggagcgcagtggtgcaatcacagctcactgcagcctagacctccctggggtcaggtgatcttcccagtagctccctggggtcaggtggctactcctagcctctcgagtagccaggactacaggcatatgccaccacacctggctgatttttatatggttttttgagtcagagttttgccacgttgcccaggctggtctcaaacttatgggctcaagcgatagtgatgggattacaggcatgagccaccacatccagccccatttgtgaaaattcataagccagtaatgacatcagtgataccattatagcgcccctatagtagtttccattggctgatttttgtcacttaagtaattcttcattgcctctactaaggtagagtcctgctgaaatacttggcatttaggtaagcacttttataatgagaaaaacgaggacgaggggtgggaagtttgcaaatctgttatgtccacccctgcttaaaaccttgtcatcgttttccataggctaccttcccccaaatcccatcttctcctatgccacccccaacccccacttccgcccacccgcgccccctcccccgccttgcaacaagactcttttgcatggcaaagtcttcacatgatctatctgtcttctctctcacgtttcagcctcaactcctgcaaccacttaccccaaaacctccgccactggccctttatgccaggaaagctgaacatcactgaaaggcccatcttctgcttttgcttttatattccctttgcctgaaatttccttccccttttgtccatgtggtaaactcccactcattctccaggatccaaccaggccaacttctcttctgtgaagcctttctttgccctcctgaacagagttatcacccatcttctattcttcctgctcaccttgttttaaaaaacaagtaatcgatcaaatatgtgaatattcttacatttctgttgttattttgcatgtatgtctcccctactaaattaataagttccttaagggccagagactgaggttcattcatctctttatccagacacagtagctagcacataacatggactcaggaaaggtttgcacatgcatgatagactgaaccagtgaccttcctgcatggactaaaaacttaagaactcatctctgaaaggaatagccttccatttaaaaggcaaagggagttcacatttgtatcaaatgaaattacagtcttacttatagatatgcctggctttgcttgtgtctaggaagataatgcagggctttgagaagtggggtgagattaaggagaaattatacagtaagcgaacattttccccaaaatatatgcctgtggtaataagttgttatatgttgagtgactttttctcttctagtcagagagctgacaaatattttcaaagtgttatagtgttttctaagtgttattctttcactgacaattttatttaataattttagatacagtagtggctctagagctaactgaattactggcttatatgtaattcagctagtatattcatattgacagtataggagagatgattaccagctcacaaagaatgcatgacgcgatgccatttgaagaattgaaaatggaaggaagggggtatgtgaatttagataactcaaccctagagttctggcctattagccctttggttttagttttataaaattatacatgctgttaaagagtcaaatagatccttaaggctaattgtgagaaacagtatttctgcttgtttcccagaggtaacgactttcaacaatcttagcagattatgttactacttgcctctaaataatttgataatgttgatgcttcttggattttgttcgatttcttctgatttcttcagtaggagatgagactttagttccctttcacacattcatatcccctttctgttcccccattctacctgagaaataaaaataaattcctaagcctcccaaccaactgaacataccccgttttggccagaaggaccctggagaaaccctaaaaactgagtttccagctgtgatgggataggaagttggacctgccttattctacctccgccctcgctagccaccattcggtgttctttcccaagggctaaatggaaaccagccctttagaaagacttcctgcacctctgatttcaaccaatctcctgactgcacctccatttttatgtttcaaatgcagcaactggtcagcatttcttcctgataagagaccacactgactgtggagtggttctgccagtctacagaggctgtgcacagaggcctttcatgtcctcgctttaccttttgatgtacagggcctacttgtaatacatttaaatgttaagtctctaccccaaagtgagcatggtgtgcagactgtatacatattagcctactacgcctgcttgtgcttccccttcatgaatattcataactcctcctataacctgttgaatgtatatacttagccaacccactcagcataaattcccattccctttaaccctccctggcagtgcctatttccagcttctggccagaggctatccttcccagtctgtcagaatggctacctgcaggctgcaaccctttatgagaaataaagctctcctttccagacttaggaaccttgtcattcttcagttgacctaccgttataggttttcaaattactttgtctatataaataccactcagataagccatgtagtatactgtgattactttttttcccctaatgttttttatttcctttggagcttattttcttattttttctttgattagttttcagtgtgcttataactaatttcatcctaaattctctaccagttatctaatcacctctcaagatattcagacatgttagatatacaataaattacatatcgggtattcacacaatttcatctttgggagaaatctctcctagaacttctgatctgctgcagtctgtcatattgttttctatggctttaccataatcctagggatttccataatttctcttatgttgaaacctctattttctagataaatcctcacaaagaatgcatgacatgatgtcttcctctttctcagtgttctcccttgttttgttggagcatatccttctatagcttcctaagaaagcatgcatggagataaatttttgagaccttgtaaatctgaaaattatctttattcttctctgactgaaatggaatgttaggctggaaacaattttccttaagattttgaaatcattgttctattatattttagcttccagtgttactgaaaaatctagagatatttgattccccctttttgtatgtgaaatattatttacttattttgctttgccttgctttttatttttagaaatttgtaggaactgtatttgtgcccaatgttctgaaatctcagactgataagtctgtttttatctgttgtgctcggcactcaatggatctttttaacccaaaagctcaaatcattaagttctgggaaaattccttgaattacttcattaatggtttactcccttttatttttttttatatctcttcctggactactatcgtttagatattaggtttcctgtactgctcctgtaattttcttacttcttctctcctgttttctatctctttgtctttttgttctacctctggagagatttgcttaccttcatcttcttgcccttgtgtttttcattttggctttcatatttttaatttctaagagttctttttctctgaatagcatcttattgttctatgtgtgtaatatcttctcttttccacttgagcatattaatgatttttgaaatttttattgttgtttttgttttggacttgatatatcatttgtattagaagcttttcttagaagtttggagatacccgattgtatatttgttttttttttattattctttaagttctagggtacatgtccacaacgtgcaggtttgttacatatgtatacatgtgccttgttggtgtgctgcacccattaattcgtcatttacattgggtatatctcctaatgctttccctcccccttcccccgaccccacaacaggccccggcgtgtgatattccccttcctatgtacaagtgttctcattgttcaattcccacctatgagtgagaacatgctgtggtgtttggttttttgttcttgagatagtttgctgagaatgatggtttccagcttcatccatgtccctacaaaggacatgaactcatccttttttatggctgcatagtattccatggtgtatatgtgccacattttcttaatccagtctatcattgatggacatttgggttggttccaagtctttgctattgtgaatagtgccgcagtaaacatacatgtgcatgtgcctttatagcagcatgatttataatcctttgggtatatacccagtaataggatggctgggtcaaatggtatttctagttctagatccttgaggaatcgccacactgtcttccacaatggttgaactagtttacagtcccaccaacagtgtaaaagcattcctatttctccacatcctctccagcacctgttgtttcctgactttttaatgatcgccattctaattggcgtgagatggtatctcattgtggttttgatttgcatttctctgatggccagtgatgatgagcattttgtcatgtgtctgttggctgcataaatgtcttcttttgagaagtgtctgttcatatccttcacccactttttgatggggttgttttttttcttgtaaatttgtttgagttctttgtagattctggatattagccctttgtcagatgagtagattgcaaaaattttctcccattctgtaggtcacctgttcactctgatgatagtttcttttgctgtgcagaagctctttagtttaactggatcccatttgtctattttggcttttgttgccattgcttttggtgttttagacatgaagtccttgcccatgcctatgtcctgaatggtattgcctaggttttcttctaggatttttatggttttaggtctaacatttaagtctttaatccatcttgaattaatttttgtataaggtgtaaggaagggatccagtttcagctttctacgtatggctagccagttttcccagcaccatttactaaatagggaatcctttccccgtttcttgtttttgtcaggtttgtcaaagatcagatggttgtagatgtgtggtattatttctgagggctctgttctgttccattggtctatatctctattttggtaccagtaccatgctgttttggtaccagtaccatgctgttttggttactgtagccttgtagtgtagtttggagtcaggtagcgtgatgcctccagctttgttcttttcgctcaggattgtcttgacaatgcgggctcttttttggttccatatgaactttaaagtagttttgtccaattctgtgaagaaagtcattggtagcttgatggggatggcattgaatctataaattaccttgggcagtatggccattttcacaatattgattcttcctatccatgagcatggaatgttcttccatttgtttgtatcctcttttatttaattgagcaatggtttgtagttctccttgaagaggtccttcacctcccttgtaagttagattcctaggtattttattctctttgaagcagttgtgaatgggagttcactcatgttttggctctttgtttgtctgttattggtgtataagaattcttgtgatttttgcacattgattttgtatcctgagactttgctaaagttacttattggcttaaagagatgttgggctgagacaatggggttttctagatatacaatcatgtcatctgcaaacagggacaatttgacttcctcttttcctaattgaataccctttatttctttctcctgcctgattgccctggccagaacttctaacactatattgaataggagtggtgagagagggcatccctgtcttgtgccagttttcaaagagaatgcttccagtttttgtccattcagtatgatgttggctgtgggtttgtcataaatagctcttattattttgagatacgccccatcaatacctaatttattgagagtttttagcatgcagggctgttgaatttgtcaaaggccttttctgcatctattgagataatcatgtggtttttgtctttggttctgtttatatgctggattacgtttattgatttgtgtatgttgaaccagccttgcatcccagggatgaagcccacttgatcatggtggataagctttttgatgtgctgctggattcagtttgccagtattttatagaggatttttgcatcgatgttcataagggatattggtttgaaattctctttttttgttgactctctgccaggctttgctatcaggatgatgttggcctcataaaatgagttagggaggaatccctctttttctcttgattggaatagtttcagaaggaatggtaccagctcctccttgtacctccggtagaatttggctgtgaatccgtctggtcctggactttttttggttggtaggctatcaattattgcctcaatttcagagcctgttaattggtctattcagggattccatttcttcctggtttagtcttgggagagtgtatgtgtccgggaatttatccatttcttctagattttctagtttatttgcatagaggtgtttatagtattctctgatggtagtttatatctctgtgggatcggtggtgatatcccctttatcattttttattgcatctatttgtttcttctctcttttcttctttattgtatatttgtttttaagaggaaagaactagaaaattaattggaagcttggagcatgtggacagggattatcaactgtagagttcactagagtgtaatttggctgggctctttctcattagggaacacctgacatcattctatttaggtctttcctcttcagcttgtcaaggatgttccagtcatcccgctttaaagtacaagccgattgcttgttttctggaagcagagttgggaaagaggactgaaggttttggcacttagtatgcgtatgttcacttaatcaccttgttttcagtaaagtgcctttgcccttaattgtacctgacggttccctctccaaggaataaaattctagtgtatttgtcaggatggaaaaagaactgttgcctggctcacggagtttgaaaggaaatctggggatataattgtataacagattttcaaccggtcttcctattccccaactttactgccaattccagaagtacctagggccaccagttcttgagcctttgtggattctcagattgcctctcaactttccctacttctggcttggaattcaactttttcaattctgctaaatttgttaccacttatctatctgctttttagcttgcaaaacattgttgcagttatatattttcctattctttgtctttgttaagctaattaagccattaaaaaagcatgttattaaatttacatatgtaaaaaaatttgtgatataaatatatgtctcatatatcatatattcatatataaatatatgtcttatatatcatatattcatatataaatatatattttttaatcccttggagctgggtgtggtatctcttgcctgtaatcccaatgctttgggaggccaaagtgaaaagatcatttgaggccaggagtttgagaccagctcgggcaacatagtgagaccctatctctataaaatattttttaaaaattagctgggcatggtggtgcccacctgtagttctggctacttgggaagctgaggtggcaagattgcttgagcccaatagtttaaggttgcagtgagctgtgattacgccactgcactccagcctgggcaacagggcaagactctgtctcaaaaaaaaaaaaaaaaaaaaaagcccttagagggagatgccacctctgcttttactgagtagctcctatcagatcaactctcccacagattaaaaactgtaaacaaaaatataataaaacaattatatgaaggcagtagagaatgaccaggggagagtcaaacctggaagcagagggtagcacttgctaagtgtcatttgtgtagcttgtagcctgagggcaggccccagtcagaaccatgcaaggcagctaagattcttgtagacactcatagtctctctggcttgaaaaaccagaaaacaaaataaggagacacaaaacaaagattcactggggaaaccaaggatcccttctatgttgaaatttatttaacatggcttttttgtggcttaataggatagagaataaaattgtaacagaagttattgataagcctgaaaaaatgtatgttaaatataaaattattctagataagttaaaaacgtaagagtacgtccaagggaaggagatagctgtctttatatttggaggactgtcagggagaaggaaaaaaattaaaccttgctgagggaccaacttaatacaaatagctagaaaggataaatttttagctcacatgagaaataactttgtttaacagatagagctgcccaacaatggaatggaaagcctgggctaaattaagtgtctaagtcactgaaggtgtgtgtgcgtgctaaagtgaggtcacagtcaaggatgctgtagaaaaggagtctgctctgtggaaccgtaaaacccgaatgccttttaagttatgctctactccatagaattctgtgcctaaccaggcctcttgctgtcatctgggtggaaatcttgcatcagattttgccaccagagcctgttccacaagcaaataccctgaggcgccccttccttgagtcagcagtttcagctgggaccttaacccgggatttggaagtcctgttgaatgcagtgagacaggcctcatccaaatgaagcctttgctgctgctccaaggacctcaagggcatcctcgcccaaactgaggcctccagacatgttgaggcagagcttgttagccccttgcaaacttcctggtagccatagcactctttccttctccttcccttaactgaagcgtgcaaccccttctgttagaggcttgttttctggcactccgcaagtgcaagatggtgatggaggtggagagtagaataggaagtttctccatgtctccagaacattgcgtttccctccttgtgtaaaaccatcatccttctttgagcctgtataactgctcgaccctctgtcacacctcgtcactgtcatcaggcatgctcatgacttctctggggcacctggaattcagaaccttgcttaaaattttcctctctaggctgctgctcctctagtaacctacattactctctctcctccctgtctccaccaggccacaccacgtgctgtttctcacgttctctcgtgcttctggggatttgcacatgcagtttcctctctctggaatactgtgcctccctgccctttcactcactgaaatccagctagtatgccacagtccagacaggttatcacttcttttctgaaccttctagtctcactgagacttaggtgttccttctctgcgttcctgtatattcctctgatgtggtccttactcatttttaatgtgttctttactcgtttttactgtacttatgtttctgatttttaaatgtctttctattatattatggaactgcctcttccttatctttgttacctcatagaaggggttcaatatctattgattgaatgaatatatgcttctaggtgcttgtcttctttgggcctatacaagactgaaggtggaacaaaaagaaatagtgttgttaccatagctagtttatatagctagttgaaattctatttgaagtgtatatattcattctgttaaacatatatatggatgaacttaggttcaaaatgtaagtctactccttaccgcctatagttttatatcctctacctgataaccctgccactatcattccatttttgttgttctatccattttctaaccctattactttaatctactttcatccacagaaatttggcatttcttatcttcaaaacgctgtggatcttatcgttcatctcggatggtttttgtttgtttgtttgtttttttgtttttttggtgagtcttatctcttctagacacgcttgaatcagttgagatccaaaatagcaacatatagtcttaactgaaagaagttagaaagaaaaattaataataaattaagtagaaaaataaggtatagcattaatggtttagtttaagaaacagtgtccttaggaatagctactgagggaaaaggaagataactaacatttgtaagatacttagaactcacagactgtgtcgggagttttccaaaaattactttaattaatccacacaataattctgtcaagcaggtgttgttatatgagccagaggctcaggcgggggtaagagacttgcccaaggtcatacagagagtaactcgcaaacctagatgccaaccaaagaccctttcattttgttgttccttctcctgtaccatctcatatattttaaaatggctttttattagattgtttttcagtcaagaatttttggagttagctaggaagttaatgtgtaagtggcagtttgaagatagaagaccacatcattgtttaataagtgtggcacagtccttggaaaagctgattgatttgatgggggtagttttgtatcataatgtgctcaaagatgaatagcacaaagagtaatatttaaataccaaatggagccctcatttaccagatccttgatggaaattttaatacacctaaaacaaatttatgctgatttttttcgtacccccaacacagttgtccaaaattgttcatgcctgcataggtgattcacacattatataaaattcattttcaaagcaccttatgcaaacaaaattgtattcctgctctgttgttcgaaattaaataaaatggttcctcagccagtccactactcccagacatgcatccacacacgttcatcatacatgcttacctgcctctgaactttgcttagagtctttctaagtctccactcactggcctcctttcccagttgttaatgcattcagctcatcttctttcagataatggcttaggtcctaacacctcaagaaagcttttccaacaaggatgtattcatcaaataaggaaatgtggatttcacccttgcaatttgcagtgcagttcccccaaaaaagtctattaactaccacacacttggcatgatattagctgctgggcatttaacagtaagtaaaataaattctctgtcattgaagcatttacagtcgtcttgtaggtcttgtgtagggatcataggagcaaattattttcttgttctgtgcctccattttttcatctgtaatacgaggaaaataacagtacctgctttgttagggttcttatgataattgaatgaattaatatttgtaaagtacttaaaacagggcctaatcaatagaaaatgctttatttactaaaacaagactaaactttggaataagtgttctagttctaaaaagatcctatttgtatgttaagtaggattatagtaaatgtataggttagtttgtagagaaatgtcatctttatagtaacaggtcttcctattcaagaataggatatgagtttccacttactaatatcttcttttacatccctcaatagaatattaaagttttcttcatatagatcttgctattttggttatgtttatttccaggtattttatctttgtttctgtttaaaatagcaccacgtaatattctaattcattgttatttatataaaggaaaatcattgatttttgtttttcaattttgtattgaagtattttattgtttgtgatgagttttcatttggtttgcatggactttctaaatgtataatcatatctattaaaaatgatcatttgcctcttattttccaatttttatagctctagactttttttcttacctaattagtattaactgattatggtagtagtgaacatctctgtcttatgctgtgatttttgacttgtgaccattatacttgaaatggattattatatataatgttacgcattcccaatttgataaacaaaatcacaatgtgttttttaattgtccagtctgctttccataagcttaaacatccaaatttggctcttaccctgacaaaaatcttccagaatattttagagaactataatctatggagaacaaaaactcacacttccaaaaggagataaagtcagaaatgattcttcagtgttgctaaccctttcccctgagcacttaaattagcccctggggagtgtgtcctaatatgtttaatgttcaaaatatctgctaactaaaaacctctatactattgttaaggactaaccccattgtgcctgacacatagtagatacacaaaaatgtttattggaagtgttgatgaaattccagaaactctctccactggcttacctcatctaaatattacctgtccatcagtgaactgcttaggccatgttctccccatgaattctctcctaatatcttcaggtaaaaggtagatataatctttttcacttgaattagttttctgtgctttataacaaattaccacaaatttagcagtttaaacaacattctttaaaagaaaaaacgtttaggggtacatgtgcagttttgttatataggtaaattcttgtcacaggagtttgatgtacacattatttcatgacccaagtattaagcctagtacccaatagtactttttctgttcctctccctccttccaccttccatcatctggtagaacccagtatctgttgttcccctctttgtgtccatgtattctcatcatctagctcccacttgcaagtgagaacatgtggtatttggttttctcatcctgcgttagtttgccaaggataatgatctccagctccattcatgtgccttcaaagaacatgatctcattattttttatggcggcataatattccatggtgtatatgtaccacattttctttatgcagtcttccactgatggacacttaggttggttccatgttattgcagttatgaacagtgctgcaatgaacatacacgtgcatatgtctttatgataaaacgatttgtattcctttggatgtatacccaataattgaatttctgggtcgaatggtacttttgtttttagctctttgagaaatcaccacaatggttgaactaatttacactcctgccaacagtgtataagctttccttttccccctcaactttgccagcatctatttttttttatttttaataatagccattctgactggtatgagatggtatctcactgtggttttgatttacatttcttagatatcagtgatattgagcttttttcatatacttgttggttgcatgtatacttttgaacagacacttttaaaaagtgtctgttcatgtcctttgctctcttttaatggggtcgtttgtttttctcttgcaaatttgtttaagttccttatcagatgcatactttgcaaatattttctcccattctgtaggttgtctgtttactctgttgacagtttattttgctgtgcagaagctctttagtttaatttgatctcatttgttaatttttgcctttgttgcagttgcctttggtgtcttcgtcatgaaacctttgccagttcctatgtccagaatggtattgcctaggttatcttccagggtttttatagttttgggttgtacatgtaagtctttaatccatcttgaattcatttttatgtatggcataaggaagggggttcaatttcagtcttctgcatatggctagtcagttatcccagcaccatttattgaatagggagtcctttctccattgcttgtttttgtcagctttgtcaaagaacagatggttgtacgtgtacagccttatttggggggtctattctattccattggtctatgtgtctgtttttgtaccagtacgatgctgtttgggttattgtagccctgtgatatagttgtgaaggtggacagcgtggtgtctcctgctttgttatttttgcttaggattgccttggctattcagcctcttttttggttccatatgaattttaaagtagttttttctagttctatgaagaatgtcattggtagtttgataggaatagcaattgaatctataaattgctttaggcaatgtggcctttttaatgatgttgattctttcaattcatgagcatggaatatttctccatttgcgtcatcttgatttctttgagcagtgttttttaattctcctactagagatctttgacctgcttggttagctatattcctaggcattttattcttttggtggcaattgtgaatgggattacgttcctgatttagctcttggtttggctgttgttgggaatgctagtgatttttgtacgctgattttgtaccctgaaactttgctgaagttgtttatcagcttaaggagctttggggccaagactgggggttttggagatataaaatcatgtcatctgcaaacagggagagtttgacttcctctcttcctgttaggatgccctttatttatttctcttgcccagttgctctggccaggacttccaatactatgtcaaataggagtggtgagagaggggatccttgtctcctgctggttttcatgggaaatgccttcagcttttgcccattaagtatgatgttgactgtaggtttgtcatagatggttcttattattttgaggtatgttccttcaatacctagtttgttgagagtttttatcatgaagggatgttgaattttatcaaaagccttttctgcaacatccatttttatctcacagatctgcaggtcagaagctgggtgggctcagctggtttctctgctcagggtttcacaaggccagaatcaacgtgttggccaggctgagctcttatctggagtttcttggcaataatccacttccaagctcatctaaattgttggcagaattcagttccttgcagctgtaggtctgaagttcccatttacttgctggccttcagccaggggccactctttgctactagaagctatccacatttcttcttacatgaccctccatcttcagaccaataatgtcccatcaagcccttctcatactttgaatctctctctctgtcttctgctgccagccagagaaacctctgcttgtaaagagtttgtgtgattagactgtcccaccaaaataatctccctttgctgtaaacataaaattatcaaggaattaacacgagggggtgaaggtcatgggggccatcttaaaattctgcctactactcccacccatcaaactctctctgcactgtatgaggaggtaacctccttcagggtagtattcatggctgagtcattttgtgatacccaatcacacctttcacgtatatttattacatatctaatgaattcattactttttgttaaatgaattgtgagacaaaacaattatttacattatttgaaaactgtgaggaacagtgtgcacttgaaaggtcattgctgttttggttttttttttttttttttgaagctacatttatttatgatcaaccagagagactaaacagtggactcatgggtttggactctattgcaattcaagtgaggtcagaggaattccacagaaaacttaaaaggcatgaagtagctattatagtaaaattaatattttaggggaaaaatcattaatgagagaaaagagcattctggaaaactgtgttccatttaaggcacctcattaccagattctttaaggaaaactggagggagttctgagacacaaagaatgattaagaggctgtagggattaacttagaaacaacgattttaaaagactaaatatgtatagcttagctgaacagtaactaaacagagatgtaactattgtcaaatttctgaaatcaagagaagtaatgggcttctctgattaaaaaaaaaaacacttgagggtctcctttatgattattggagtaaatgaggaaaaagaaaacaaaatcttaaacaacttatatgcaatatttagactgtgcgctgcagtgtaaactatcagagttgaattcaaatcccaactcctttattttccacctggggaatttcaggcaactccttccaccttttaaactttgtcatatgtagagtgggaattacaccacctacctttagggttactatgaagattaaatgagatgacataagtaaacagtctagttccatgcctagcacagattgcaggttgagaaaaagaatagctgctattgatatcaccattatcatcatcgttcttaagtggttacgagttcaaagtgctaggattcagacaaacctagaattcaaagtgcctgaattcaggcacattcaaactgtatcatttaattctgtctctacctcacggtttctttaaccgtgatagtgttgtagtgaggacttaatgaaataatataacataaaatgcttagcattgattcctggcacataactaatcactgaataaacacattaacagctgtagcactattttcattatcgttagcaccatcattattccatcatagaacctggacaaaagcctaacatatatttagattatttccaaatttcccgttacaaacagtgccatgcatgtatctccatttctgccattatcgtcaccaccacacatatacatgcacacaattcagtaattatttattacttgttgaattaagtaatttcttctaatgatcctgtcgggtatttgtggtcactatacgtggctggggaggtaccagaatgctcctgtatgtttcttatgtaatccaatttatagcaacagatttaagtgcattttttcatttcagtaaaactgatatgtagatttatttgaatttttataaagaatccctgcacttataataatattttcatttgtgttttccatacataggaactccctgtagctacacattgcttataggattgtgttactgcagtaaacagaatatactctagctagattaggcagaaatggtatcaattagagggttgctaattagaagatattaagattaatcagagggtataaatcatatgtgttaagtattcatcagagctacctcacatttaccattagatagatcacagaaactgtgggagggccagtagagatacagatggcaaataaacatatgaaaaaagtgctcagcttgggcgacattgccaaacccctgtttctactaaaaatacaaaaattagccagacgtggtggtgcacacctgtagtcccagctacttgggaggctgaagtgggaggataacttgagcccaggaggtcaaggctgcagtgagctgtgtttctgccactgcactccagtctggatgacaaagcaataccttgtcttaaaaaaataaaaagctcaatattattagtcattaggaacatgcaaattaaaaccacaatgaggccaggtgctatggcttacacctgtaatcccagcactttggaagaccaaggcaggcagatggcttgagtccagggattcaagaccagcctgggcaacatggcaaaatgctgtctctacaaaaaaatacaaaaacttagctgggtgtggtggcacacgcctgtagtcccaactactcaggaggctgagatgggaggatcacctgagcctgaggtcaagactgcagtgagctgtggtcacaccactgcactccagcctgagtgatagaatgacaccctgtctcaaaaacaaaaaataaataaataaaataaaacttcattgagacactactatacaactgctagaatggctaaagttttaaaactgacagtatcaagtgctgataacagtacacagcaactgaaacactcactgaaacattgctgctgagaatgaaaaacttatataatcactttggaaagtagttcgcattttaaaaataaagtttaagatatatctgccattcaacccagcaattccactcctaggtattggtccaagagaaacaaaaatataagtccaattaaaaacctatgtccacatacttatagcaacttaattcttaataataaaaatgagaaacaacccagatgtccctcaactggcatatagataaatcatttttggtacatccatagaatagaatactactcagcagtaaaaaggaccagactactcacacatatagtaacctggatgaatctcatgtgaaaaaaggcagacacaacaggctaaatactctatgattccatttctacaatgttctggaaaactgtctctgttctattagactgtaatcttgatctgagtgtatagttctttgcaccaagattgcatcaaagtcaatgaattggaagcagaaatgcctatttttttttttaagatggaatcccgctctgttgcccagactggagtgcagtggcgtgatctcagctcactgtaacctccgcttcccaggttcaagcaattctctcaccttagcctcccaagtagctgggattacaggcacacaccaccatgcccggctaatttttttgtatttttagtagagacagggttttaccatgttggccaggctggtctcgaactcctgaccttaggtgatccacctgcctcggcctcccaaagtgctgggattacaagcgtgagccaccatacccagcctcagaaatgtcaaatttgatcagtttagagagtaagctttagctgtgaagggaatcaaagatccagattgggccaaaggtcaatacagggtattttggggtaaatcgaggtacacaggactatcaacatgagggcaaggagcagaagttgggcctgctggacctgctgaacagcatgaatatctacattaatggatcctactcaagtctactgactcatatagcctttagcctccagagaacatagcccttctttgatgaccactgattaaaactgattgcagttgcatccaaggttgtgatttacctgcttttgacaaatttgcagttttgctttgattgtttatttgcaatgtgcgttactaatcctccttagcaactcacaaggattggaagtgatagagactacactaacaggttgactccagagttgcatgagtttaatagtgcttctagttgctttctggccaatataagattccaaagcaaaggaccatcttaattgaaatatttttaatatggcagattttataatggtaaatttaactcagatataatctgtgccttgtgaatacaataaagcaacatatgatataaagaaaagagcctgtaagggtagaacttggcagacttggattctggtccctggactcaacctgttcaaccttaggccatttaacctctcactttcttcagaggtgccattcagctctagtattaattctatgattctgaaagcagttgatagtgtgactggaaggagaaatgaaagaagctttttcaattactagactttaaagcttctagttttgacttctaggcttcagtcctcagaatggtagacctgagctgtgtccagtgtttacattataacatatctattttggaaaagactggcacgtgtttatagatgggattggaaaagtacttaggttgttcttgcaaccagaggcccataatcgagtttttatatttttccttagaggtatatattgcaatgactcactgtaagaaacaatattattgctcatattaaatattctttaagtagcttttccacgtcttgaaagaattacgttttcttctaggaaggcagattttgtttttgacatggtggtactcttttttttcaagcgcataatctagttcttttcatgtcagtgaaacttagtagtacttaaaaatggattgaaatagtggtaactagttccacagagatgtttgcctacataaggcaaatctctaaagttaaatctttgatgcatatgtgcatttttcatttcgtattttcggttcctccacaccatttctttgtagtcaaattcattgtaatcccatcatgaaagtgttgatcttttagtaaccttttttgaagcattgtattaatccacattccctcacgataacacacggtttgtatcaaacatatcatgcagcttagctcaggccacatatggaactaataagtcaggcaataagtggctttgtgtgaatgaatacagtttggaagggtggggacatgtgtgtgtgttgtctaaactgcatttctcctgtgccaaaaccgaaatgacacaatgattcctgaatccccagaggctttcctggcctggaaaaattgtgtttaaaaaataaaaataaaattgagcactttgatattaaattaaacctctcagctcaataggaggatgcttactgggtgcaagaacacagcatttatttctcagcagtaaaatcatactacgttttaaatgtgatctccagagctgcaagtggtcttccctcatcaatggagcaacatttatcaagctgcatgaactagttaattccaactgcaagagctgtgacgtcatagttgatctgtcttatttgatgaaacacaaagtggatgtatagtgatttgagaagaaaccagcatgtggctttggaaaaacactatatttttatacaaaaagggggtataggagaggaaaacagagagaacatagacagttaatggaattgacatggccgtagttgtctgttgtggtctgaatgtacttgttgcttgggttttctttctttttgcttgttccggtaactataaagccagatcttcctgggtttttttagcataaggattatcttttgctaccagacaatacagtttgttaatttttccagggaaaccactgaacattgtttctccccacttcccatctaacttattatctaagtgtaattttcatcttggttgcctactagccatagagttgaacaaaatcttaattgcccccatggagtcctaaatcaatcaaagtaaagctgaaattcaaactaattgaaaccaaaattccacttaaagactgcttagactgttttggtggtggcggtgcagtaggaagttgttacaaaaggtgtttatttcagaggctaatttgaggcagttatacagacccaaagcaatattttatttgcctagttttcttggcatctgccttccccaatcaaaaatgagagcagaaggagccgtaatgtttagggaagtgtgggattgataatagttggtgagggcaggtgttgatggaacctgaagtaagatttcttagagacaagagtacttcagtcttttagcctgtccatagctgcctttgctgttgtttccctcgttcactctcttgcttaaaaccctggagtaggttcttactgctaaccagcaagataaagttgaactcttcagcttagcactcttagccctcagcagttataatgactaccctgtaaaagtcaggcctcaggaacttctattctctgtaaaattctaattgaactcttacaactatcttatgagataaatattgttggtcctgtttatagacaaggcatagattggttatgtaacttgctcaaagttatacacattatatggtgagaataggctgtgagtccaggcctctcattccaaagacagagagctgattcacattgcctagcttagtggacactcaataaatatttgctgaatgaatgaatagaacgtgtggagacttagtaaatgtagttctttctcccctttccctatccttgtcctttcctcctcgacctggttccttcttttcctttctatttttactaatatcttaccagggagttaacttgttgaagattattgaaatttttaaaagtttgcccaagcaaggaaggagtttgcgtgaccatacagcagagctgggtctttcaccaggtcccctgaccactcacatcatgtatcagtctttccatttcactatataattattttaaagatactgacatgtgtgtgtttattcctgcttctctggagtgcatgcagtcagaagcttaatgaaaattagcatttaaaaaagtgaacagtgtacttaagattttccctttgatttgaagtaactctttccttcttccttttctgccccccattcttagtagttaagtggtaagccattattgaacaccagctttatgcccagcctagtggtagatactgtgatgatgataatgtggagaatatatatatatctggtacatatatatatatatatatatgtattagtaatgataacaggtattttatattgagcacttatgatgtaccagatattattttggatagtctatatactttatcttatttaaactttacaacagctctgcaaggcaggcaacatccccattttacaagtaaggaaatggaatctcagagaagtgacttattcaaagtcaaacaactagtaagtgacagtactggtattcaaacccagctcttctgcatttaagcctatcctactgtgtcgtgatgcctctcatttcttcctatactgtattaatttaacttgttaattaacaagtatttatcaagtacctatccagttggttaaggctttccaaaaagaacaaatggaaaagtgcgtatggggaggagtttagggtcaagggtaaaatgcccacttacctgcagtaatcagagagcttccagtggaaaatggaacttctgttggttctttgagaatagataagacatgagatataggatgcctagagagagacatagagacaagaaagagagctttctgccagagtaatgagtactgtgtaaaaagctatcagaagagttgttagccagtattgaaaagctggttttttatatataaaatcccatatatatatatgagacttttatttgtttgtttgcttggagtcagagtctccattacccaggctggagtgcagtggcacaatctcggctgactgcaacctccacctcccaggttcaagtgattctcatgcctcagcctcccgagtagctgggaggcgcacaccaccacacctggctaatttttgcatttttagtagagatgaggtctcaccatgttggctaggctggtctcaaactcctcacctcaagcagtctacccgcctgaatatgtttgtttaagtcacttctctactaaaatgctactaataaggttaaataattttaaaattttaaattcacaaggatgaaaagaatagataagaccaagaaaatttagaaaacttcaaataaacgaatgagtgataaactgacttggcagaagcctttacgaagcaatataatccaaaccacagactccagaaggatgtggtggtaccgagtatctcatgaagtttagggataatatatagagctaaacataggagggtaggttgacagtctatagaaaaagaagtaatactcccagttcacttttcccactctgtgtagcccaataactacgttcccacatgccctagtgggaaaatgaaggtttacttgctgaaaaagattgagcccaagaagctctgaacgtaaactgcttgatatactgggaacaagaaggaaggtgccttaccaaaaggtgattacgtgaaagtgtaacataccaacacagagttccccaactgccttttccaactttattccccaaataagatccagattatgcctcaagacagaggattctttctgaggaaaaaacagaggcagcaatgaaaagtcctggggctgtagtactaacctttccccgtgggaaggctggatttccatccactcattctgcaatgaaccctccccccacagccagtcatcaagcactgccaatgcacagacttccttcacagctttttagagtctcacagtctcacctgtaaagataaactaacggccaaagattacgagacattagaggaaagcctctaatattaaaaaaaaaagtctaaaataaagtgaaaaaaaaaatccagagggtaaagtgaaaaaaaaaaatccagagggtaaaatgaagaaggaggaggaggcaaaataataataataggagaaaatgatcagaattaggcaataagagtattcatattgaaaggatgtactaagtgcttggcccagggaatgaaaacagactgaaaatgatgaatgaaagaccgaaatgaaggcttatcactatgaaatttcagaatactaaggttaaagaagaaagtcctaaaagcttccagagagaagaatcaacttacattcaaaggatcaggaaccagcatgttaacgggtttctcagtcaccacgtgaaaagctaaatgacagtaaagaaatactttggaactacctaagaaaaagtatttgcagccatgagttctatacctaggcaaactatcattcaagtataagaatggaatagttatattttcaaatattcagggtgtcatgaaagttacctcccatgctatcctttcccagaaagatattataggatacactccaccaagatgaggcagtagatcaagaaagaagacaatctaggaaataacagcttcagcacagaagaaaagtaaacaaaatttccagcatgatggctaaagaagcttgtaggaatataatgcagcaggcctagctagcagccagttcagttgaagcagagagaggaggcttcaggaaatatatctctaagagcaaaatggacttgatcaattttatggtgtgtttagttagattgagaagagttttaaggttttttattctatttcttttttcttttctttttttttttttgagacagggtctcactcttatcacgcaggctggagtgcagtggcacaatctcagctcactgcagcctcaacctcccaggctcaagcaatcctcccacctcagcctcctgagtagctgggaccataggcaagcaccaccatgcccggataattttttgtacttttggtagagacagtgtttcaccatgttgcccagactcgtctgaaactccacccgcctcagcttcccaaagtgctgggattatgggtgtgagccaccacacctggccagttttaagatttttgttagagtttggggagtatctagtgacaagtacatagaaaagctcaactggtggaaaaaatggcagttatcacttccagtgaaacaaacaaaaaagtacaagaaaggaataatacattacatggctcagcagtgaacagtgtttatgtaggtatagtgaggtaaacagtaaatattgatttaatttaaaatatgatattgaatgtattgagaagatgaggaagggaactatgtgtgggagagtagagtcaagttctcatattctttaagaaaaagctagtagataatgtatgggaaaggggataaagtgtttgtgtgagagcaaagtggtataagagtgctaaattctcttctttcatggtgggagcatagtagatgatgtctctaactggaggggaagggagaataagaaatcttaatataagcatattattcagaaatatgaggtaaagaagaaacagctaaaaggtgttctcagagtttggggtagatagtagagcagagaactgctttttttttcattataaatcttgtagtggtttagacttgttaaaccatacttatactttattaataataatatatgtgttatgtatgcatttatttttgagttccctatgtggaaaattaaaagggtaatatggtagaatttggagctgttattaagcggttctagccttggctttgtcccttatcatccctgtgactttgggcaggatgctcttgtcttcctgggccttagtttcttcatttataagaggaagaaggttggaaagatggtctccagggtctctttaagctgtaaaattcaaagattctatgatttaaaaaaaaaatagtactatgcagcaaatggagagttaagacccagacagaggcttgaaattcccacatttttcttttttttggttaaaatcagacttggagagaaattttcactgtggtctctgaaaacagttcaacacccatcttccgttgtggaacctggggcaggcaattgtctgtgtactcactcggagacacatagcttagtgttatttcagtaagtttttttttttccttgatgtttaatatttttcggtatgaatcacaggtaaaatttccatgccatgtgtaaacgatttcacttcttattgaaacaatgaattcaggaacgtcatgttgggatatcagccattttgcttttatcaatgtatggaaaaatgcatttatattaatacaagaaatgatgtcatttaatatggggtagatcttataattcaaggtctgcaaatctcaggaggtgatttaggtcaccaagctaggtttgaaaaaggaaaaaactattttccttctgctttctcaagtattgttaccagttttcgtctcagactttggggtaggtggtagagagtagcatggtttgtgaaaaggaggccctggctgataatatctttgccattgaaccatgcggccctggataatttacttcccctttctggggttcagttttcccatctgcaaaagaaaaggattggctgaaataatattcaagataccttttagttttaacattgtatgtttctacatccttactttatgtgtgtattcattcaaaccattcaggagacccagttatgtttggaggtttttcttaaaaagcccagaatcagtgagagtgaactctttctctaagtatcactcaagcagagaaaaatcagttgaattctagagtcaaacaaaagaaaactgactgtttttagtaggtgtttatttatgccccctgttgtcttactctgaaggcctgctttctattcacatgatttgtggttttattctttaagagagggatatatttaaaagtttgacttagccactcttaaatttaagtgctaaaagagttaaaccttaagaccgatgccccttcacatttgtacacagacatacattttataaagcctataaactttcttcatgtgtaatatgtcatttgaaaaacacatttttgcagagctgtgttgtccacttactgtgtgtttgatgtgtggatgagcatgtgtgagaatatgcacatccacttacttcggctctcctttatggtcagttacggaagcaaatggtgatactcagagacacagtgaaaggaagtgaagaacagaccgatgaaaaccattagcaacttatccagagtactcagaaggacacttaattttagaaaattggcctctaccagaaataaatcaaacaaagggcagatctagcccacaaaccagcagtttccctgtaccacctctccagctatgtgctctggtctggacaaagaggaacgttagagactcaagagaaatacagagcacagcctctgtcaaaagtgagttgcaatgtatttgtttaataagcattgaataagtaccagcactatgccagacactattggagtcagagatgaatacaagatggtccttacccttgtttatacaaaggggagggctgaatggaagctggcaatatctaaaaagaaacactggttttctggtatatgtccctggagttggtgttagcaaaccctaccagggtctgggggtagaaaagaaggctagatacaggggtctttgaaatatcctcattccacagttggtcactcttagtcttctctaagtttagggggcaagagaacagtaagtagatgaagaggctaccttaaataccatcgtaatttaagtgggtgtgcatactcatacacgtgcttatctatatgtcaaatacccagtaagtggaaagtactgtgaggctgataatagtatcaaacatttacatttcctcttttagagttcaaaaaaataacttgtttagtggttcatttttccgaagcttataatctgccaaaatatctttaattctattttttcaccttcacagctaagatatcaacatggactagggactccagacttgcggcaaacccttcccaacctgaaaaacttcatggagcatggactaatggtcaggtggtgagtacctttatctctgataaccagaaactgtaatgtggataggatcctgaaaatcttttctgacttccacattgctccacacctgcctctgagttttcttctgtaatgagatatgggaggaaaatgaaaggcgccatcacagttggggagatctaagctcccgtctggctaaggaggatgtagcccccttggagggaggaggggccaaggggatattgcttgaactttgggaaggtggctgagcaaggagcccttgagggcattgctgagacaaactggaagacagccagtatgattcatggtaagggagacccagagccccttggacctttccaaagaacaggtgaagggcctgattatagaatgagcatcaggaccatggctgtgagcattaaaggaagaaagcagataaggaataggtcagggggtcaggacttagtttgagaccagtaggtacattctgaaatgtttcttgtgtgtggtgtcagtacctgttgaaccgtgagggcaagctgctgctgaaagtgctccgtcaggatagacatggacctttgaaaagagaaggagagaggggaagtctgatagaaagaagacattagattcattcacttgacctaaatggaaagttgttggctgtatccatttagtaattcttgaagtttgaatccttgggtagtgggcagtaacttacaaaatcacgtgcctggaaagcaggcctgtagagttagacagctgggggcagcactggcttctgattccaggtatttttctcatcatctgctgtgtggatttgaaattctacctctctgaaatttgatttgctctgctgatgtgccttcagaaaagtaaaaaaactgtggttggtctttactttgattttcaaaacggcaagttccagatgtctggtcttagataggactcctgttaagcaaatacacaactgtttaaagaattccactcaaaacatcaaaataattattaaagcttggtgttgatatggacccggatgccttcaggaatatgagagaggaattaagttttaaagtaaagtaataagaataataaaagtgagctagcaggtatttatttagcttgtctctgtgtaaagctctgtgataggtgctttagagagatgagaaagctcaagccctgtccccaagagatttgtggtccagttggaaacaaggcacagaattcatgaagaggttttctaacacaatggtaaataacctaaaataatgagaaaattggcaacctacaacactaattaatcacactaaatgaatcttgctcagtacagatagcagattgtccctgaaccatttactgaagtgtctgtcttttctccactgatgataatggcatctcttttgtaaaccaagttcgcttatccatagagatccatttccaggatccctattctgttctgttgctttatttggctagccatcgattagtatgacatttttaattattgtaagatgtaatttctaaaagtgttgttgagatttgagaatgaaataaaaatcaaaatgtccattttactattgataaagctacttggaaaatggggctttagatctgaaataaaacgggcttgcaaagatgtcactcaaaattgaacttatcctcataatcacaatgtaaactggagagccataggctttccctacagaggcaggcccttaactacattggcagacagcgatcaggtgacttttcttcaggagcccagatagggctgagccaagaatacccagttgctattttgccctctagattcaccaatcaggaaagtccctcctcctctgagagagtgagaggatggagagagccaagagtgttaactcctaaagccatgttccttcataggaacagaaaaggaaaatacctccaattttcttgatatctgttagggaaaagctaacctccatatctgttagggaaatatctgttagggaaggctcttcttcaaaactcttggcttttcttgacttgagtctttgagtgatttcacagttttatgacattgggtcttcctaactatgaacatgttacatcgcttgcttttttaaaacatacctccatgaggtttataattttcttcataaaagtctatgcatcttttattagatatacttagtcctattagcttacagttttggttgctgttgtaaatttttttattataatagttaacattttctggctgatgtacaggaatagcactgatttttagtattttgagagtgtgttctggctaacattagttacaatagtttgtttcgattctcttggattttttgtgtatacaatcatatttttagtgaataatggtattgtttctatttttataacttcgttactttttcttgtcttactatgttttattacagaacaggagcagtgatagtgggtatccttgtcttctgacttcaaagagaatgcttctaatttttcaccattaagtattatatttattgtagattggggtagatatcctgcattagcagaaggaagaatttttctgttctcaggttactaagagttgttttttaatcatgaatatgtgtattttgaattttaccatgtttattctgaatctgttgaggtaacactacatttttctaatgttaaaccatctttgccccctggtcatgtgtattattttttcctacattattggattccttggctaatattttagaatgtctccatctgcaaactgaaatgagactggcctacagtttttctttcacataaaatccttgtctgattttggttagaattgagcaaacatgatgaggttataagagcttcataaaataaattgaggatctttaccttcttttctattctccagaacagttcatataagataggaggaagtatctctatcttaaaggtatggtagaacctagaaaaaaactactgttttttgtttgttgctggggagagtgtagatttttaactactgatttaatttctgtaatgcttacaggtctgtttctgtttcatttctccaattcctagttaactcactccagtctgatttttagttctatgagtatactgaaattccttttatctagcttggtgcctaccgaattctaaacatagacccaaactcaaaggtcacttttcatccttatcctgttcagtggcacctggccttgctggccattcctgccttcctgaaacactcttccttgttatcttccacaggactgccctctcctggctttctgcttctagcttctccatggccccatcttaggccctcttccctttttctctctgtactctcttctctttttttctttcctcctccgcctcctctctaccctcttcttaagtgttctcacccattcccatcattttgaaagctgttatgcttatgactcccaaagttttgtcttcagtgtaaacctctcctgcacactctggatagccaggggcctacttgactctgcccctgggagtattagaagcatctcagcctcaacacagctaaaaccctccttccaccagcataattcctgtcagctaatgggaccctgtctacccagttgctcaaaccagggaatcatccttgatccccttcttttctccactcacatcagagctaatcttattcatcagcaagccctgtcatcactatctgcaaaatacatatcaatctgttcacttcccatctctgctattgccactccagtccaagccaccaccttttcttacccaaacagctgcaccagtgcaatttgtctccttgtcttgtcctgcctctgtccactctccaaagtagccaggatgatctttctaaatgttggctagatcttaatcactcttcagcttcagtggcaagagtgaaatccaagttttcttccatagtctacttggcctctgcctcatctgataccactccctttccactctcacgtcctgtcgctgtactggcctctgtgtagtcatgtgaataagctctttcctgtctgagtggttgcactcactcttcctctgtgtagaatgtgctctgtctcttccttctttcctaccaccttcctcacctcatcgcctcatagagagggaatagtttaagaaaagccgctttatgaacacagcagctttattggcaatgaataggcaccttggctggaatgcaaattcattttaagaatggggagaatctgggctttgtggttccttggcaatcctttttaagaaaaagaatacaaaattacaaatacaaaattagagatgaaaaagcatttggaatgagaaacaaatcacaacaaattactggaaccttagggattaggtccttttcttctgagatgtctgtagacaatttactcaaattatttacatataaatgcttcctcattgcaacctgactgcccttctactcctaaaacactgtaatttccagcaactctcagttctaaggtacggagaaattaattgactttccaggcataattgacccatgaacctgtagcaataaaagtagaatctaggtgtcctggcactgttgcagcaaacccattaagctccaagctcatacatttataaatgtagtgcccctctgtgccagctgtgccaagcatattaacactgagtgaacaggaatgtgtcactttatggtactgtaacgtaaaataggctactaaagtagatgcaaagcactgcaaaatgaatgctacatatcagttccaagtaaagatcacggcaggaagccaggctggaagtcacaaagctaaacaaagccggagcaagcactttgagtctcagaggaaatctgagaatttccgagagcagccgtggagtgaggagttacctctcaagcctgtgctccttagggcaaagggtaaaaaaactcaggttcctaagggaggctcttacatcttttgtaaagcaaaacacttccattttctgtgtggttgttaccattcacagattggtccctgtggaggcagattgctgtatgttcttttggtgttgaggatttcatactggctgaggatcagtgcattcactgaattcctccttatggtaagcttcaaagttatgtgacagcttgttttgttttattttgtaaagaaaagctgtgataaaaatcctcttaataaagtaattctttttcttgcacagtatggaattcttagctaatatgagaatgatcgacctgattaatcctaaaatgaacccccattttttatgaacacagttgcacagggcacagctctcagtgatttatgccaggtctttccaaaaggagtgcccattttttcatcctaagattataacctagtcgtaactgccaagcaacacaattttgaaaagcagaatttcagcttagaatctgtgctcttttgaatactgtgattgaaagtcaccagaatgtcatttaaacatcctagttttcttttactattgcctgcatagtgatctgagactcagattgacatgcacaggcaccactgatgtgggtgctgaagaatgtgcacctaagctgcagcctaatggctgcctgtaagacaacaagtttagaactgagttgaagagattatgtgcgaggttgctgtgagtgggctgtgtgatggggccccagcatccaggtcctcaggcagtgcctcgattttgtctctccaccactctcccaccctttctcaacagacccccaggcatagcactctcatttgtgacctccgttctttacttaggcaagttcccactacccagaatagcctgccccttcctctgccctatccagatgttgctctcacttcaagacccagctcatatcctatctcattcattcactcactcaacaccacagtggcagctacagagataagtgtgtattccctcagtagcttagagtcacttctttgccgagtcttacccactaggcttttgagcagcttgggtctggggaccacgtcttactcatctctgtggtcccagcctggcattacagaagccagggaggctagagaagggaatgaagaagccatctgagctgttctactcatggaatatgctccttgagcttgtgttcaaggagcttacagtctaattaaggtggtgaaataggaacaaaacaacatgtactgaaaaaagtaaaaagtacgacatgctataagggagagttattttgaacattcagaggaagccctttagttcccggtgtgaggggtgtagacaaaccttcactaaggagataacatttcagtggagagtggatctggagcaaaagaagaatttggccacatgaggtttggggtataggacagagtaggttaagaaacagtggcccagttaggtggaaagactaggactatgaatttgaataccagcaccactatttactgtctctgtgacctcaaacaggtttaagctgcctgcctcaatccctttccctataaaatgagggtaatagtgcgtacttaatagtgtggtcagaagaattaaataggtaagtacctagcatactgcctggcacttagtaataaataagcggtagcttttataatgagtaaatgaatcgtagttactgtctatatctttttaaaatcaaatgcatcctttgctgtaggtgtttttactttgacatctatagtcatcttacagctaggtatagaatatggctcttgttcatattttggctcatgctctcttgtacattaatggtacggaagatttaccatctgtctacctctcactttccccaagtcctttataagaccactctgaggccttagagataagtaccctaaaacctgtttgcctacaaactttttttggtacctgccttcttaggtaactctcacccatagttagaagttacgaataataaaatctcttacttgcaaaactttctatgtttttacttaagcttgcaagaaccttgtgagagtagctgggcaagaagaatgaccactgttttacaaaccaaaaaactgagactcagtgtgccaagcgccttgccaagatcacgtgatactaaatgatggaactgggaccagaaacccagattatctgactcctgatcccatattctttttaccatatcacagtgcccattattgggtaatggccattctcttccttctctgcccttcccctgccctcctgtctctgtgccacctctattctagtgcctcctaccttcctcagggaaacccaccagagtcaaatccagagcgctggaaagatacactgcgaaatcaggcagcaggcctggtggaaacattcctggttgtttattctacctcatttacctccaagagggaggaaactaaaagtaataaaactttgggaagaatttaagaactttaagactgaaagaaacaaaaatgatcacgtttcaacttcattggttaagaaacaggaacactgaagaaggaagcacgtgggtcgggtgagtagcctaaagcatatttgcccgtagtgtttgtggaatgcttcctggaatggcatgctctttttttctgaataagaaaaaggaagaataagaataagatgaaagcaagatttcaaagccatctgtcctgtttttttcataggatttttttattctaagtttaatttttcctgattatagagcttaaactatgtaacatcttcatgcaaggtagtataacacagaggaaggagcactagatttgggaatcagaaaatatgggttccagtttcaacgctatcacttaattttcataagttgtttttgagtatcagttgttttgttttgttttgttttgttgagatggagtctcgctctgtcactcaggctggagtgcagtggctcgatctcagctcattgcaacccccacctcccaggttcaagcagttctcttgcctcagcctccccagtagctgggattataggcacgcaccaccacgcccagctaatttttgtatttttagtagagacagggtttcaccatgttggccaggctggtctcgaactcctgacctcgtgatccacccgcctcggcctcccaaagtgctgggattacaggcatgagccaccacgcccagctgagtatcagttctttaaatggagttaataccaccagttattgggaaactatttcccaagcatagtttttgtaggccaaatgagataatgttcatcaaagtggtttataaactaaaatgaactgtgcaaagtattattaagtattgtttttgattattattaagtattaaagaatttgacaattcattaagtgtctattctgcgtatagcattgttcaggagacaaagaaagattcaaaagtgtaagattttccctgccattgcttagttgacagtcgtttagtttataatctaaattattagataagacaaatattttgaaggacatgacttgcaggaatattcctatacattgttcactctcgctgtcatgtgggacttacaacctgaggcccatcattagtgtgtagtctgctacaatgatggagggcaacgttgggccaacttattttgttttagggccaagcaagccatttttaaagagacagaatcaatctcagtgaccttagtaaggatagagcactgagaagtatccttggctgttcaacagcaagctagaatatttctccagagtactttagtgtttaacaaacaccggtgtttaatgttgggagaagtaactagtggctttatgtgaggccatcccattttagtggtaaaatctccagatagtccttctgctgacctatttctaatgtagtcttccattccttttggaaaatagaatcaagctatagctttaaataaaagtattagaagaagaaaatacctaagaactttgacacattttaggaaaatgttttttcagtaaactgagaataatgaaaatttagaataagtgagccaatctactttccttaaaattgagtaatgatatggtagttctgcttttacaccaaaccacttaactcttgaaaatgaggcagtatccagtatttaaatctttacaaagcctcactttttagaaacagatctactctcttcctttctgtccatcatccttatgctgaattcagaactgaaatctggcagatgaccctctagggaaatgaaaaacatgttgtctagctgacgttggtttttaaatttagatcaaataacattgtctttgaagtctcaagagtcctacttaaggtagctgtatcagataggctcgcctttgagagcatttcttgcaggccggcacccctaatatgaaaagttaagcctagtcaaaaataagtgaaaaagaaagttttattggagttattttctctaagatagctgtttcagaagaaccttgacgagtcatctccttgtctctagacaggaacacacaaggcatatgggtatctgtagtattttaaaagaccttaggggaccaggcttcttccataactcattccagagtttaaacaccctcacttcaggaaattcttccctatatttaactaacaggccccctcctgcggttaacacccatttccacttttttctgcctccagtcaggatggagaacagctggccaacatcctttgtgcactaaccctccactggtgacagaaaggcacttgggtatcccggcgccgcctctcccctactccagcaaccaagtctctgaaccaaattgagagctcttttcccattgtttttacttgggtcttctttatttctatttactccttttgattataaaatagtatgggctcaatgaataaaatttggaagttgtaaaaatatgcagaagggaaacaatagccccataattcaggcacaaaaaaatcactattgtattagccagttttccttgtatttcttttctaattcagatcttaccatctgtaccaacacttttcaatagaaatataatatgagccatacatataaatttaaatattctggcagtcacttttttttttttttttttagacagagtctcgctctgtcacccaggctggagtgcagtggtgcgatctcagctcactgcaagctccgcctcccgggttcacgccattcccctgcctcagcctcccgggcagctgggaccacaggcgcatgccacctcacccggctaattttttagtagagacggggtttcaccatgttagccaggatggtctcgatctcctgacctcgtgatccacctgcctcggcctcccaaagtgctgggattacaggcgtgagccaccatgcccggcctggcagtcacatttttaaaaagctaaaaataaacaggtaagctaattttaataatatattttatttaattcaaataaaatccaagttatatatccaaaatatcttgtagacatgtaataaacattttaaagattattaataaatattttacattctcttttttcatactaagccttctaaatccagtttactcttgtagcacatctcaagtcagactaaccacatttcaagttccagcaaccagttcctagtggtcatggtggacagcacagtccttacagcttttttgtataacgtaatgtcttaagtattttatcagtgccctttaaaactttttagcatcatttttaatggctacgtagtatttcatcatttagatttactataacaatatattgaggtagttgtgtttttctcaacacattgccaaaaaacatcacctaaatgtttccttttgcacacaactaattaaattcatttatacataaaacaagtatattcactgaatatctgtgtgctctgtactaagttatattggaaagcggaagagggggtttccagaaataaagactagatccctcccatatgctgtttacaagacttggctccacagttggactgcacacaaataccgtattttattctgccttaaatgcccttcccttcatttcttgctctacctcacccccaacacacacgtacactgcctggttagcttccacttatccttcaaggtgccaatcaaatacaacctcctctgatgagtcttcccactgattacttgattcccttcttcactgtaatatacaaagtgtgtattgtattcagagcaccatggtgttctggttattggttaactctctgtcttctctactagagtgggaactccttaatgataggaatcttattttatacatctctttatttccagagcctcaaaaactgtcaggcaatgaaatgtggatttcggtaatgtctgaaagatgtgttgaaaatgcaagtgatcacattaagcatcagttggatggtaacataagtactaccttcagagttcaaagagatcacttagattggcatggttaaagaagacagaatgaaggagttaaagaaatgagttaaagaatgaatgagggccgggcacggtggctcacgcctgtaatcccagcactttgggaggccgaggtgggtggatcacctgaggtcaggagttcgagaccagctgaccaacatggtgaaaacccgtctctattaatacagaaagttagccgggtgtggtggtacacgcctgtaatccaagctacttgaatcgcttgaacccaggaggtggaggttgcagtgagccaagactgtgccattgcactccagcctgggcaacaagaacaaaactccgtctcaaaaaaaaaaaaaaaaatgaatgaatgaatgaatcaatgaggcctggcgtggtagctcacacctgtaatcccagcactttaggaggccaaggtgggcggatcacttgaggtcaggagttcaagaccagcctgaccaacatggtgaaaccccatctgtactaaaaatacaaaaattagccggacgtggtagtgtatgcctgtaatcccagctacttgggaggctgaggcacaagaatcacttgaacatgggaggcagaggttgcagtgagccaagattgcaccactgcactcaagcctgggcaaaaagagcgagaccccatctcaaaaaaaaaaaggacttgaattgggttttagaagatgggcatacttaaatgaattggagagggaattagtacaaaagccactgagataggcacactaaaaaagcagtgcttttcagtaggcattcattagcactggggtccccaaccctcggccatgtaccagtagcagtccatgtcctgttaggaaccaggcctcacagcaggaggtgagtagaggatgagcgagtgttacccctgagctccgcctcctgtcagatcagcagcagcattagatcctcataggagtgcaaaccctactgtgaactactcacgcgggggatctaggttgtgtgctccttgtgagaagctaatgcctgatgatctgagatggaatcgtttcatcctgaaaccagcccccctgcccacggcccatggaaaaattgtcttccatgaaaccggtccctgctgccaaaaaggttgggggccactgctttagcatatgttgataagtgtcagtaaataagtatccttctggatcgaatgcactgtcctaagtttcaagaaggcttagcaatatggtctttgcccatcaaaagctggtaagtgtcagcagcattagaaatgagcactggctgtttcagtatgaccttgggtgccaggcatgggaggtattttttgtttgtttgtttgtttgttttgagacagtgtctcgctctgttgctcaggctgaagtgcagtggcgccatcatagctcactgcaacctcgaactcctgggctcaagtgattccccccacctctgcctcccaaagtgctgggactgcaggcatgagccaccccgcccagctgtgacctttgggtttaagctcgatttagatataattccctgtgttttgttttgttttattttgttttagcctctggatccatctgaggaaatgccttgtgttttaattttaaagagtttaaatatcattttatatgatgtttattctataattcttctcttaatggatagcaatctataataatagttaatatcattgtagctaatatcaagtgactattactgcaaaccaggcactcttccaaagcactttgaacatagtattcagttaactcatttactcctcacacagccctgtgaattaggacctactaacctctcccatcttagaaatgaggaaactgaggaactgaggggttacataacttaatgtgacacagccatcaagtggaagagctaagatttgagcccaggcagagcagttttagaagtcctgctttaaccattacatggacaacctctcctataactatgttaagaataaagtgttttacacaagggatcatttagcatctggtgattccagaaaaggaatcttgttattacagccttctcctggttttcttcattcctctctgaatgctccttcttatctcattcggagggtcctcttcctctacctcatcacgaaaagctggagctcctaaaggcttagtcctaggcccttttttctctcactttattctaagtggagataagttctgatatcagaaattgcctcctgtacattttcacagcacattctaagtgcccatgcgtttttctaccagtcttccatcccagtcacgataagctctttgctttctgcgaatgaaaccacttttcactcttttacactagccaggaagccaggcaaaaacctttgttcctccttttcttcctcacccttatatccaactctggcaattcctgccaatttctcctgctatttctgtttgtctatgtctgtacatttccattctgatccatgcctccattacctttcacctgtactactgcacagcctgcagtctcccaccatccactctggacccctccattctgctctcccaactgcagccagagtgcactttccaaagtataaatgtctctctctctctctctctctgcacctctgacacacacactcactcactctcacactctctctcgctctctctctctctcgctttctctctctctcttctttgcctgaaagttctaaacatggcttgtggcttctgcatggtccagactttgttttcctcctcagttttatcttctaccatagaactcttcactcattgaccttttgggtcctcaaacattgttatctttcttgataaaaggtcttagcaaatgctgttcctgctacctggaagatactcttccccaccaacccattctttacctggtgaagaactctactagcccttctaatcttgtccttttctgtctgggtcagatctctgctacaagctctttgagcccgtgtcctctcctgcatagcttgggtcagaggtggttgtttgacattgatgtatgtgatgtatgtgtacttgtctgtcctctctcactagacaataaattccattaaaacatgaaccatggcttttttccaattattatagccccagagtctagcgcagctagatactcaatacatatttgaataagggggtaaatcaattaatttgttttatactctgcctcctttaggagtataggggactacaaaagataaggttaccaagatgtcatctctagagtcccagtctcttactaaacagtaattaaattgcggcaaattgcaactcaaacacttctgcccaaggcctccagcatctctgaaaatggtggcagagctatccatttttcttttaaagtaacaaacaactaaaccctcacagtttggttcagtgagagtttattagagagctgatggtaggtcagtgttagtagtatctttcaaagacttcatctcacagattctgtcactggccctgggagtctaatgcatcctttagctcccttccaagtctagtttttaaactctgaaagcattctctgaccagggttttaatttccctatcgagttccttctgggggctgggttctgtgagattgttgttcctctggtttccctggcaaaggcagaggttttgggtttttttgtttttttttttcattttttccctggttttcagcataaacagtttattattcccaagtatcaagtgttgtccagatactccgaggggtccccaggtatcattcctggcatctctttcctgttctttccatgttctcgtgtaggatgttacttaagccctatataaatgacatcaagatgggctatgtctgtttctacagaccattttacagtcctcataatgttggttgcctgactgtgattttactacattaatttgtatgatgatttcttaaagtgaaagctgatgagtgaagtggttgacttgacccctcccaggacctctctttatctccgtggaggatcactgtgtattccctgatcccatggagctcagcctggagcctgagctggcctccagatgggctctcggcaataggcaccccctcatcctctgtccactggcccaagctgggccatggaggcctgatggccaagacctcacatcacaaagcctggtgaactggatttcttcagcttgcttattttgtcttttgcctgtggaactttctctttcaccaattcatctttccatcactacttggtttaaataaaatccaaaggctgccttgttcagttatacctttttatactctgtttttatttagacagactttggtaggaaaccttccaagcaaagccccgggggaaaagtgaccattggcacagatttcagcctgtgcttttggcccaatattgtttctatttttattttgtttcatgtttttgttaacatccagggcaaagattaagtacttacacttatctggtaatggtgagaggcctttggattgcttgcctgtggcctggagaatgcatgcttaaaactattaacccccagctacctcctgggagataagatctagctgttaaatttggctttccctaaaggaggttctgagctcctacttgatctgagagagggaaagaagaaggataaatcccaacctttgctgaattttgaaaaaaggatagtagcttaatttatgaaggttgtttttttgaaaaaactaactttatgtcataatttcttagctgccaaaagacgtaattctacctcagctttgccttggcaacccgcttttggcactctgtgcaagcctgtcgttgctctgcattatttaagcagtaatctttaagaaggtgagaaactattattgctttttaacacagttgacatgatattggcgcagactagtacctagagcttcaaacatttctggtggccgtaaaccaacttaaacacctccatgtagaggtctcactgccatgaggtcatagattgctacaaggagggagaaagaagaagatcaaatgttgtttaaaagtctttttttttctttttaaatattcttattccactgagttgtagctgtagattttggccgggagccagacaatcaagatttagtattttgaccagctgtgatctagtaatgtccctcagaggaaacattttgtagggagggaaagacacatatttgagactgtgaattgtactctgtcctcatactttacagtgtgggacctggttgtagacagataaaacaagtacaagtgaatctgaaagagaattaggaaaaaaaaaagtgtttcaaattgttaaagcctcaccccagcttcaagaactctcttgatgtggtaaatctttacatgctttctttatttcatttttcctgtaagtttccacatttacatcagttcgtggcagaatttatttctgctcatagctgatgcttagaatgcctaacagtataagtcttagaaagtcaaaagagcaacacaaacttaatgtaggcaggaagagaagagaaggaaaatataccaatccacttaacctaaaaatttttctcattctcaccccatcctcaagtagaagtagagatcaaatgtagatgttttggtgacaacaaaaaacttaagatcctagggactgggagagagaaggaaattaacaattaggtagaccggcttggttaaatcacatctttctacctagtggcttcatgacctttggtcaagttacctaacctctgtgcttcagtttcttcatctgtaaaatgaggatgatgtttgtaatacttcacagagatgtcataaggattaaatgagaccatgtataaagctgttaacagagtgcttaatccatagcgctttataaattttagttgccgttttattattattaataatttattgggtacttattcattgtactaggaattttacttgtatatctcatttaatccttactgcagtaactattggtagctataaccatttcacagaagaggacacctaggttgggagcagtgaggtgcatcatcagtgtctcgtgtttcctaacgatggagctacatgtggagctctggaatattacctatgggagatgtggaaatgggaatcacattttggactggtgctttcttaacttgttttctctttcccaatctcttttctgtaaaaggaggctacagcttcaggcagtaaaaccaagaggaagaggagggaaatgatgggggcaaggatggtggagtagaggaaactgggctctaccagttcctgggttggcttcatggcaaggtatttgcatggcaaggtatttatataatggttataaaagtgctgaatatggtcttcttcattttagtcagagaaatagagaatttctccctcttaaaaaattctctcttcctgaagctaaattcatgcagaacaaggatgcatcaggggtttggggacaattggaatgtacctcaaaggattctgggaagttcttctagtccctaagcagtaggtagatcatgaaaacagaggaattttgagcattttgactttattcaaagctttccccacctcatgtccccaagaaaaaaagaaaaaaacctaagattgtgtttcacattgaacagattaaatctgttgattgatttgggtctttttctccaaatctcttttatacttttttttttctttttttcttttctttttttttttttgagacggagtctcactctgttgcccaggctggagtgcagtactgcaatctcggttcacgcaacctccacctcctgggttcaagagattctcctgctctcctgcctcagcctcccgtgcagctgggattacaggtgcccaccactacaccgggctaatttttgtatttttagtagagatggggttttgccatgttggccaggctgatctcgaactcctgacctcaggtgatccacccaccttggcctcccaaagtgctgggattacaggcatgagccaccacacctggccttttttttttttttttttggtgggcgggggagtcttactttcatccaagctggaatgcagtagcatgatcatagctcactgcaagctcaacctcctgggctccagtgatcctcccacctcagcctccctaagtgctgggactacagacataagccaccacgcctggcactgtacttctttatttccttcttgcagctagctccctgatgtacagaagtggaggtgtgggaaggtaggtggtaggagtttcgtttgttcctgcttgaaacagtatgctgtataagagaaacagtaaagggaaggagatttagattccagtccttcttctacctattaccctgtgttcctgtgcaagacatgaatatgtctgagtctcagttgcgccttctgtaaaatgagaataatacttggaatttgaagcctactgaaacgaatcataatgacaaccaccacaattacaactactactgacgctagtgtctatgccaggcatcctgccaacgattttaagcacattattttatttattacttactgtagtcgatctattttataaatagtcattaaatatgcccacagtcatataactcaggggtgcccaacccccgggccacagacttttacccgtctgtggcctgttaagaaccgggccgcacagcaggaggcgatggagggtgagcgagcattaccccctgagctccgcctcccatcagatcagccatggtattagactctcataggagcacgaatcctgttgtgaattgtacatttgagggatctaggttgtgtgctccttatgagaatctaactaacgcctgatgatctgaggtggaggtttcatatccccacccccaaatccataggaaaattgtcttccacaaaacgggtacctggtgccaaaaagattgaggagcactgatataactaataaacgaatgtaaccttaagttgtaactccatataggtgggatcatagtggcagagctaagagtagaatccaggtctttgaacagtccttcttgtcgccactgtctctagagctgaagagataagaaaagatagttgattgcaataaataaggactcacagaatgagaaacaaattaatcatcttaatttagagagctcagagaaaacttgatccaaggaagccaaactgacttcctccttgacatctaaactccaggccagttggcttctccctcatcgtgccattgtttgtgaccccaggaaatacttttttacttatggcaaaaggttaacagtccctggtgtggttcagttattcaacaagctacactgtgtttcactaaaccatagcctagtaaatttgcaattatgatatctttgggttgttgttttttaataaattccttttaattgcagcattaaaccacagatgtcatgtttccagtttggagctaagcccagctggaagagacagccacttacgggaaatggctggtgaggagaatgtgtgcagtgaactggtagactcggtccagttgcttgaacctcaggctctgcacccgcaattctagtgcctccgaacacacggggccccttggtgggagcagagaataaagaaaagctactgtgtttcctaatatgtccactcctcccaaaacacacacatttttgcttttggttgtctaagggttgaggctccctgtaagtttttcatcacaatataaataatgtactaattgcatatgatgagtaaattgtcaacagcctttaaaaattggtcatataattagtaaatctatgagtttcaacctcttcatctagatgaaatagtcatgaagccagactgtaatcaaagaatcttgaaacctcctgaatattctgttttgaactattatttgccttttcaattcctccctttctctctttaggcaagagtagagataaaaatactcttttatttctttaccttatactaaaatatgaatgaagggtctttctgaaaaccttccattaaatataaaatcaaaattattttattaaaaatctatgcattatgtttttatacgagatgctcacagcagtttgttttttaatagcaaaggttcagaaacatcctaaatctacaaaagtaagggaataattaagtaaattatgatagtccattcagtgaagcaaccatttagaattctgcttaccaggaggttttaatagcatccaacagcaggatgtagcattctgtatataccagaaacacagctttagtgtttctttcttgtttcctttttttttttttttttgagacagggtcttgctctgtcgtccaggctaaagtgcagtggtatgatcacagctcactgcaacccaggctcacgcaatcctcccacctcagcccacagttgctgggactacaagcgctcaccaccatacccagctaattttttaattttttatagagacagggtctccctatgtggcccaggctggtcccaaactcctgggttcaagcagtcctcccaccttggcctcccaaagtgctgggatcacaggtgttagccgccacacctggcccatagggtttctttaaaaattaaacacatatatttaaaatcaaagtctgaaaggaaaatacccaaaattaatagcagttatttgatgggtaatagacttgtgagtttttatttttttatatagttaacatagttttagttttcctgtaaaactattgtaataattaaaaatacatgtgtgtttaatgttatcatttgatacttcaactgtttggagcttggctatcttaaaaatctggaatgtagctgggatcctggaagtaataaaaaaatcaattctgaacagctaaaactaatgttaccaaactcatataataaatacagcatattgtgcccaggacagctcctggcccgccacgcaaatcctgtttactcatactttgcacacaattttcaggacatctgctttacaagaacacagcaaactaagaaagggtatagtggccactgcgggcaggggcactgattcaaccacccacagcgccagaggggactcgaagaacccacgccaggcttacctccagacctgcgtcctacagaacagacaccactgaacatcctgtagtccccttattgtgtcatcgctcagtaatgttcatatcagtggcccagaggcaacgagaaaatgccttttcttgttcaacttttttaagatggtaagaaaagctgtaataaaaatttttgaaaggttaaatctcatagaactaaaaatggagggaaaaaatgtggtgataaaaaggtaaaccttagatatgtagacttctttattatctctccaaaaataactaatttccttaccattcttaagagagaccattttggctgggacctgtggctcacacctgtaatcccaatattttgggaggccaaggcaagaggatcacttgagcccaggagtttgagaccagtgtgtgcaagatgatgagatcctgtctctaaaaaaaaattaaaaataaaaaacattagccgggcatcgtggcacacacctgtagtcccagctacttgggagactgaggtgggaggatcccttaaggccaggagttgaggctgcagtgagctgtgatcacaccagtgtactctagcctgagcaacagagtgagactttgtctctaaaaaaatttttttttaaattaaaaaataaaaagagagagaaccttttactggtacttggattttccagtttgaatctgatactaccattacttgagttttcatacaaatccaagggaactggagaagaatgtcacaaaatcaggatgtcagaaaataccaaagttcccacctctcaaagccttggagtccatccatgaaaagaggaataacattaccatcttagagtttgtgggcaaatgagaaggcatttagcttgatgtgtactatgtctttggcacttagcaaatgttacttgaatttgaatgtcgtgttcccttgtgggacacaatagataggatgggctctggagtcagacagaatctagttcagatgtggttcttcagccttgaacaaaccacatgacccaccacctgcctatcttcctcacaggacactcgagggctctgtgtgggcagctcatcttccacggggctcagaacattattgacagtcgggaaaatggtcgttcccttcacattgtagttggcaaggtggggcagtgggggttgtcgcgcctcattagttttctgttgtacaaagttgagaacttttagagttctcaaactcaacgagggctacaaacaccctgttcctcttgtgcggcaagcactgctgggtgtgccccaggcctgtttctcatgccctgccttttatcagcccactgggagccccacaaaacagcagagcaggatttctggggtgggaggatggcagcgcagggtcacagcatgaggggttaagcacctggctctagccacacaccaacaagtcaccttcagtgttccgggctgtttcacctggtgcttccacccctcgtgggctgggctggcaaatgaaagcttggcttttctgcacagaatagactgtctgaggtggtgctgatgttctcttttggtttgagtacctagtcaacctgcaagatgatttagagagggacactgttagcaaatggtagagtaaaaacaaggcttgcaaaaatgtgtagcttacccaattattgtgaatttgggcaacatattaactataaacctagatcgaggccagcagattttgccctgttttgttttgtttttctggagaactaaacactgtaatttactagtctacttgcctagttctatatgtaccccagtgaccacgcctaattatgaaatctctcctggcaccagtactcacagccaggcagaggagtctgacagacccaaggattagaagccgtgtggttgccccttcccaagaataacccttgcttgggtgtctgagactgcaagtataatcctgcatcagaggagagagagcagggagctggggccagggcttgtggctgtagacacaagtggaagaaaccccagatctcttttcttttctagggcacttcttgctattgtaatttgaaaatgtattatttgaataatgagggatgtctttctcctgcaggactggtagctccttggaggaagggcctactggtcttgcatctgtctccctaccccaaggccaggcacatatgggaactatttgttgggtgtgtgtagtttcaagttctgcctctacccctgcctagtggttgcccttctgcaagccacttaaccctctatgcgtgtttcctcatctgaagcacgcaagtcaaatgatctgtgtgtgcctccctctgcctctggacccaatctgttcatatggttgtattgaagctaatttcatccacatacaagaatgtctagagctagcatagtgtataacatagccatcatttccaggatgtagatactctatttccattaactgattattatttattatttcagactttaccctgctttctctatagggtttttgtaaagactaagtgaaatgatgtataggaaattacttcagaaattataaagtttgtataactgaacaatgattgttattgctggcccaaagataccctcctgagaagaaactcagacccaaaagacagcattgcagaccaagtattgtaaaacatatgtgtggctagccccatcaaagaatgtatttcccaagttagtttttcattttaaaaaaaaaaaaggaacccctcaaaaattttttttaatttttaaaatataaccttgactctctctctctccctccctccctccctccctccccctctccccctccctccctccctccctccctctctctctctctctctctctctctctctctctctccctccctcctctgccagtcctctaatgcaaggtggttagcatttgggtgttggcaaggttgttggtcatgaaatccttctcactgcctcactgagcatgggcaagtcatgtaaattctctgccagatgaggatgcctgcttttcaaagctaaaataagaattgaattgaatactaaaacaagaatgagattatggatagcccttcagaaatatgaagttagttatatccttcacatgtttttcttgctagatccagcctgtccagttacttcacctcttccccataggacagggtttctgttccctgccctgccttgggccctcttctctaaatatattgcagtgtgtctgtatcctgctggaaggaagctcccaaagttggacccacatacctcatgttgttttttgcattgagacactgcaataactattgtctaagattgattcttatctatttttattagctcagacctaagtatgctgttccctgtctctggatccagaaggcttacactgagttctgaagtccaaagtaacttcttgtttttgtttctcttctagtgacagacatcacacctccagtgcaatccctgttcctaagagacaaagctccatatttgggggtgcagatgtaggcttctctggggggatcccttcaccagacaaaggacatcgaaaacgggccagctctgagaatgagagacttcagtacaaaacccctcctcccagttacaactcagcattagcccagcctgtgaccaccgtcccctccatgggagagaccgagagaaagataacatctctatcctcctccttggatacctccttggacttctccaaagaaaacaagaaaaaaggagaggatctagttggcagcttaaacggaggccacgcgaatgtgcaccctagccaagaacaaggagaagccctctccgggcaccgggccacagtcaatggcactctcctacccagcgagcaggccgggtccgccagtgtccagcttccaggcgagttccacccagtctcagaagctgagctctgctgtactgtggagcaagcagaagaaatcatcgggctggaagccacaggtttcgcctcaggtgatcagctagaagcatttaactgcatcccagtggacagtgctgtggcagtagagtgtgacgaacaagttctgggagaatttgaagagttctcccgaaggatctatgcactgaatgaaaacgtatccagcttccgccggccgcgcaggagttccgataagtgaagtgagcaggtcaacagtaggactggggcagaagctctgcctaaaatgaagtgaaagctgcacttaaccctttgtgataatgatgacacaaaatgaatattaatggaggatattcctcggaaaaacagactttgggaatgaaggagggactcaggatcattgttatcagtgggccaaagttagattttgctttcaagatttgcttttcgggcctgatgattttaaagcaaaaatcaccctctagttgaaagagcttacagctcgagtcaccttttagctatttgtctgctttttatttacccttgtatgttatcctcagagggaagatgataatatataaataatataatgaacacacccttagtttctcataagcatttgccctcaccatggtttataaaactttgggaaaacggaatattcagaaataggtttccgccatgtactgaaaggtctgtggccatctgtgaggtagatgaagaagcagcatagtggtctccttacatctaggcctaactgtccctcttcctgcccccgggtaccacagtccacctttagaccctactgtcgccccatcttctccgtggatgggccatgcgtcctgaaaacaggacatcagattcactggttctgtaacccagtagctgtgacgttccatctcttctaaccagccatggccttcccctcctctgccatacccttaatgcggccctcagattagatgaaaaacttgctcctggtggatcccaagggaccctcaaggacctcgaggttactgcagtcagatgccatctcatcccctgtgggggccaaagtttttatgtgggcagatgctgtggtcaggaactaggcatgctttctggcaatgcactcaccagacaaaaatcccttgatgtaaatcccatgttaatttattaaatttcagtcagaaggtcagcatttacatgacagaatgtatgtagagagttggggtgtctggtaggcaaactgcaaggcagttgagatagttggattaagaggctagacgagacatagaatactattggtatgtgtgcaatttcatgaatattaaattatgtttcgaagtccagttgtcattcccgcattcagatttcatttgctgttgctttatacgttacgtacccaaggacattgcctcagggttgcaaactctttaaaggaaaatttatccatatatccatgtattatatagaagaataaaaattgagtttacttcacccgacctgatttttttttaccagcttggaaattcctcttgaacctacgtctccatatgtcacatcatgacaggactagcctgaacaaaagccatgtctatctaagcggaggctgttgacttcattcagtttgcatattgtatatagcaacacaaacacttgacaggtatatactccagtcgccacatttgtcctgcataacagcttcactcacaggcctcaccgtcactttattttgtgtccaagcattcctgggctcaagtttaatgtatagctacattgttgttttccatgtagagaactcacaggatgactacatcacaaataaacccaactctcaggcagtcgaaagctttaactggatctgcagaagcccatcttcctccacatgaagaagtggggctccttcacctagagcaggagcttctctgcagtgtactgtctgtcgctcattttggagtcagtgtgggtggagacagcatcgtggatatgcacgtgctgcggggccctccagggaagtaacatttaccaaaaaaaaagaaaagttctgaagggcagtgttaggattgcagaatggaaggtcaaccccgtgggacttacgattgccccaggtgcgggatggacttaaatgtcacaccaaactcaaagtaggtacactgggttgcagggcatccagcctggcgctggcaccaccaaggagcaggactcctcatgattacagtgtccatctcaggcccacacaaccatgagagcctggactctggggtctacccgtcagtgccccccaccgctgtgcagactccctggttgatcctgggcttgtggcttttcaccgcacggcggggagccctgctcttgaatgtcatcgggctgctcagagctgattgctaggtgcctacacatttgcctcgacccacacagccccgtggtgatgcctcaaaacaccacttaggtttgggttcgtttagttcgagtttggggttttcatttgaacttgtttgatgtctgcagtttctgccatgacctgggtagaacctatgggattacccgtctcctggaataactgtttgacgttttccaaagttgtagagttagtatggcctctgtttaaagtggctggggccaaaataagggatgagttattatctcctactaaccttttagttttgtaaatcactaagaaaattgtttgcttggaagatataagttgaattggaaactcattactatctatttctgaactgctaagaaccctttcagttttcttacagctgagacacttttaaacagcgggcaaatgttatcaaatgaatatttgattgtgttttttctcttcacttccccttaaccactttagaaattccagagatttttttcccctcagaatattagttttggaagattgtgcccagctatatattttttagcagttctaatggtgcccatttatcctgacctaaccagttatttaaataattttttaaaccaccacgaataataaatggcatgtgaaactgatctgttggtaactggaagaaaactcagcatctgtatttatacaataaaattgattagtatttattttgagagttaaaagtgtatattatttccctgctatgtttgagtcctgtcttcattgttttgaatttcatattgaagctgggttaaccacgaaaaccttgttcttaaagagtcagccagcatttatctagcacacttgctctcacacgctcacacacactctctctgcacatgtgtgtaagggactgggctaaacaaggttaagagatgagtaaaccttgacctctgccacgttctctagtggggctcacaggtatgttagctattaatgataattccgtgtgctaaattctgtgatggagagatgtatagccattctacggaatgcagacaaagctattaattgtcactcaagggtcaggaaagatccatggaagtaatgcagattaaagatatgtaagatttcacattgtggaacagcatgggcacaggcccagaggcaaggccttgggtgtgagcttggaaaacagcagggagtgtgctgtgcttggggcctgaatgggtgtgaagaagggcaaaaggggaaactgagttataggccaattggaaaaacttaaggtgccaaataaagagatttggatgaatccggtaggcaactggtaggtaccctttccagacttgaagcaaaagagtaacttggttagatctgacttacgacttgcagctagtttcaggctggactccagtgatacttgcttgagtctatttaatcatctttcctttctgtttgggaaagaaaaatctgtatctgaaaaagagatgcatccctctgtccctagtattttcagggaacgatatggtttggatgtttgtctcctccaaatctcatgttgaaatgtgattccccatgttggaggtgggacctggtgggatgtgattggatcatggaggcagaccctcatgaatggcttagcaccatccgtttgatgataagtgagttctcagttcacccaggatcttgttgcttaagagagtctgggatctccctcgagaccatcctggctaacacagtgaaaccccatctatactaaaatacaaaaaattagccaggcatggtggcaggtgcctgtagtcccagctattcaggaggctgaggcaaaagaatcgcttgaactgcggaggtggaagttgcagtgagccgagatcgcgccactgcattccagccagggcaacagagtgagactccatctcaaaaaaaaaaaaaaaaaaaaaaaaaggaagagtctgggatctcccttttgtctcttgctatcgctcttgccatgtgacatgctggcaccccatcgacttctgccatgattgtaagctttctgaagcctgcccagaagctgagcaaatgttggcaccatgcttatatagcctgcagaatcgtgagccaattaaacatctttcctgtataaatcacccagcctctggtattcctttatcgcaacacaaaaatggactaatacaggtacatattgaataaatctgggtttttactgtgtagtacagagtgcagccagcatctcttctttagaagctagattctgaatgctctgtggcacctgttcacttctctgcaactctgctgctttgaagctatgaccctggaagtcactgagcttttgagaacctccatttcatctgtaaagaagtagaaaggactctgcccttcccaattacgtttgcaggggacccaccacatcataggtgctccatcaatgttggttaccttgggtcccagaggaagccactttgccaggatagaagggatgcctaggactcagcaggtttcctgttctagcacttggagcacagccacttaacctctctggatttggctcctaatctgtgaagtagggataataccccacccctgaggactgatagaatgttagaagagataaacatcttcgtgaaagcactgaatgatctttacaaagcaccatgcacatcgggaggaattagtcactcaacgaggatttcttgcgttctatgtttcaggctttggtgggattgttgaaatacagatactcattctatacacattgagaatgtgtactagggctgaaactagtcttttgaaaacctgagctctgcaggtgcagtggcttatgcctgtaatcccagcactttgggaggcaaaggcgggtggatcacttgaggtcaggagttcgagaccggcctggccaacatggtgaaaccccgtctccactaaaaatacaaaaatcagccaggcgtggtggtgcgcacctgtaatcccagctactccagaggctgaagcaggagaatcacttgaacttgggagggggaggttgcagtgagccgagatcacgcttctgcactccagcctgggcgacagagcgagactctgtctcaaaaaaaagaaaaaaagaagaaaatccaggctctaaacaaatgggaagtatttcaaagtgctttagtggtagatggcaccaacgaggtgtagagacatggcctctcagccttaatttccagtttctagcccctggcagatgagctgccttaggcccactctcgctcgtgaatgttctctaacacggcttctggcggcctcagtgaatgagttggtgcccagagctcttgattctgcttgaagtagatagctctctttttctttttttccccccttagcacatctaattatagttttgtaggtagacagctcagccttgtggattttaaatgaataaaaaaagacaagtctttaaaacaattccacactttttaaaggccagcactgtcagcaatccagaacaagaacgagtatgagtctagatatgaaagagacagccagttggtgaaatagctgtagccaagcccaggcacagaactacaagggggagagtggcaggcgcaggtcattttggctgtgtgtacaaaacacagttctagggcgcctcagatgagaaagtctcggagggtgagggggcaggactaatggaccgcctgaagctaaggagaggacaggagcacttgggaaggaagcggtctggggggcctaactgagcagcaccctgcctcacaggagagcaagtcacagacgtttcagccccaacgctgccgctcactggctatgtgaccccggcgaggcgcttgacttctctgagcccacgtgctggtctgtaaagtgaagtcagccccttgttctgtatttcctttgatcctggatggaggcttctcttgccctaagagcaaatttgtattctttcttcaaaacctgtctccaattgctttggggcccagagcacgacacgacaggagaggcctctcacctgccactatgcctatttgtgaagaacttggcacagttcatgacagcctgcttctgatcagggtggtttgtatgtagcagaacagcttccaccctgccatcggttcaaagtccatggcacaagagcttgtaaaatgtgtagtaaaaattaataaaacagccagcttaaaaaattcagcctcagtgtgacttttactgttgctaaggatagaccccagtcatcacaaaaaggatacattgattttagtttgataggaaaatgcataaaatagtttaaggaagtatattattcaaaatggttaaaataagttgatgctttaagggacaaacttgttctctcaaaagtttacttgcaaaaacttttttagaaaattttaggccgggcgcggtggctcatgcctgtaatcccagcactttgggaggcagaggtgggcggatcacgaggtcaggagatcaagaccatcctggctaacacggtgaaaccccgtctctactaaaaaaaaaaaaatacaaaaaaattagccgggcgtggtggcaggcgcctgcagtcccagctactcaggaggctgaggcaggagaatggcggaacccaggaggcggaggttggagtgagccgagatcgtgccactgcactccagcctgggcgacagagcgagactccatctcggaaaaaaaaaaaaatttttttagttatgcagaacaccttatccctcaaagaaaccagcctcactgtgtatttccacagattactcactctttgggtcaagggtcaggcacacttgatgtgagaagactccaggcttctttgtgtgcaggtgatatgtgaccttttgttcatgcagcacacgtctccagagcctgctgacctcagcacaggccctttgctgccaaaaacctgctggccacctggacttctcagccccaacctgtgcctaagcgttgccttcagtggcatacagtaggtgctcctgaggtgtgcgtgtcggtatggggcggggcagtgtgagtgaggaagagcacaggctgagtttggtaagtcacacctgtgtctgtctcttggtcccctgggagctctgtgaaggcccagtgttcccagaatgagcatcggaaacctttagaagcagagctgtcccaggatcatagaagactgtggaactgtgttattgtaaacagtaagtcacactgattctcagtaaatattctgagtgctaatgagccaccaccagctgggaaaccagaacaggagctgaggccctggtgccctgtcctgccctgcgcacatctatacggcgacgcctgctttctctccatggtgatgcagtgatccctcaaacaggcacagtgtttttcctgtctcaacgctccccccaaataattgcatttgatcccaaggccagcctgcagagtgtgtgggcaaggtgttcccatcactacttgacccaggaacccacaggaaacccccaaagaaggatgacctgctgaagatcacacagatcccaaggccacactggggccggaccaggccctgacctctcccccagggctctttcttccgcaccccaagccctgtggaggccccacagcctctccttctgtcccacccatctgaacatcctgccctctgcagagagtcctcccgactccgcagccccagttaagagggaggagcaaatccgggggacatctctgtgcagggagtggaaaaactgagcacctcacagcattgtgctatggggtgtggagcaactttaagggggaaaaatgtgtatttataactgccggaaatgcgatataactgtcaaaagtccatgaggtcggccgtgtacataatgactcacaggcataaaaggggcgggggtaagaggggcaggaggtgcttctttgaggactccccttagctgtgtctgacaggcaggtcgagggggtgaaacggggccagggctaccagccagggtaagaagcaagaacaaaggcgttgctgggaacctgcattactcgtgcgtttaatggttactgactgcacactgcacaccaagcgctggactaggctccagggtgagaaatgcacaaggcagacacagtgcctgccctcaggaagctgccaggcctgtggctgagacaggaaagtacagagggcacagagctgcgctggagctgggtgtaaggcaggtagttggggaggggaggactgagcctgtgtctgagggccgggggcaggggatatggctgggtggggggaaggagggggatctgtgcacagggttagcagaagagcggccagaacagaggcccaaggagcttcccccaaggctgagcgtggaagactgtgggactagacacaggacagaaaccatggagatggggaagggtcaacagggccaaagacccaggagccatgggaggtgagggcaggcacagcctgaagcccttggtgacctccatgggagctgtttcagggttggggagcagcaaggaagcaaggggcagtgggcgtgcacagtggggaagtagagacagtgagtgtagacaactcttgcgagtttagctataaagtgctggagaaaaatatgggtgggagttggaggggactgtgagaccgaaggaagatttcctgtaaatgcgagtgggatggagccagtagcagggagaaggcaaaggttcaggaagaagacgggacaatgaaaggagcaaggccccagagaaaatttggggtgacaggggagaagggggagccccagggcatggtgaggacagcaaggaagggtggccgggcaggagtgggctgagctgtccatctgcatgggtgggaggctgcaggcgaatttcccgcctggcccctgaagagggacagcctgggatgggggcctgactggagtgactattccagggtacaggccagggcagaaggggcaccatgaaggtggcttggagcttcttgggccttttgaaggagattcctgaggtttatgggaaggggtggtttgctgcccctgagttcagcatgcctggattataatcacctcctccccaggcgcccttcagctactcttgtgccctctagcccactctccacatggcaagcacctgacctgtcctaaacacagctctcaccctatgagaactgttacataaaagaaagcaacatttacttacctttgctatatgcattgtacacactagttaactggatagttggtgaagggaagtttctcttatataaatattccaagtaaaaagattcagaagggatcatagaattaggctgtcagctcttcgcaactcctaaataatgagcacgtctaagacaatgctcatcaatggcacagaaaggcaggcaaccagacacctgatgcctcctgatggaaaagcacacacctttgaaatagccttggcataagtttgaccctgaatataatgaagcatctatccgtgctgtccaaagacagcagacaccagccacatggagttctgaagtcattgaacagtggctaatccacattgagatgtgctatgaacacaatccacactgaactgcagagactttgtacaaaaaagaatgtaaattcttttgtattaatttttatattgatgacgttagaatgataatattttgaatatattgagttaagtaagatacaattaatttcatccatttctttttgctttttaaaatgttactacctgaaaatctaaaattacatatgtgacttgcacttgtggctcacatgatttactattgggtggtactgctctggatctaactaccagtttatgggaaattcaaagggcagatgagcctttaacaccaggaaaatgcaatcagaaaaatccagacggttggaaaccccgcaggacgagccacctggtttctccaataaatatattgaaagaaaaaatacatagaagaagggaaaacctattaacaagagactcaagagacatataaatcaatcccattatgaaccgtgcttggttcctgtaaactaaacaaactgaaaaaaagaaattaagggacaagcaaaatggaagcactgactaaatatgatatgaaggacttgttatttgtttaggtgtgataatagcattgtggttttggttttttaagtccttgttgcttagatgcatagagaaatatttacagatgagatgcatctgtctgggattggggatagggtgtgaatggggtgtggaggaaacaagattggctatggatgatggatgacaggtgactggagtccgctgtgccttgtggcacacaccctgccctccagccaggtggatgcacttgccattcccagaacgccctgctcctgcagccctggggcctttgccgccatgatgtctctgcctagaatcttcccccctaacccacagcaaacctctgtccacctgtatgccagagctcagctaccctcttctcctctttgaagtcctctctgacgtcttccccactctccacccacccactctccctcctttgtgttcccccactacctgtgtgtgcttccagcacagcccttcctacatgtccctacgtgtatgtttccctatctgtcaccttcagtagcccatgagctcccacggggcaggcgcgggattttaaggcacagcttgtgctcaggaaaactggatagattcgtcttggtgtgttgagtgtccattttacagaggaagcagttgggacccggagaagttagtcttggctaagttcacagagctaaaaagtgacagagctaggacttgaaatcaggacctttgagtcacgtctctgcctgacctcagccctgcgggccccgttcccgccattccttcctgcctctcacgttgactgggctccccctgtcggtcggcactggctgaacagccatggagtggcgctttggggaaaccacgggcgaccaggaaagatctcaggcaagcctcgggtaagtgagctgtaaactgagacctgaacccagacacagcccatgccaggccgagcgaagagcctgtgcaggggcttggagtagagaagagcacggctcctgtgaaggattcagaggctggagctgggcgatgggccaccgcgcggaggaggcgcgggcggtggtccgagttcctcaagggatctacagacggcgcccctcctacccagggtgtttcctgatgattgtattttgtatttcagcgttgatgattttttttttcactacttcaccccctcccaaacgcccaaaactgcctggtgattttttttttttttttcaaagtgcatcctgacccctctggctgcctccatagactcagctttagtcccggcccatcctgctggcacaaggaagccaccgcatgtgatggggtgtaatttacagccacaaccctaatgtgcagaaatatcactttatttccccgtaactgtcctcacccgaacctgttttggccgctggcagcaaaacgcttatctgaccacttcaaggcaactcattcatctctagttaaagattatcccctagggggtaaatgctcaaattccccaaatttcctgacctcacccc

SEQ ID NO: 1970 - DNA, 3931 bp, Homo sapiens
actgcggtaatatggctcttccttagccagcggcggcaacggcggcagcggcggcagcggcggcggctactgtctgggctgagcagtagtgcctctcgggtggcgggtttctaggctgcaggggcttggtaggtggtggcaagggggcggcggcggatgccggaagagtgcccgccccgccgcttggcggcccctggatcgagatgagcgcctccgcgtcggtcgggggccccgtcccccagccacccccgggcccggccgctgctctgcctcccggttctgccgcgcgggccctgcatgtggagctgccgtctcagcagcggcgtcttcgacatcttcggaacattgctgcccggaacattgttaatagaaatggccatcagctccttgatacctactttacacttcacttgtgtagtactgaaaagatatataaagaattttatagaagtgaagtgattaagaattccttgaatcccacgtggcgaagtctcgattttggaattatgccagaccgtcttgatacatctgtgtcttgtttcgtggtgaagatatggggtggaaaggagaacatctaccagctgttgattgaatggaaagtctgtttggatgggctgaaatacttgggtcagcagattcatgcccgaaaccaaaatgaaataatttttgggctgaatgatggatactatggtgctccatttgaacataagggttattcaaatgctcagaagactattcttctgcaggtggatcagaactgtgttcgcaattcttacgataacttatatttctaggcttcatagagcccagtgtgcaattaaacagactcaggtaactgttcagaaaattggaaaggaaattgaagaaaaactaagactcacatctacaagcaatgaactgaaaaaaaaaagtgaatgcctgcagttaaaaattttggtgcttcagaatgaactggaacggcagaagaaagctttgggacgggaggtggcattactgcataagcaacaaattgcattacaagacaaaggaagtgcattttcagctgagcacctcaaacttcaactccagaaggaatccctaaatgagctgaggaaggagtgcactgcaaaaagagaactcttcttgaagactaatgctcagttgacaattcgttgcaggcagttactctctgagctttcctacatttaccctattgatttgaatgaacataaggattactttgtatgcggtgtcaagttgcctaattctgaggacttccaagcaaaagatgatggaagcattgctgttgcccttggttatactgcacatctggtctccatgatttcctttttcctacaagtgcccctcagatatcctataattcataaggggtctagatcaacaatcaaagacaatatcaatgacaaactgacggaaaaggagagagagtttccactgtatccaaaaggaggggagaagttgcagtttgattatggtgtctatcttctgaacaaaaatatagcacagctaagatatcaacatggactagggactccagacttgcggcaaacccttcccaacctgaaaaacttcatggagcatggactaatggtcaggtgtgacagacatcacacctccagtgcaatccctgttcctaagagacaaagctccatatttgggggtgcagatgtaggcttctctggggggatcccttcaccagacaaaggacatcgaaaacgggccagctctgagaatgagagacttcagtacaaaacccctcctcccagttacaactcagcattagcccagcctgtgaccaccgtcccctccatgggagagaccgagagaaagataacatctctatcctcctccttggatacctccttggacttctccaaagaaaacaagaaaaaaggagaggatctagttggcagcttaaacggaggccacgcgaatgtgcaccctagccaagaacaaggagaagccctctccgggcaccgggccacagtcaatggcactctcctacccagcgagcaggccgggtccgccagtgtccagcttccaggcgagttccacccagtctcagaagctgagctctgctgtactgtggagcaagcagaagaaatcatcgggctggaagccacaggtttcgcctcaggtgatcagctagaagcatttaactgcatcccagtggacagtgctgtggcagtagagtgtgacgaacaagttctgggagaatttgaagagttctcccgaaggatctatgcactgaatgaaaacgtatccagcttccgccggccgcgcaggagttccgataagtgaagtgagcaggtcaacagtaggactggggcagaagctctgcctaaaatgaagtgaaagctgcacttaaccctttgtgataatgatgacacaaaatgaatattaatggaggatattcctcggaaaaacagactttgggaatgaaggagggactcaggatcattgttatcagtgggccaaagttagattttgctttcaagatttgcttttcgggcctgatgattttaaagcaaaaatcaccctctagttgaaagagcttacagctcgagtcaccttttagctatttgtctgctttttatttacccttgtatgttatcctcagagggaagatgataatatataaataatataatgaacacacccttagtttctcataagcatttgccctcaccatggtttataaaactttgggaaaacggaatattcagaaataggtttccgccatgtactgaaaggtctgtggccatctgtgaggtagatgaagaagcagcatagtggtctccttacatctaggcctaactgtccctcttcctgcccccgggtaccacagtccacctttagaccctactgtcgccccatcttctccgtggatgggccatgcgtcctgaaaacaggacatcagattcactggttctgtaacccagtagctgtgacgttccatctcttctaaccagccatggccttcccctcctctgccatacccttaatgcggccctcagattagatgaaaaacttgctcctggtggatcccaagggaccctcaaggacctcgaggttactgcagtcagatgccatctcatcccctgtgggggccaaagtttttatgtgggcagatgctgtggtcaggaactaggcatgctttctggcaatgcactcaccagacaaaaatcccttgatgtaaatcccatgttaatttattaaatttcagtcagaaggtcagcatttacatgacagaatgtatgtagagagttggggtgtctggtaggcaaactgcaaggcagttgagatagttggattaagaggctagacgagacatagaatactattggtatgtgtgcaatttcatgaatattaaattatgtttcgaagtccagttgtcattcccgcattcagatttcatttgctgttgctttatacgttacgtacccaaggacattgcctcagggttgcaaactctttaaaggaaaatttatccatatatccatgtattatatagaagaataaaaattgagtttacttcacccgacctgatttttttttaccagcttggaaattcctcttgaacctacgtctccatatgtcacatcatgacaggactagcctgaacaaaagccatgtctatctaagcggaggctgttgacttcattcagtttgcatattgtatatagcaacacaaacacttgacaggtatatactccagtcgccacatttgtcctgcataacagcttcactcacaggcctcaccgtcactttattttgtgtccaagcattcctgggctcaagtttaatgtatagctacattgttgttttccatgtagagaactcacaggatgactacatcacaaataaacccaactctcaggcagtcgaaagctttaactggatctgcagaagcccatcttcctccacatga

SEQ ID NO: 1971 - protein, 535 aa, Homo sapiens
MMDTMVLHLNIRVIQMLRRLFFCRWIRTVFAILTITYISRLHRAQCAIKQTQVTVQKIGKEIEEKLRLTSTSNELKKKSECLQLKILVLQNELERQKKALGREVLHKQQIALQDKGSAFSAEHLKLQLQKESLNELRKECTAKRELFLKTNAQLTIRCRQLLSELSYIYPIDLNEHKDYFVCGVKLPNSEDFQAKDDGSIAVGYTAHLVSMISFFLQVPLRYPIIHKGSRSTIKDNINDKLTEKEREFPLYPKGGEKLQFDYGVYLLNKNIAQLRYQHGLGTPDLRQTLPNLKNFMEHGLMVRCDRHHTSSAIPVPKRQSSIFGGADVGFSGGIPSPDKGHRKRASSENERLQYKTPPPSYNSAQPVTTVPSMGETERKITSLSSSLDTSLDFSKENKKKGEDLVGSLNGGHANVHPSQEQGEALSGHRATVNGTLLPSEQAGSASVQLPGEFHPVSEAELCCTVEQAEEIIGLEATGFASGDQLEAFNCIPVDSAVAVECDEQVLGEFEEFSRRIYALNENVSSFRRPRRSSDK

SEQ ID NO: 1972 - DNA, 3933 bp, Homo sapiens
actgcggtaatatggctcttccttagccagcggcggcaacggcggcagcggcggcagcggcggcggctactgtctgggctgagcagtagtgcctctcgggtggcgggtttctaggctgcaggggcttggtaggtggtggcaagggggcggcggcggatgccggaagagtgcccgccccgccgcttggcggcccctggatcgagatgagcgcctccgcgtcggtcgggggccccgtcccccagccacccccgggcccggccgctgctctgcctcccggttctgccgcgcgggccctgcatgtggagctgccgtctcagcagcggcgtcttcgacatcttcggaacattgctgcccggaacattgttaatagaaatggccatcagctccttgatacctactttacacttcacttgtgtagtactgaaaagatatataaagaattttatagaagtgaagtgattaagaattccttgaatcccacgtggcgaagtctcgattttggaattatgccagaccgtcttgatacatctgtgtcttgtttcgtggtgaagatatggggtggaaaggagaacatctaccagctgttgattgaatggaaagtctgtttggatgggctgaaatacttgggtcagcagattcatgcccgaaaccaaaatgaaataatttttgggctgaatgatggatactatggtgctccatttgaacataagggttattcaaatgctcagaagactattcttctgcaggtggatcagaactgtgttcgcaattcttacgatgtcttctctttgctacggcttcatagagcccagtgtgcaattaaacagactcaggtaactgttcagaaaattggaaaggaaattgaagaaaaactaagactcacatctacaagcaatgaactgaaaaaaaaaagtgaatgcctgcagttaaaaattttggtgcttcagaatgaactggaacggcagaagaaagctttgggacgggaggtggcattactgcataagcaacaaattgcattacaagacaaaggaagtgcattttcagctgagcacctcaaacttcaactccagaaggaatccctaaatgagctgaggaaggagtgcactgcaaaaagagaactcttcttgaagactaatgctcagttgacaattcgttgcaggcagttactctctgagctttcctacatttaccctattgatttgaatgaacataaggattactttgtatgcggtgtcaagttgcctaattctgaggacttccaagcaaaagatgatggaagcattgctgttgcccttggttatactgcacatctggtctccatgatttcctttttcctacaagtgcccctcagatatcctataattcataaggggtctagatcaacaatcaaagacaatatcaatgacaaactgacggaaaaggagagagagtttccactgtatccaaaaggaggggagaagttgcagtttgattatggtgtctatcttctgaacaaaaatatagcacagctaagatatcaacatggactagggactccagacttgcggcaaacccttcccaacctgaaaaacttcatggagcatggactaatggtcaggtgtgacagacatcacacctccagtgcaatccctgttcctaagagacaaagctccatatttgggggtgcagatgtaggcttctctggggggatcccttcaccagacaaaggacatcgaaaacgggccagctctgagaatgagagacttcagtacaaaacccctcctcccagttacaactcagcattagcccagcctgtgaccaccgtcccctccatgggagagaccgagagaaagataacatctctatcctcctccttggatacctccttggacttctccaaagaaaacaagaaaaaaggagaggatctagttggcagcttaaacggaggccacgcgaatgtgcaccctagccaagaacaaggagaagccctctccgggcaccgggccacagtcaatggcactctcctacccagcgagcaggccgggtccgccagtgtccagcttccaggcgagttccacccagtctcagaagctgagctctgctgtactgtggagcaagcagaagaaatcatcgggctggaagccacaggtttcgcctcaggtgatcagctagaagcatttaactgcatcccagtggacagtgctgtggcagtagagtgtgacgaacaagttctgggagaatttgaagagttctcccgaaggatctatgcactgaatgaaaacgtatccagcttccgccggccgcgcaggagttccgataagtgaagtgagcaggtcaacagtaggactggggcagaagctctgcctaaaatgaagtgaaagctgcacttaaccctttgtgataatgatgacacaaaatgaatattaatggaggatattcctcggaaaaacagactttgggaatgaaggagggactcaggatcattgttatcagtgggccaaagttagattttgctttcaagatttgcttttcgggcctgatgattttaaagcaaaaatcaccctctagttgaaagagcttacagctcgagtcaccttttagctatttgtctgctttttatttacccttgtatgttatcctcagagggaagatgataatatataaataatataatgaacacacccttagtttctcataagcatttgccctcaccatggtttataaaactttgggaaaacggaatattcagaaataggtttccgccatgtactgaaaggtctgtggccatctgtgaggtagatgaagaagcagcatagtggtctccttacatctaggcctaactgtccctcttcctgcccccgggtaccacagtccacctttagaccctactgtcgccccatcttctccgtggatgggccatgcgtcctgaaaacaggacatcagattcactggttctgtaacccagtagctgtgacgttccatctcttctaaccagccatggccttcccctcctctgccatacccttaatgcggccctcagattagatgaaaaacttgctcctggtggatcccaagggaccctcaaggacctcgaggttactgcagtcagatgccatctcatcccctgtgggggccaaagtttttatgtgggcagatgctgtggtcaggaactaggcatgctttctggcaatgcactcaccagacaaaaatcccttgatgtaaatcccatgttaatttattaaatttcagtcagaaggtcagcatttacatgacagaatgtatgtagagagttggggtgtctggtaggcaaactgcaaggcagttgagatagttggattaagaggctagacgagacatagaatactattggtatgtgtgcaatttcatgaatattaaattatgtttcgaagtccagttgtcattcccgcattcagatttcatttgctgttgctttatacgttacgtacccaaggacattgcctcagggttgcaaactctttaaaggaaaatttatccatatatccatgtattatatagaagaataaaaattgagtttacttcacccgacctgatttttttttaccagcttggaaattcctcttgaacctacgtctccatatgtcacatcatgacaggactagcctgaacaaaagccatgtctatctaagcggaggctgttgacttcattcagtttgcatattgtatatagcaacacaaacacttgacaggtatatactccagtcgccacatttgtcctgcataacagcttcactcacaggcctcaccgtcactttattttgtgtccaagcattcctgggctcaagtttaatgtatagctacattgttgttttccatgtagagaactcacaggatgactacatcacaaataaacccaactctcaggcagtcgaaagctttaactggatctgcagaagcccatcttcctccacatga

SEQ ID NO: 1973 - protein, 691 aa, Homo sapiens
MSASASVGGPVPQPPPGPAAALPPGSAARALHVELPSQQRRLRHLRNIAARNIVNRNGHQLLDTYFTLHLCSTEKIYKEFYRSEVIKNSLNPTWRSLDFGIMPDRLDTSVSCFVVKIWGGKENIYQLLIEWKVCLDGLKYLGQQIHARNQNEIIFQDGYYGAPFEHKGYSNAQKTILLQVDQNCVRNSYDVFSLLRLHRAQCAIKQTQVTVQKIGKEIEEKLRLTSTSNELKKKSECLQLKILVLQNELERQKKALGREVLHKQQIALQDKGSAFSAEHLKLQLQKESLNELRKECTAKRELFLKTNAQLTIRCRQLLSELSYIYPIDLNEHKDYFVCGVKLPNSEDFQAKDDGSIAVGYTAHLVSMISFFLQVPLRYPIIHKGSRSTIKDNINDKLTEKEREFPLYPKGGEKLQFDYGVYLLNKNIAQLRYQHGLGTPDLRQTLPNLKNFMEHGLMVRCDRHHTSSAIPVPKRQSSIFGGADVGFSGGIPSPDKGHRKRASSENERLQYKTPPPSYNSAQPVTTVPSMGETERKITSLSSSLDTSLDFSKENKKKGEDLVGSLNGGHANVHPSQEQGEALSGHRATVNGTLLPSEQAGSASVQLPGEFHPVSEAELCCTVEQAEEIIGLEATGFASGDQLEAFNCIPVDSAVAVECDEQVLGEFEEFSRRIYALNENVSSFRRPRRSSDK

SEQ ID NO: 1974 - DNA, 33447 bp, Mus musculus
  misc_feature (1)...(33447): n = A, C, G or T/U
accgttttttaacagctctgtgtacagtttgacactagtgacaggcatccaaagttcagagaaacattttttttttcaaattaaaattttaaagcactgaaataattttccatgggttatcagaactttgagtgtcttacatttactttagatttatgaaaattacagaatcacatcaaactttaaagtctctgaaagtcttaaaaatggcctccatggaaaagggcctgtgacaagcctgacctgagttgagatcctccgcaccacgtagaaggaagggatcctaggaggtcacaggccaaccaaacaaaaatgcgagctcggggaacagctctggctgaacagataaggcagagcctccctgcatcggcctctggcacacagacagatgaaccaaaccatgtacacacacacagtggccttgctttgaagaattttagcaaagagtggtcttagatattttcccgagtacttgctcttcttgtgcgcttctttctctctcatccgggctcttgctggggcagtccccgggcctgagggcttccttagtgcttccatggctggggacctgctaggatccaggcccctctgctttacagctcccaggtgcttgatgtcaccttcatttttaaactgattttcactggctatagaataaaagccaacttgagttttagcattttagagatgtcctgctagggtaccttagccccagcaccagagaaactgaacgtggtagtgcctgcctgtaatcttaagtacttcaaggccgagacaggagagtcaaaagttcaggatggcctttgagatcctggggaaaaaaaaatcaaggtgatgtctccattatcgttgtcctgggtgttaccggcctttattcttcagccacctttaaggtccgtcttggcttctgatatacgtagctacagtgttctcagtcgtgggggtgagaagggcaggtacgagcatgcagatcattaacaagactgacagcaccggcactcttaggcccgcgtgtgggttcagtttgtttttattgtgctgccttatttacttacatagatccactggtatgtgatgaagtcacaaagtcttatgtaattaaggattttatgataatggctgcaagactggaacagaaataggactggctgggacaactcttgaagtcaagggaaggctttcttactttttaagatatatgaatgttttgcctgcatgtgtgtgtgtgcaccacatgtgtgcctggtgcccatggaggtcagaaggggggatttgatcccttacaactggaatcacacgtgctatgagctaccgggtgagcgctgggaactgaacctgacatctttaaggctccagtgctctctgccccagggaaggaaaggcttccagagggctgaaggtggagatgctacttcagaggagcaggtcagcccctgggtcagagaggcctgggtccagagcaggtgtggggcctgggaagtgcgctgaagcaggtgcgagctgggatttggtgacaggactgcctacctgacggaaacacgtgatttctcaatattgttccaggcaatgctcagcttagagggagaggggaagggagggagaagtccagccttgaatctccatttgtagatcccattttattgtgtataacaaaacgtttcctgaggagacagaacacatatctattcaccccagataggtatactataacagaccaaagcttggataccaccaaagtccaatctggtgagccatgaattttactgtgggtacttagaggaacatgggtgaagggctccagcatgggtggcctcttaacaggcacgctccgatctggtctgttctgaagagctgcctctgctgtggaacgcaagctccctgggtaaggggccagtggttctgtctttccctgcatctgactggaactatggcctttgcatagctgccagcagagcttcaccagatcataccagaagggagacaggtccaagggaacttcctgaagcccagggccctcatgactgtggctctggccttatggctttgctcctcctgttaacaaagatcctgacctgtttcattttctttgaaccaccaagtccctagcactctgcagaattcaagaaaagacctaaaggtcacaggaaggttctgctaaaggctacctgaaacttttgaaagaagatgagtaacctgggtgagaatatacaggagttggaaagaaggcagaactagttggtacctagcctgacccaaaccgcaagttagtgtttacctcccagggaaggtctgtagacctgccggcatgtgctatgcctgtcaagacctgagcaggctggtgtgcagcagggtccaggaactctgccaggcactgactctaacacatctctctggagtctggactttggaaacttcccactagtcagcactggttagcgtgctaaggagtctgtctggctctcctgggcccttcattgtggaaactggggaccagtgacagtgtaaacaggaaccctgtgggctggccctgttagaaacggcttctcagaaggacagaagtgccaggtggtaaggcacagagggaatacttaggtagaagagccccatggggagagtgctaacagggatgggaagggagctgggggtggccagccatgctgtaactggcttggttaaatttcaatcttctgcccagggctgggactctggtctgagtgtcctgtccccacttcccccgactcatagctgtggctgctgagttctctgctgtcttcagtgtctgggaagtccttgttgctaccttaggagtggatagtgggagccgccccagagaaaggcagccagccaagggggtgaaagttgagcccagtggcagctgtgtagagccctcacacaacctctgaggcaaccgtccaggcagcctcgccgggcagggcagctgtttgctttcagttttatctctccagggttgtttctcacttaagggcactgctctggaaaagagcagagcttcaaccatgagcccaatctagaggatcacttggggtcttgtgggtggttgtgagcacttgcctagccaagccctaagctcccttggggagctgccaaaccctagttctgctcaggacctaagataagaataaaagctttgttttgctctggtgtctagccagggtcacccctagctccagcagagctcctgtgttttgcccgatgtacctgtcatttgcctccatgagatctgaagtttgagtttcatagtaaaccagagaaagaaaaccagagtttactaactctgcttggcagtgatcactgagacccactaacagaaaccatcttacttataaataagtgaaatgggtcatctataccacaaaccagtattccttccattcatctcactacatgtccactgagaaaggactggagaagcttacagaagactagagacagtcacctgtacccaccactccccacaagcacatagcctctgatgaagtaaatctagaggtgtaatgaagaggctctgaactgagattagaccacactgcagagcaaatagcacctctgaagaaaccacaccatgggacctgtacaaagtcagtcagtgtctctgtctctgtctctgtctctctctctcacacacacacacacacacacacacacacacacacacacacacgcacacatgaacttttacaggtcagctcgttgaggttaaagaggaacaggtgagacttcccccgactgctttgtggtttgttgtttgttgtttgcttgtttgcgtgagtgggtggtggtgttcacacagctcccttttctatggctgttactctagagctcctctcctcagtccgtccaccctggcgactgctctctgcacctgagaaatcccctctccacaccttagctcaggccaagcctccatttggcatcctctcccttcacatagtgttcagactccatcttcgtgtttctctctagtccctccttgaagttcccttccagggattccatccatggatggcccctctgtccagaccctaaagaatccctaaggtctgatgatccacttgcctgtgggaggaggggagggcggctcctgcaaagtgcatgctgggctgctgggcgcttgctttgtgatgctgtgcagcatggagaggagtggccagtgcatgtgggtgtatgtccctccttagacaccgtccgctgcccagaccttcaggggtatgtgctgtagcaactctgataaagagactctttagcacttactaatcaagacgtttgctcaacccctttaaagtcaacaggtactactaagcatacgtatctccaccctctctgccctgggctctaggcctgggctatacagataaggtcccccgggtctgggtgtgggtactggaaggttggctgaatcagccacactagcctcagctccaaggatgacaggaccccatggcagctataggctgtgtgtgcccttcctccttttggcggcctcactcccaccccagctccagtgaacctcagctatcttagctcccagcactcactgaagcctgcctggcccatttcagctattgctaatggcttctttcccccatgttcccaagctccaagcctcatctctgactgctgggtgggtccgtgttcacctccccttctatcttgagtcctctatgaagacaggaaccatgtctgtctattgtccacgtgaactgatcagagggaatagatcctaaacttataggagccttgatgagccaccagcagtagtctggtggtcatttcatgaactgagcagaattgtgtaagtctccagagtagagacataacctctaacagatatggaaagaaaggtctggttttaggacttgacaaatgattaaagaccagtgcctctgatcagaggtacatagtgaggccctaactcataaataatggtcaagacctgtttccatctggcttagcctcttagttcccttttactgtagcagaggattaaagaaaatgtaagccacaactagtgacccaaaagatctgtctatagctacagccagagcaccgaatgggacaagtatcctctaaacaccaaagatctcaggatcttgagatgaggcacacagaagcttaaaagtctctcagagaacccaaagggtatatccacagtagaccactaccattggttctagtggaatgaatgaggcatttactgcagaggcagtctccttccaacctgatctaaaccagatcttcatgacccagtcctacccattcactggtctcatagcatccgagccctcgtcttgacctggcctgcccggggttgtgtattgaagctctagttcatgccctcagaagtgcctggtctggagcagagggcaatatggacactggcctcttggccctcccctggcctgaggtgttactttagaaggaagaactgtgaaccaaaaacaacacccttcctgttagcctagacctccccagaacacagagctgtacctccaggctctgccaagcatcctagcttgacactgcttattcttggccaccaggaaggcttgcctaagggcctgctcggcttgcccacctccccctcagtgcttagagatctggactgacagggatagtcctgactatttgcccagcccccttggccatggttaggaaactagcacccaagcagcagagaggacacaagctcattccccttaccccattcttttggtaggtcactgtgtcttgcctgttttactctgagctgtgaagccaggatctgctgtcatttctgcctcctgttgacgtgtattgttctatagaaaggaataatgggatttctaagtgtgctcatcctgagcctctctagccaggcctgacctttcttgttagcaggctcacggggtacaagctggagaggtggagcagtgtagtagggtccgtcagcatgggaacaagaaagatctaccggcctgtggggacagcctccgtttctttctgcactggctcttcctgcctggcctccatctctttcctaggggcctcattctcagcccaccaggcaactttgctatgtagatctgagcccttcagcacaggaacctgacaagataccaaaaaggggaaagtggctgagcacacggctttgtctatggtagctgctcaagtgggatttccacctgcctcagctctgccactcagagctgcacgaccttgaactaactaagtgcacctgaccttgtgatgtcatggccagggttccacaagacagggtgtatgaggtatttgcaaaccagggacctagagaaaatgttagcccaaggaccagactcacctctgcaatgctgtatcctcaggactaatctagatgacttccttctctccaggacaagagtgaagccaccaggggagcccttgcccagaggccttgtcgccccagaccttactccatccctcccaaccttcctgaggaagagactcgcaggattgcacggatattttcttcccagtattccaaaaagactgaggaaacctgagggacgtggctaccagccagcctctcagctctgtaaagcttgcaagagacaacaggcctgtttccctcagcatcctcaggccactagcatcaccctattccatgggtatcttgagacctaatcagctaagaccagaggagtgtcccaaaccacctagcagctgcctaccaggacctcagcttccttctgtaatgaggtgacagctggaagtgagactcaagcacccaagtgtcccacccatcttctgactgtggggcctaaggaggcctctctgagcagagaaaccagtgtccttgacacagcctactgctgaccagagcccaccttctgcttaaataggacaggctatttttgccataaatattggaagaaacatggaataagtatgtacatagctgagaaaattccagagccctgtccagcttgtttgtttgggaatgaggtattttatagatataaattatttttatgatgtattaatcaatagaacaggggaattgcctcctttaaaactgtattcggttgtctgaaatttaaccatgtttttaacataatgtttgtttctactcagctctgaaattcattgctcttgcctttgtttttaataaaagtctggcatttgtatttgtgtacaagtgttttttgggttggtcactgggaaaaggtgttgcagaaagaaggatacagccatcactccaccacctgcaacatgagtcgccatgagacttgctagttcttccaagtgtcagattgacccatgttagagggatgctagtgttccacttctggtggtttgggcttttgcttgcttgcttggtttgtcttttcctctgatggccctttaaatcttgctcagcacagtgaaagtccaactaggatctggtccccggtgtgactcaggagggcacttctgtcagagcacagccacttgggcagctaccatagacaaagccctctgaggataactctgaagggacatagatgtccagtgccagctggtagtgaggctgaaaggagctacctgagggccctgcttgtcaccctgtgtgtcatttctctaaatcctcacaactctatgatgcccctcccacaattacactcaacaccatggaagtcggatgcattgcttctgtatcggtacaaagtgcatcaggaccgaagacataccccagagataaggactcagaccaaagcaggatacaggcagtaaacgccctgaattcgggcggtctcaggctgctaaatccagggagggatttctggaagaaacccgtactggggtaaagcccagagaatggtatagaccaggtcatggacagctgcaaagagaaccagagaatgttctggaccatatcagtgtccagcctggctgagactgtggctctggcctcatctggaaggcacagacatgtagactctggcttcgtatggtcgctgtgaagatcaaatgggacatttctgaaaatgcttcgctggcatttggcacataatggaagcttgagaaatgtcagcccttcccactcttcctaagcaccggggtgaattagaggcaagctcactggctacccagaacgcagagcactccagcctcccataagggccatgaaccttcagccaaacctgcccctcagatctctgctccttgagtgtcaccttgcaaacctgcccagtccctagccaggggctccccttgccccaggccttgccctcggccagaacagagcttccagtacctggagttccacgtccctcggggtaagaaacctctaggttccaagcctaaggggtaaagcctagggtgaagaagatcactgccaaatcctgatcctgtaaataacctgaaggagtcaagtgagaacagggccacaggagggcacgggctgcagacaaggtgaaggtctgagacacagacgacatgcccaatttgttatttaccagtctctcccagtgatagctctgaggcaacttgacttgccaagttgtacaacacatttgtcaccacaaccagaatgaaccctgacttccttatgcatgccctccacagatgcctggaaagtatttctggtgacccagagactgtagcagccaaccttaaaactcccagcagaggtttgactctagctaggcctgagctctcctccctctgggtttctccagaacctgctgcctctagtttgacttctacttgtagccccagcccccacatggttcccacagtcctgcccatgtccagattaatagttccagactgagctcaaagcagtgagcaggtcctggtccaagaaacaggatagacagtctagatgtcacagcacccaccctgccatggcgctgcgctcaagttccaaaatgtcctctaccttctctgtcctacttatctcctctcccctctccttttagtttcccttctatgccacctggctcccaacttcagctgtgcccacccagtctttaacctcagcgcctgcagatggaccagcctacagtggttgctgcaagggattctgctcaccctgccccatctccggtcccagcatgtccatgtcatgaggaatcaggattgcagctgatagacccaaagtgtggtataggttacaggcaagtcaggcctgcagtgacctagctgtctgtccttgacagtcagttttctgtgtaaagtaagcattgacacatgagggctctacacagtacgtcagtgtctaccggtacagtgcagtgtgttaacaccactgtgaaagaaaccagccacaagaggctatacattctatataatcctactcaaacaaagcatctagaacaagcaaattaagaagcagaataaagacgagtggttgcctgaagctgggggaagggaaagggggtgacttgttctgtttttgtctttgagccatgatgaaagtgttctgaactagcatgtagtagttgatcaaccagactgtactaaacactattgtgtgctctatgtgggcaaatcacatgctgtgtacaatacatctgttgtcctttgtttttaaatttaggatcctgcttcctagagatgtgggaaatagaagcgctgtgcctgaaatatcaagcatatcttggcaccaagatgtcctctaccttctctgccccgtcttctcctctcccctcttgagaatgtcaggcctctaagaagtgacacctgtaaccattgtataggatcctggagagcccctgtcctaagagaccttgtcctttgggctctcaaaggtgacaaatgctgtcacacacctcctggccaccaaggtagctctcctcttgaaagctcaaaggagccacattaaagagccccaggtcacggaagctaaaccagatctggaactcactggtcccctccccgcagcctgcctcttgtcaagtgatcagactgtcaactagcttctcagaattaggtttcaggtcagctggtgcacagggccagtgccgagccagggacagcagagacaacagtgaatggtgaggcccggccgtcagatcctgctgctacctaatggagtggagccttagggtggccctgcactacccaaccttggctagacgcacaggtaagaccccatactctgctctcctctccctttttcccttccatggatgctcacagccaggagcttgctgggatcactcagcactgcgtgagagaccgagagtgagccggtctagctcccacctagtaaagatgaaggaactgcaggcctggggagggccttgacttccacatctatgtgactcctcacaactcccgtgttttgctgactcctctgctgggatcttacaaatgccagatgaaaagtgtccctctcctttggcccaggatccccacggagcacaaagccctctccagcaaggatcctggggcccttcctgggtagagatgatgagggcacctctggcctgaagcctggtctagagcccgtggtcactctgtctagtggcatccttgatgcggatgtattgttggagagagttgggttggccctataggctagagtacctcatgttgtgggtaccccagtagagctacagggtgaggattgttctcaacttccacttccagctgggggcatcagaccgataataaccgaggtgcgccaaggaggaggttgggaagctcagacctcagggcgttccctactgcgccaggcattgtagcctcacccacatactcaagtctgtctgctcatcctttctctttctgatggatggtttgggggcactccttcaaaacttgggtacacacaattgcaagctcttaaccaagttcgtgcttcagtgtctcttgagagcacctttccagcagtatcctcagtggtgttagagccccaaggctcccttctcatctattcttgctgcctgcaccagcatgctctgacggcccaggcccccacccaccctggactaagtgtaaccttggcattcgcagccttctaccaaagggccctgagatcatctttgacctcatttcctgtctcctcattttggcacgatggtctgacttaagaccttccctataacagttttcacagaggagggtaagttgatcttgtccctgcctggaggctccgacagagccagaagagtcactgataatggggcagcgctacaagacagtagggtcagaagtagcagaggacaaagtgggtacaagagggaagcccggattgacagggaagcaaaaactccagggacacgcctggcctccgtggggagaaaattccattccgtgccttctgcaggacctgactcagcaccaacatcacctgaggttccctccagcagaaaggactcagaagtcagtccctgacagcagccatacccaggtcctttgcctgtctaacctcagtgtttctctccaaagcagagcagaacacaggatggttctgctagtgcctgagtggtccccagacaggctttgaagaagggaattctagagaacttacccacagctgggcgtggtggcacacacctttaatccctctcaggaggcagaggcaggcggatttctgagttggaggccagcctggtctacaaagtgagttccaggacagccaggtctatacagagaaaccctgtctcaaaaaaaacaaaaaaaaaaaaaaacaaaaaacaaaaaacaaaacaaaacaaaaaaaaccaacaacaacaaaaaaaaagaacttaccccaagggcctctccagatctgggtaagccttagattcaggctgtcaagtcagaagcctgctctccagggcagattcaaggcttgggagaagaaaggccaccaggataccatgaggagagtcagctgcccccacagtgcattccaggcctgggcagggaagccagtgcctccctgctgggaaggagccaagccttgctgctcttctgtagggcaaaggggaacgaggcctgagcaaatggagagcatgtctctaaacatgcctaccctgctcttcctcagccaagttggctgtaaaggctctgggcctcctcaggcttgtctcactgtacaactcaggcagactagaagacaggctgaaggaagagcctgggggagccaaggcctggctacagccaccctcacagagcctagcctctctgagcccaagaattccatatggttagaggactttggtcgtcatccagccttctccagattcatgtttggcattatgaagcatttagcaaaaaggctaagaccctgaggagccggatcaccacactgactggagcttaggtggtgtagcgatgacagcttggccatcagaacaaccagactggagttctgtgaccagtggtcagtcaacctctttccattttttattaaaataatttacttattcttatatgattgatgctttgcctgcatgtgtgtctgtgtgatggtgccagttcttggagtaacagttgtgagttgccatgtaagtacagggaattgaacccagggcctctggaagagcagtcagtgctcttaactgctaaaccatctcttcagtccaacctctttccatcttaagcttctattttctcatctctaaactggatttaaatactgccctgcttttgccaaagtggttttgaacctaaaatagactaaacgcaggcttagacactggtgacactaagcaagctaatgtctctaagcctcagctacctttcctgacaggtgttgaggatcaagggagatgacattcccatctgaaaattcccaactgcaggggccccaccgcccaacggccaggccctcctgctctgagcttccactgaaccaacaccagtggttctcaatgtgtggattgtgacccctttgggggatgcgtatcagacctcctacatatcagatacttacattaaaattcataacagtagccaaattacagttatgaagtagcaacaaaaagtaattttgtggttggggggcagcgcatgagaaactctattaaaggggcacagcattaggaaggttgagaaccgctaccctacaggttcaggcccctgcctcccctgggccatcctcatttttctatctgccaaaagccctttcagacttagcctgcgttgatcttcttgttcccctacaagcaaaagatcaaatcttcctctccctatcccctcttgacagctcctctccatctctactggctacagtccagcttgaactaagttatttgtgggcacaatctaagccgaccctcaaagccttctggagaccctggagataaacacacatgggattttattctgggatgccaagcacagagctctgtgtgggatggggtctcctcagtatgtgctggcttttaccaggctgaatccctggcttatctcagtgccatgacgcgaagatggagttagacatgagaggagaccttccagtaatatcaccatccttttgtccggcacatacagcagcactctggatgggcgaggcccctgttcttggagacagggcatctgagtgggaaagtgcatcagtggacaaggctgagggatgggtgagaatgatgctgagcgagcgtttgtgttcagggaaggacctcggaagaggtgacatttgaggaggaatgtgagggaggtgaggaggcaatctgcaggtgcctgnnnnnnnnnnnnnnnnnnnnnnnnnnnnnnnnnnnnnnnnnnnnnnnnnnnnnnnnnnnnnnnnnnnnnnnnnnnnnnnnnnnnnnnnnnnnnnnnnnnnnnnnnnnnnnnnncgaacaaggtgttaaactctgcttttggtaaaacgaggggtcagtagactatctaaaaactaggagagtgacaggctctgacagataaaggcttggatgtagatctccaactttcctgagttggtgtataactctgtctagtttccatggctgcggatgtagctcaccttagcatacacaaagccctaggtttgatcctcagcacctcataaagtagatgtagggatagactcaggaagtaaaaggcagaaagatcagaagctcaaagttgttggctacatggagaatttgaagccatcctggcctacaagagaccccaccaaaagagaaagaggggaaaaaagaaacatgaaatgattttcagttttgcctcagtccttctcagggcaggggtcaaaaaccattcttctacactaggacccaggcttccagactcacatcccacatacctgaccccactcccttcaccagctattcatctttctcactagaaatcaaaccccttgaacacaaatccaaccaagcctctttcatctgtatcttgccttacccgtgccttgtacagtgatcaagaaatacctgatcagtcaatagtcattcgctcagggcaaattagcacactagcaccttccttcccagtgacagtattttttagggagagatgacagaggaaaccagaatgtgtgtgtgtgcgtatacatatatatacatacatatacatacatatatatggcagacctgaaagaagacagatacctggcctggttcctaccctttggtgcctaaatgtttcctattgatgaactgaaatttcatatatttttatttttatatgtatagttattttatatattatatttatcaaatgaatgacatatatcaatgaggtagacatatctacacatatattatatgtgcatatatattctcactggcgcaggaaagggtaagtgccttagaagacaggaccagatcccagattcctaatcactggcccagaatcctgtctcctgtaggaagggggtgcacactgtttacaattctatgagactggccctggccctaagaatggcccactaaaggatgcaagacttcagcacaccaagaaagtgtcagagttagtgcaccagtacatatgcactgccaagagatggcctcagcacagaaacctaattgtaagaacatagggcaggactggagagatggctcagcggttatgagcactggctgctcttccagaggtcctgagttcaattctcagcaaccatatggtggctcacaaccatctgtaatgggattggatgccctattctggtgtatctgaagacagctacagtgtactcatataaataaaataaattaaaaaaaaaaaaagaagaagaagaacataggactacttgtgatggtgtgccagtttcccagcacacctgaggccaaaccaagtccttcacatcaaaagatccctgggtaaccagctgaaagtgcacatgctagcacatacagagagagagagagagagagagagagagagagagagagagagagagacagacagacagacagacagacagacagacagcacgtgtctgccctggcgttgtttgtacattgccttggcataagactgattctgtcttcagctgagaatagactcctcagtgacttgagagggtccaagccaagcaatgcagccataaaccacctcagacagcagaagtgtccatgtgttcagtccaccgacctcagacccatcgggaaatggagggcaacagagtactaaggccaggttccaccagcaggccaccaatcaggaaaccttacagagacgggagcaacagcaccaaggaggattctgcctcttttatacagaggaaggtatgtccaggcagtgcaggcagacagacaatcccagcatccgagagcctgaagctgggtgatttcccaaggctggcctgggaaatttaatgaatcatttgtctcaaaaaaataaatagccgggcatggtggcactcgcctttaatcccagcacttgggaggcagaggcaggcagatttctgagttcaaggccagcctggtctacaaagtgagttccaggacagccagggctatataagagagcgctgggatgtatctctgtggtagagggtttgccttacgctaggccctcagtccaatccccacctcaggggcagtgtgtactcaggcatccctttaagggatatggcttcatctaggatagacgagtgtctccttgagtcacaaggagcgttccccctgtttgggaaggaggcgcgaagcacctcagagggcttgatcagtgaggaaacatcaaaaccctgggagaacacaggcaaagccaggcctgctgcctgccagaacctcggctctctaagccattcagtgatggtaccacaggccctgtctccttcccccctagccatctgtgcagaggtgacagggattgtcacatgtgagcaatgagaaatggcctgagtatataaaccaaattcaggcaagttaagtgtgacagtacccaggcttgtcactttgtaaagccccctcggagcgctgtgggtccctggagatggggcagagccaaacagcccagactccatctgtccccctggcctttctcctgcagcttcctccctgaactgaagcaaaagattgccaggcaagctctctcctcggacctccataggcagcaaaggaaccaggcccattccccgggaccatggttggacttcagccctccgaagtgcctcccacaacggttgtgaagttcctgggggccggcactgcggcctgttttgcggacctcctcacttttcccctggacaccgccaaggtccgtctgcaggtgagtgcctttggccagtggttgtgactcacaaggaaggaggggctgcttctacccagcatcagcccgtgtttcagcgtgctcttcctcacggagctgaggaaggctatcccctacaccgcgtcggtccccaccaccatccctcgtgaccaaacaatccaaatgccttgacatgagacgacagggctctttactgcttagccctgctgtgtaaaccataaagtggaaaataaaggtaaggaagtaacggtgtgagcgtgactcagcctctaaccatctattataagacagggaaagcaaaccggcccctctggtgtgggtgggccgagatgccacaccgaataagtgctgctttgtgaaccgcagcacgctgcacactcagccgttttcaccctgatttgataatcatgcagttcctacaggcggcctgcacacacagccccgccctccccggccacccctcaactcctcaggctctgttcttgttccccagatccaaggggagaacccaggggctcagagcgtgcagtaccgcggtgtgctgggtaccatcctgactatggtgcgcacagagggtccccgcagcccctacagcggactggtcgctggcctgcaccgccagatgagttttgcctccattcgaattggcctctacgactctgtcaagcagttctacacccccaagggagcggaccgtgagtgccagcacccgaggacaccgagggacacccatggacacccaggggtgggaaacctggtagcagctggagtgtgggtcaaggatatggagttgtccaccgagcagagtaggggcggggcaagctgatgacagacactggtgagattctgacagtgtcagagactcctagttctctctgcctgccccagactccagcgtcgccatcaggattctggcaggctgcacgacaggagccatggcagtgacctgcgcccagcccacggatgtggtgaaggtccgatttcaagccatgatacgcctgggaactggaggagagaggaaatacagagggactatggatgcctacagaaccatcgccagggaggaaggagtcaggggcctgtggaaaggtaaccttggcactctagggcaaagcttttcctccctgagagctgagacaagcagtccagaaaggaggcattcccaaaacatggttcaacatcgtgagaacactccaaatacaatacaccacacactggccacaggacgtcaaatagtgtccaacttaccagtcatcacctgcataggccaccctgggagagagtcagaaatgaatgaacacggcgtccactcctcagggctttatttctgaggatctaaggcggctgatgtagcttatgccacaaggcaggggaccagaattcagacaggaggtgaaaggctgtgctggctccaaaaagtacctggtctcaaaggccaaggtgtggagatagaaggatggagggcccgtcagaggacagagaacagaaagagaggcaggaaggagcgcagctgtggagcccattgtggtaagacaagtgaggagactaccttggaggtgaagtctgtagagttccctatgcggttagcccttggcaaacgccagaatcccaccttcacttggaccaccattcccgtgatcccttgcaggagaaaaatggccttgcgatgtttaagggcaggactccttagtcacagagctgccagggcattccttcactggtgttccaccaacacgcagcctgtcctcttctcagtgaaccctgtctcctagggccctgccatgtgtctatcactgtcctgggtccccgcctccctcctcctcccctcctcctgggtctgagggaggcatggtgaaattttgacagagagtgcaaattatgctccacacgtagacgtctataccatggatgtctgcttgtgaagatgcagggggttattttatttttttaaagatttatttattaattttatgtgtatgagtacactgtagttgtcttcaggcacaccagaagagggcgtcagaacacattgcagatggttgtgagccaccatgtgattgctaggaattgaactcaggacatttggaagagcagtcagtgttcttcaccacagagccatctctccagccgtgatgaaaggggtttaaaagctgataactccagaaggaaaggtgggatctgtggctgaagtatggtcccctgactgagaccattgctataggacactgtacccaagtgggagggttgcattcattagtccccgctgccttcctaacagggacttggcccaacatcacaagaaatgccattgtcaactgtgctgagatggtgacctacgacatcatcaaggagaagttgctggagtctcacctgtttactggtgagaatgggtagggaaacaggggtgggtaccacccagaggcatcagggaccccgaaagtcagagagaagagcagtgcccagttcagggttgtaatgaggaaagaggcctaggctcgaagcagagccctgggttctagggccatcatcagactcaatgtaactgtgacagtcacttgcctactgacttcaatttcctcaaaaaggaaaaaaaaaaaaggtctgtggctttcttactcagagctgtggagttctagcttgccaagactaaccaagagcccagcctcgagcacttgctccagaaggtcaaggttacactggagacacagtgaggtcatctgcaccacacacacacacacacacacacacacacacacacacacacacacacacatatacacacacacacacatacacacacacacacatacacacacacacacacatacacacacacacacacacatacacacacacacacatacacacacacacacacacacacacacatacacacacatacatacacacacacacacatatacacacacacacacacacacatacacacacacacacacacttcatccctggaacccgttcttccctccccttctacagacaacttcccctgtcactttgtctctgcctttggagctggcttctgtgccacagtggtggcctccccggtggatgtggtaaagacccgatacatgaacgctcccctaggcaggtaccgcagccctctgcactgtatgctgaagatggtggctcaggagggacccacggccttctacaaagggtaagctgtcaccctctgcctccagcactctttccagaaaacctgggttcttgctcttcttgttttctcttcttcccttcttctctgcccttttctttctctctcactgagtctcatgaatttcaggctggcctagaactcacgatgtagccaagagtgaccttgacattcaatcctcctggctctgcctctgagtactgcattgtaggcacacaccatccccagtacttacaacagaaaccttactaagaaaaaagtaggcccaggctaggtaaaattattatttgtcttcaaaggttttgagcagaaggggctttccccacctgctgtcctgaccattcaccaccacactcacggctgcagagactccatagtcactacaccaacactcagggctcctgtgcctttgcatagaaggcctagactttaaaaacttaccattaccaccataatcattagtgtgtgtgtgtgtgtgtgtgtgtgtgtgtgtgtgtgtgtgtgtgtgtgtgtgtgagagagagagagagagagagagagagaggtgcctgggtaccttgctgcagcacatgtgggggatagaggacaactctgtggaattggttccctcccacacctttacctgggctccagaggtcaaattcagcccaagggcatcctcctgtgcagcagcaccttagcccactgggaagcctttccctcaacatctgcacaatctaactctagccacccttgcagactagtcccagtgccagctcctccctcacactgtcacacagaagttttccctccttccatgagcctcagcagtaccatttgatccacttatagagtaattccaccttttacaaaacgaagttcatcttcatgctagttcacaagccccttggagctgaggctagcagctcatgcaccttttatcatctgaaggtccaaccacagagcaagcactcagttgtgtgggttcctccttagcaccctgagagccaaggccctacactgagccttatgctaaggcactttatatatgtcgaacatcacaacagtcctcccacactgcacttcaaagtagtaacttgtccaagatcacaaaatggcagggccctggctccgaagccacagccactgcggtgctgtccgtccccgcgggaaggtctttgcttggctcccccgtcagtgcctttagcaggtattttctggtgcatggtgttgtattgaacccaacagacagacaggagagtttagcccaagtttgactagactccagagtttgaatacattgccacagtcctcatgaaggtttaagaacagccatgacaagttaggtatgacggctgaagcgggggtgttgccttgagttcaaagccagccagagctacatagtaaggccctatctcataccctccccacaaagaaaatgtcatagcatatggctgccatgcccaactgagtcctgcagcaaaaaaaaaaaaaaataccctccaggcgggaaaaagataaggagcagtccaaggtgaagataaagcaaggtgcttaaggggacaggagagggcctggcaccatcagagcatgcgtggtaacttgctgagtctggcaggaatcaagaggccggggcaagtagagagtagctgagatgagggaccagaggatgggctcctccgttcctctgagaagcacaggcgggtagacactctcgcccaaggtactaccagaggcccagagtgctttctggaggggagctggatccagtgccacactcctccaaccttgcccccatccacttcctgactcctagcctgggccttctctgggtgggaatctgaatgcaaaggagcccaaagcccatagcaagggatgagttgggccgggcagtgtgtctcaaccctacgatggtatttgccaacttcgtggtttgagttactcagcttctctggcctcagtgtctgacaaagaacctggcaggcagcagtgtgggcaacacagacgtcgagaatgaacctcctacacagtaaacttgcattaacaagttagctttctgtccttttctgatcccaacttctgcctaaatcccttcagtagagaggccaaagatgaaattgatctcagaaaagacttgtgacaagcagttttggccagcatggggacagcatggtgggtgtgcttgtgacccctaacctgctcctattcacgccgtagccgtttgtttctctcctcagatttgtgccctcctttctgcgtctgggagcttggaacgtgatgatgtttgtaacatatgagcaactgaagagggccttaatgaaagtccaggtactgcgggaatctccgttttgaacaaggcaagcaggctgcctggaacagaacaaagcgtctctgccctggggacacaggcccacacggtccagaaccctgcactgctgctgacacgagaaactgaactaaaagaggagagttttagtcctccgtgtttcgtcctaaaacacctctgttttgcactgacctgatgggaaataaattatattaatttttaaaccccttccggttggatgcctaacatttaggcaagagacaacaaagaaaaccagagtcaactcccttgaaatgtaggaataaaggatgcataataaacaggaaaggcacaggttttgagaagatcagcccacagtgttgtccttgaatcaaacaaaatggtcggaggaacccttcggcttcagcacaaagaggtgactacagccttctggtcaccagatgactccgcccctctgtaatgagtctgccaagtagactctatcaagattctggggaaaggagaaagaacacattgatactgcacaaatgagtggtgctgggcccaccgaggacactggaggatggagcgtgatctgggataacagtccttctctgtctgcctcatcagggtgttgggaagatagaaagcgaagcagacatggaagcacttcctaacaaggcctgtcatcgtcatcatctacaaatgtaagcctgaggacaatgttttaggagagattctgtccagagaagtagtttgaggaaaatgcagtttgtagtggtaaagccatgcacacctggactgcatggtaaggaccaggggtgacggaagccatggggatccggtgcctggtaacatcaaagggctgtggggggggggggggggcactgcctgtccatcagttcaaagcagcaggactcaaaatctttagggaattgttaggactggtaaaaaaatttccaccttagggcaaaaacgaaaacagctgctcttctgccttctctctcggaggttttctcatctcagggtcctacctgccaggctcctgaccagctccacctgcccacacttcctcctgctctcgctgcctttggctgcagagcctttgctcctcctgttaagccttcagtcttccatctgcaaaagggagggcaaagcacaggaccaacttccaagcttaaaaatgcacatctgacaacaaaatggctcagtggggtccattcatgggacccacgtggtggaaggacagaatggactcttgcaaattgtcctctgacctccatttgagcgccctatacatgtgactgtacatatgtacaaacacgataaagatggaaacacatgtaaaaacataaaaataaaaagttgtactggatgtggtggtttgaatgagatgttcctcgtgtctcgggcatttgaagacttgctccccagttgttggcggctgtttggggaggcttagaagatgtggccttttgggaagaagtgtgtcattgaggactggcttggagagcctaaagatccgaggcactcccagtttctctggtttttcattttgaggtgtgaggtcttattggctgcaccagtctccatgcctgtctgttgcccggcctcctcaccatgatggacttttatctctctgtacttgtaagccccaaataaaccttccatctgtgagttgtcttggtcatggtctttcaccacaacaacagaaaagtaactaagacagtgtgtatctttccttacactgccatacatgtgacatgcagtgtcttttcctgcttctaaggaggaggctctgatgaaagtcagaagggctctaggctggagatgtaagttgtaagatgtaagtcatctggcagagagcgtgccccgcacatgcagagcccagagcatgatgctcaacaccctgtaagccaggcatagtaatgctcacctgggatcccagcacacaggaggtagagaaagatgggccaggagtttttggtccagcctaggctaaatagtaagtgcaaggtcagcttgagacacttgagagcctgtctcaaaaagaaagaagaagaaggggaagaggaggaggaggaggaagagatggaggagaaggaagaggaggaaggagagaagggatctggtctctaagcctatcccacctctctttgctgcatctagccactgaaagcccttgcttctcttgtcctcctgtcacactgttagtcctgccaggcgagaataagattgttgccataattttgagccagatttgaagcaaaatttaattaaatcctggccagaatgatggactctgaccaagtccattcctgggttctcagaaaatggcaaccagtgacattttgcagaggctttaaagggcaaacccatcaggccatcacttgccccaccaggtccaatcaggggcaagcatgcgtatttcctgcctacatacctccctcctccatgtgatccagcatatccagtgggtgcagttgggtgtaacacatttgtgtaggggagcaaaaacacaactaatagcctcgagcatttcaggaagtgtctgtcctcagggagaaggcttacaagttacaggcagttttgtttcacagatctcataggcacagtaattaaaacttaagacttaactgtagctgtcacaacacctgccccaccagcatgtgaaggttgatcaaaaaaacctcttgggggttgccagagagatggctccgcagttaagaacattcgctgctcttgcagaggaccagaatttgattcccagaacccacatggcaggcagctcacaaacacctgtaactccaggtcaaagggacctgaccctttcttctgtcttctttgagcactgcttacatgtgatgcacacacacacacacacacacacacatgcaggcacacacacatgcatacacataaaattcaaataaataaatctaaaacaaaaaacaaaaccccacaggaggagcttagcaatgtcacccacaggagttgcttagcacggacatttcttccctccttgcctgggctcagcatcctcctgaattccaactgacgcttgaggtcgtcttcccatacaaaatagatagttagacaaaagcaaaataaattatcttggtttaatgtccctcaaggccttccacccaaaaacctgtatttagaagatcgtctttctttggacttcaccaacatatgcaagtcactcaaactcctggtctctcttcccaaagttcctggggccagaaactatcctctatattaatttctatgttattagaaggggagactatgcagagggagaagaggaggaggtgggacgaacggggagcaagaggaaaaaagaagatctgggaggttggggtgttctttgtttagtttttgacacagtctgatgtagtccagactggcctgaattgactatgtagcagatgatgtccttgaactactgatcttcctgcctctgcccctccaactactgagattgtcactgagcctgcctctgaaggatttggatggaggaggatgctggcagttggggggttagcctttcagagaagggaagactgatgaattgtccgagggcccctgggcaggacgccaggcttctctcccgagttcttcagcttgttgttttgttctcagaatcaaactcggggctctgtgctaggcaagcatgctactgtctgagctcgaccctctgctcacgtaaaagagcaagttgaagactctgttcccttgcaatactggcttcagcttctgcctcggggagctgatgtgaactcacccacacaggcccacccagggagttggattcctgagctctgggacccagcagccctcatgtgactatgctcagtccagccatcccgaagaaatccaggggctggagagccagcttagcagtcaggacacgcagtgctcctgcagggattctgagttcagttcccaaaatcctcgtcaggtggcaagactgcctgtgattccggatatagagaatccatatccagtgcttctggccgccactcacatgcacatgacatgtcccctccccacaatacacactttaaaataaataaaataaaataaaagaaatctgattttgctcaaaactcttctagtatatcaagcagaaataaactagtttgaacctaaattcaactacaataccgacacagtagagcattgaagaccattggcatttttctttcatttcttcccatttgtttgtttgttctgtgtctttctaagtcctgaaacttgctatatagaccaatacttctacctagaccaatcttatacctcctaccctcaccatcccatgaatgcaggtgcatgaaccaggtgcacacatgcacacacacatacacacacacacacacacacacacacacacacacacacacacacgagaaactaggatccacatataagaaagaatatgcaatatttctttctgttgtgtatatatgccacagggcatttgaggatgggtcagggtctcccagattttaaaagcagtcaagattgccatgacaacatccggggaatcctaagaggagggattgacagtgcaactgacagctcctatggtctccacaagaatggttggaccacagcagttgtgggtcccccacaaaacactccttgacacaccaccaccacctgcttaacttcaggagtaacagcaacaaggctcacgtgtctaccagacttgggaacagcagtagctcttccaactgggctttgatctctgcctaccttgatgaaagcacctgctttgctccaatgccaccaccactatggggccaacctaggtgaagagttgagcagctactgaccaagtagctgaatgtctgcacccaacagtttcagccattagaagaagagaaccatattggtggctcaactacagctcttgcttcttagcaccaggcaaacctgggctacataaaactctgtttcacaaagaagtacggggtcctggggagtcagtaaaatgctttgtggcaaaagcatggcgcactgagctcagatccccagtaccctagcaactacataatctcagtgctgaggaggcagaaacaggagggtgcctgggctatgctggacactgcagctagtcaaatcaagttccgtgagaccctgctccaaaactaagacaggcaaacgtacacaccaaacatacacattgctcacggcttgcttcatggctctttcacatctgaacagggctccgctgtgtagctttatgcgggaatcacatctcacctgtttattccagtgcccaaagagtttaaacttgagaaactagcagacgtagtttaaggttggcatcattatttaccatatgtttcattattagctgttaatgcatatgtttttatctattatcctgggcatcatgatttgatatgctcacagtgatgagtcacaggatggaagcaaacctctttcttttcttactgtgtaggccctggctgtcctgtaactcactatgtagaccaggccacacctcctaatgcatcccaaataccaactggggaccaactattcaaacacactagcctccaggaccattctcatccaaacccccacaaccagaatgaagatttaagctcagctctttatgtggaaaagtcttactaaagtatcaatgcagtaaatgcatacggatgagatgctggacctactgcggagagctgcaaactgaaccattggcttttttttttttttttttttttgacagtgttaatacaaattcatgtggtttcagctcgctctgctggccagccagctctcgtcccctgtactgggcttataagcacaccggtgacccacgcctagctatgtatacaggcactgggaactctaacttggattctcattatggcaaagtaagctctctggcccacaaagccatcactctagcacctctctgcatttacatttatccaaagtctaacaattcatttgctatttgaattacatttgctacttctccatttttttttaaatcaagagttttatcaatataaatctacaaacaatacagttcagtggcagcacatacctttcatgtcagcactcgggaggaagaagcaggtggatttctgtgagttcaaggtttcagcctggtctacagagggagttccaggacggccagagctgtcacacagagaaaccctgtctcagaaaataataattacaattattattatttcttttaaatattacattatattaaataatttataagttatttttcagtagtggtatatgcagtgtagtatactgaatagagttttagccatccccataataattcacacattcatctatgagaaaatgcatcttttaattcttttttttagatttatttattttatatatgtgagtatactgctactctcttctgacacaccagaagagggcatcaaatcccattacagatgattgtggaaaagcagtcagtgctcttaaccattgagctgtctctagccccacatcttttaattcttatttgaccaatttttaaaaaagatttatttattttatgtatatgagtacagtgtagctgtacagatggttgtgagctatcacatggttgctgggaactgaactcaggacctctgcttactccggctccactcgctccgagtccaaaaatttatttataactatatataagtacactgtagaaacaccagaagagggtgtcagctctcattctggatggttgtgagccaccatgtggttgctgggatttgaactcaggaccttcgaaagagcaatcagtgctcttacccacggagccatctcaccagccccttcaccaattttttaaaagagtggtttattgggtgcattgcgagtgagcaatgggcagagtagagtactgtcagctttgtaagatcaccaccagctatgttgggatcactatccacccaccagctatggggttttgccacttgatagtgaaggtttattttatctagtcttgtttaaagtaagccagctggctaataaagccacactgggtgttcaggatcctttcctgggtacgtttttaagcacaaaacccatgttttagggtgacatacttcagctaacaaaacaagttagccagtagtggaaccacagaagccaaaaggtaaggtcagtacatttagagatttttccagaacgatggacattgatggttctgtctgtgtgctgagttttacagttgaatggtacttccatcatggagtcagatgtgctaaggtctggggtcctattaaggtctggggcctctcacactttcttgttctggaaaataatggttaatgatgacctggaaagattatcgttaggtgcctgcgccgcctacctgatgcatagtaattgctttccacaaacgttcacccagccccctcctcccactgcactttccacagcagcccaaacctacttgagcttctattatagtatattcggacccctggtccccggcttcctgctcttgggcgcctaattcctaggcaagcaaaaagggttccacgccctgatctaatctcttaaaactccggggctaaggaggataaaaacaaaagaagaaaccgacggagagtaccaaagcttgaacacaaattgaggcaaattgagacctgcttcctacccccacaatgcacgttagtccccgacacagggcccaagtattgctttcacgtcccccactcctacgtggccattatctcgctgaggtcccgtccacctgctgagtttgtcctcgctgggctggagtgcaacaggcgaggctctgccctgccctcttccttgcggggcgccagcctggctgcactcggtgcagaggggaggggaggccaggtgttctcgccccactccagccgttaggtgccagtgtcccccgggacctgactgggagcggcagaaggcgggaacgccagccttgccccgtcaccacacccgggtttgttccggtccccgaagcccgcgctccgcccggtccccaggtgccttgcagggagggggaggggagacttgaaggggtaaggggtcgcgatccagagcagctggccagtcagtctgcctgtcctcacaaagagattgtctgccccgggaatagaaggggaagatctgagactggagcctctggggggacctaggggtttcaggcaaccacagatggaaacgcctcctcaccccggggcgtgggccgccctggctccgcctcgtcacgccacgccccgaccacgccctctagacttaagttctgtaggcgcgggttcgcagctactgtcagttccgccctcggtgtcgtcgggtcgccagcttcctgggcagccaccactctcccgccatcggacacagccttctgcactcctgtgttctcctgcggtccggtgagcgtgccccatcccttcgctggccgcacctgctctctcccactccatctgtcttttctctttcttttcccttccctggagtcctaatttgccctctctaggtttctttcctcctaaatacgccctttgttatttgcctctgacgtccagttggtcgaaggttaaaaccttcatctctttacttcttcccctcagcctcgatgttcccagcctgacccgggcggggtgggggaaggggctttcacgtcagcgaagatcagaatgactcaccaggaggctctgggccatgtgccctaaagcctgttcttgtatcaagggttgtttgtgcctggaggagccttggagtttgtttggcctttgttacactatcttatgtggctgcctgccggaggtggaagtagggacacagggagactggacctgccttatcctgattcaacacaaatagatataatgctccactcaacagttttgtgactgtatcccccaggcacagcacagctgcctgtctacataactgtctgagaaacaaatttggaagtgagccaacgtgtgggagtaaagactcctgagttcttcccctagaccctggctgctctgagtgagaactgagccttgcatgggtccctcccagcaaggctgtctgaaaggacttgtgtgacagatgacccttccttgcagggcggtggtcctgcaaagacaatcttcctttctaaacttggcttccttcctctcccccacaggacacaatagtatgaactttaagtgtttcgtctcccagccattttctatggaaaatcgaggggatcgggccatggtagccaccggcagctttgaagaacgagacacctttagagaagcttgaccttggaggcctcagcctgagacctcaaagcagcctccaggtaaggagtccgggctaaggaagccttctctcaggcctggggcctagggctgctcagcaagacaataaaaattcccctcctcccaccctgatgagagcctcttcacagctcagcaatccccttcttcatccctgatcaccttctggcccgtaaagatggcggaccccagtgtataaggggagaacctgagtggggtggggactggttccaggtggccttggcagtcaacagcagagctggggcagaagcttatggtgtgtgtgtgtgtgtgtgtgtgttatggtgtgtgtgtatgtggtgtgtatgtgtgctcacgtgtgtgctcacgtgtgcatgtgtgtgcatgcacgtttatgtaaaggcacacgggtgctgtggcacgcacatgaaggtcagaagacaactcaggcgtcctaccatctgtgtcccaatggcaagcacccttacccactgagccatcttgctggtctgagcttccattcttttttttttttttcttttgtcctagcttttgatgtccctgtgaatgagattagaaattgggtgttgtttttttattgcctccagtggttgtccggtcctataaagtggattctgtttttgttggttcattttgggtcgggatctcaggacctctcttcggctgccctggagctttagatgcagaccgtgcctgacaggattatctttctaggcctgcgttttagtcatagaaacctttagtacaggtgatctttgcctctggtcccaaccctcgaggacccgacctttggcaaaccctacgctgcattcacaatggcagctgagccacatgtttttgatctggcagcaactggcagctgagccacatgtttttgatctggcagcaactgagacctcgtctttctggacttcacaacattctaccacttagctcatgattagacaggcctgcatcagactcatgcactaatacctacagaggaggtctgcccagagcatctcagaactgtttaattggtcagaaagggcttccattgtgaagggccttatctgagcccgagactgagaaaaaccgggagacatgaggcaccgcggggctgggcagacagtgagcctgtggacatggttctgagctctcccgtttaacggggacccagggagggcaggtgccttccaggctgctgtcaggatttctcagtggagtcggagtggggagcactacctgggagaagactcccccgtgaggagtcagggagcaccttcacctagacattgactcctattctccctgagctccaggggcccagactcctgactgaagtcaggcttttcctagaggcgcccttgagcctgttgtcatggtgagtccctctgatgtccctgtttgtcccagcctgggtgagctgttttgtttccatggctgtctgtgttcacaggtgactaccgccacatcctccctccacccgctagggctttcctcctctgccccagcaacacaggcagccaatcaagatgggctcagagcgattgctccaatgaaagcggagaagtgaaactagggaagaagaagaagcagttcaccctccccacccccaccccaccccacccccgctgggtgctgggctcacttcctcctaggccttagaggagggtggtgttccagctcaaagaacaaaatggaccttttggtttcctgtatcttttctgcatagctgtgagctgtgcctcccatcgaaccacagataactgagcatttcccgacactggaggaaaacaaacaggcaacctggctggccaggtgccttgcccagtgcctggccatgagcctgcaggggtaggcagcgtccatctgtaaacctgaatggggcccgagctgggtgggggctgctaggatggaattcatcaaggtgtctcatgtctcccttcataattacataccagacaggacctctcctgtttaggatcccagagcaaaagactgaggggtttgcctgccaggtcctgctctgatagtcttgtcctagtcagccgttgggataagtcccacagatcaggaacggggccttcctctgcagtctc

SEQ ID NO: 1975 - DNA, 1960 bp, Mus musculus
agtgaatggtgaggcccggccgtcagatcctgctgctacctaatggagtggagccttagggtggccctgcactacccaaccttggctagacgcacagcttcctccctgaactgaagcaaaagattgccaggcaagctctctcctcggacctccataggcagcaaaggaaccaggcccattccccgggaccatggttggacttcagccctccgaagtgcctcccacaacggttgtgaagttcctgggggccggcactgcggcctgttttgcggacctcctcacttttcccctggacaccgccaaggtccgtctgcagatccaaggggagaacccaggggctcagagcgtgcagtaccgcggtgtgctgggtaccatcctgactatggtgcgcacagagggtccccgcagcccctacagcggactggtcgctggcctgcaccgccagatgagttttgcctccattcgaattggcctctacgactctgtcaagcagttctacacccccaagggagcggaccatttgtgccctcctttctgcgtctgggagcttggaacgtgatgatgtttgtaacatatgagcaactgaagagggccttaatgaaagtccaggtactgcgggaatctccgttttgaacaaggcaagcaggctgcctggaacagaacaaagcgtctctgccctggggacacaggcccacacggtccagaaccctgcactgctgctgacacgagaaactgaactaaaagaggagagttttagtcctccgtgtttcgtcctaaaacacctctgttttgcactgacctgatgggaaataaattatattaatttttaaaccccttccggttggatgcctaacatttaggcaagagacaacaaagaaaaccagagtcaactcccttgaaatgtaggaataaaggatgcataataaacaggaaaggcacaggttttgagaagatcagcccacagtgttgtccttgaatcaaacaaaatggtcggaggaacccttcggcttcagcacaaagaggtgactacagccttctggtcaccagatgactccgcccctctgtaatgagtctgccaagtagactctatcaagattctggggaaaggagaaagaacacattgatactgcacaaatgagtggtgctgggcccaccgaggacactggaggatggagcgtgatctgggataacagtccttctctgtctgcctcatcagggtgttgggaagatagaaagcgaagcagacatggaagcacttcctaacaaggcctgtcatcgtcatcatctacaaatgtaagcctgaggacaatgttttaggagagattctgtccagagaagtagtttgaggaaaatgcagtttgtagtggtaaagccatgcacacctggactgcatggtaaggaccaggggtgacggaagccatggggatccggtgcctggtaacatcaaagggctgtggggggggggggggggcactgcctgtccatcagttcaaagcagcaggactcaaaatctttagggaattgttaggactggtaaaaaaatttccaccttagggcaaaaacgaaaacagctgctcttctgccttctctctcggaggttttctcatctcagggtcctacctgccaggctcctgaccagctccacctgcccacacttcctcctgctctcgctgcctttggctgcagagcctttgctcctcctgttaagccttcagtcttccatctgcaaaagggagggcaaagcacaggaccaacttccaagcttaaaaatgcacatctgacaacaaaatggctcagtggggtccattcatgggacccacgtggtggaaggacagaatggactcttgcaaattgtcctctgacctccatttgagcgccctatacatgtgactgtacatatgtacaaacacgataaagatggaaacacatgtaaaaacataaaaataaaaagttgtactgg

SEQ ID NO: 1976 - protein, 120 aa, Mus musculus
MVGLQPSEVPPTTVVKFLGAGTAACFADLLTFPLDTAKVRLQIQGENPGAQSVQYRGVLGTILTMVRTEGPRSPYSGLVAGLHRQMSFASIRIGDSVKQFYTPKGADHLCPPFCVWELGT

SEQ ID NO: 1977 - DNA, 2451 bp, Mus musculus
agacaacagtgaatggtgaggcccggccgtcagatcctgctgctacctaatggagtggagccttagggtggccctgcactacccaaccttggctagacgcacagcttcctccctgaactgaagcaaaagattgccaggcaagctctctcctcggacctccataggcagcaaaggaaccaggcccattccccgggaccatggttggacttcagccctccgaagtgcctcccacaacggttgtgaagttcctgggggccggcactgcggcctgttttgcggacctcctcacttttcccctggacaccgccaaggtccgtctgcagatccaaggggagaacccaggggctcagagcgtgcagtaccgcggtgtgctgggtaccatcctgactatggtgcgcacagagggtccccgcagcccctacagcggactggtcgctggcctgcaccgccagatgagttttgcctccattcgaattggcctctacgactctgtcaagcagttctacacccccaagggagcggaccactccagcgtcgccatcaggattctggcaggctgcacgacaggagccatggcagtgacctgcgcccagcccacggatgtggtgaaggtccgatttcaagccatgatacgcctgggaactggaggagagaggaaatacagagggactatggatgcctacagaaccatcgccagggaggaaggagtcaggggcctgtggaaagggacttggcccaacatcacaagaaatgccattgtcaactgtgctgagatggtgacctacgacatcatcaaggagaagttgctggagtctcacctgtttactgacaacttcccctgtcactttgtctctgcctttggagctggcttctgtgccacagtggtggcctccccggtggatgtggtaaagacccgatacatgaacgctcccctaggcaggtaccgcagccctctgcactgtatgctgaagatggtggctcaggagggacccacggccttctacaaaggatttgtgccctcctttctgcgtctgggagcttggaacgtgatgatgtttgtaacatatgagcaactgaagagggccttaatgaaagtccaggtactgcgggaatctccgttttgaacaaggcaagcaggctgcctggaacagaacaaagcgtctctgccctggggacacaggcccacacggtccagaaccctgcactgctgctgacacgagaaactgaactaaaagaggagagttttagtcctccgtgtttcgtcctaaaacacctctgttttgcactgacctgatgggaaataaattatattaatttttaaaccccttccggttggatgcctaacatttaggcaagagacaacaaagaaaaccagagtcaactcccttgaaatgtaggaataaaggatgcataataaacaggaaaggcacaggttttgagaagatcagcccacagtgttgtccttgaatcaaacaaaatggtcggaggaacccttcggcttcagcacaaagaggtgactacagccttctggtcaccagatgactccgcccctctgtaatgagtctgccaagtagactctatcaagattctggggaaaggagaaagaacacattgatactgcacaaatgagtggtgctgggcccaccgaggacactggaggatggagcgtgatctgggataacagtccttctctgtctgcctcatcagggtgttgggaagatagaaagcgaagcagacatggaagcacttcctaacaaggcctgtcatcgtcatcatctacaaatgtaagcctgaggacaatgttttaggagagattctgtccagagaagtagtttgaggaaaatgcagtttgtagtggtaaagccatgcacacctggactgcatggtaaggaccaggggtgacggaagccatggggatccggtgcctggtaacatcaaagggctgtggggggggggggggggcactgcctgtccatcagttcaaagcagcaggactcaaaatctttagggaattgttaggactggtaaaaaaatttccaccttagggcaaaaacgaaaacagctgctcttctgccttctctctcggaggttttctcatctcagggtcctacctgccaggctcctgaccagctccacctgcccacacttcctcctgctctcgctgcctttggctgcagagcctttgctcctcctgttaagccttcagtcttccatctgcaaaagggagggcaaagcacaggaccaacttccaagcttaaaaatgcacatctgacaacaaaatggctcagtggggtccattcatgggacccacgtggtggaaggacagaatggactcttgcaaattgtcctctgacctccatttgagcgccctatacatgtgactgtacatatgtacaaacacgataaagatggaaacacatgtaaaaacataaaaataaaaagttgtactgg

SEQ ID NO: 1978 - protein, 304 aa, Mus musculus
MVGLQPSEVPPTTVVKFLGAGTAACFADLLTFPLDTAKVRLQIQGENPGAQSVQYRGVLGTILTMVRTEGPRSPYSGLVAGLHRQMSFASIRIGDSVKQFYTPKGADHSSVAIRILAGCTTGAMAVTCAQPTDVVKVRFQAMIRLGTGGERKYRGTMDAYRTIAREEGVRGLWKGTWPNITRNAIVNCAEMVTYDIIKEKLLESHLFTDNFPCHFVSAFGAGFCATVVDVDVVKTRYMNAPLGRYRSPLHCMLKMVAQEGPTAFYKGFVPSFLRLGAWNVMMFVTYEQLKRALMKVQVLRESPF

SEQ ID NO: 1979 - DNA, 559 bp, Mus musculus
gagacaacagtgaatggtgaggcccggccgtcagatcctgctgctacctaatggagtggagccttagggtggccctgcactacccaaccttggctagacgcacagcttcctccctgaactgaagcaaaagattgccaggcaagctctctcctcggacctccataggcagcaaaggaaccaggcccattccccgggaccatggttggacttcagccctccgaagtgcctcccacaacggttgtgaagttcctgggggccggcactgcggcctgttttgcggacctcctcacttttcccctggacaccgccaaggtccgtctgcaggtgagtgcctttggccagtggttgtgactcacaaggaaggaggggctgcttctacccagcatcagcccgtgtttcagcgtgctcttcctcacggagctgaggaaggctatcccctacaccgcgtcggtccccaccaccatccctcgtgaccaaacaatccaaatgccttgacatgagacgacagggctctttactgcttagccctgctgtgtaaaccataaagtggaaaataaag

SEQ ID NO: 1980 - protein, 50 aa, Mus musculus
MVGLQPSEVPPTTVVKFLGAGTAACFADLLTFPLDTAKVRLQVSAFGQWL

SEQ ID NO: 1981 - DNA, 28816 bp, Homo sapiens
  misc_feature (1)...(28816): n = A, C, G or T/U
atcttttgaaccaggccctgtttaaaaaaacaaacaaaaaaaagggttgaggagtcttgccctagtcaggccccttcgtagcatagactaaggcccagggtgagggagtgacgtaggccctgtagaatgggcctgtccgggaaggcttcttggagtaaggagagggtggcatcaggtggggtgtggcacggagggagcatatcggtaataagaaccacatgaccagacctctaatttaggcatggagggtgagctcagagcatgagaccagagccatgcggcagccgggctgagcaggtcagatttgggatttgcctctcagggctgggcctctagtctaagtgccttgtcctcacttcccctctgctcctacttgtggctgctgagtttgctgctctctgtagtatcaaggaagttctagtccaggccagactctgagagccaccccagggaaaggcagccagccaaaggggtgaaagttgagcaaggcaggcagctatattgagccctcactcggcctctgatgcagcaatccattggcaggtccacctagccagccagacccaggcggctgtttactttcagttttcagctcctgagtcaatgtttatgtcacttaaaggggctactgtggaaaagaacagaactttagccctcatcccagaccagaggctcactgttaccaaagaaggggggaagacagtggggcggggagaacttgcctggtctagcactgcttacctcagtacaggagatcctgtaccccagctctactcaggacttttggggcctgaccctttgccagggatggggtctgagaacagcaaggcttcattttgctcttgggtctgcagctggtattggctctagctccatcttagcctctgtgttttgtaagatattatacctggtcagaacctcggccatatctgaattttatttgaacccagcatagacctggataagaagaccaaacagaagttcttagatccacttgacagtgaagctaagacccagagagacccagagtgagaaagcatcttggtcttgagtgagtgagacagttaggttgggccacagaccagtgtcccttccactgcactccattgcctgtcctctgagaaagtccctcagatacttggaagcaggggtaagtgggggcacctgtacccaccaacccctgggagcatgtggcctgttcgaggaatccatctgggggctggagtgaagagaacctagaacacagtggctgggatcagatcatgttccaggccaaagaagagggccaggccctcctgagagagcttttggagaagagtctgcatcacagggagcagaccagagaaggagccaagggccgggataagcccgtggtttatagagtgcctcctcttgcattatctgctcatcctgatcccattcagatgcacaaaccaaggcccaaagagaaggtgggttgcccaacaccgcttggctaagaagtggtagagccaggactagaaccagctccttatgcagggttagccactcaatttgaagagcctcaggaagccccacattttctttccaaaccactccttacaccttccacgtgctccattttctccccagcaaagtctgatctttagcattgaaggctcttttaagacacatctattatcagagaggcctatcatgttcatgacctgggtgtccaggtactcagaaaggaacaggtcccatgtatggatgaggtaggatttaatggggcagcctgaaagcccctggcctactgccgtgcttgacacccggtccacaggaaagccagttctgtccttcagcctagtacagtcgtcaaataccccatccctgttccctgggaaggcccttacagatcagctcgctgaagtccaagaagaataagatcaaattccccccagacattctggaacttcctcaaccagcatcaacccctcttctagtaataggtttgtcttggctgttctccatacctgcagctcagcctatccacccccaccactttcctagcaaagaaaattccttcctcacaaaacctgcacctccacgtggcataccctctctcttcattgtctgttcacattccaccttcatgtttaagttcccgctccagggacttcaccccatggatgacacccgctgtctagactccaaggcacctgcagcccctccagctacgacgatcctgcttccatgtgtgttcctcctgcctccccaggaaggttgatgcctcccacaaagcccatgttctgctgacaactttcttgtgccctcaggtctacagccagaagtgtaggagtatttcagaggaatggatgatacatttgagggtatccctgctctggccaatttcgcctctggccaaccccaccagggttgtgtgttagggtagcagtcctgatgaaggaagaatcttcactactagtcaagatggtttctaaaccctattgaggtcaacaaaagcaaaatgctgctgagtgtgagttctctgtccttccacaccccgcccctgccctgtacacagagccaagccctgtccttgtccttgttctgattcctgggcctgggccttgcagataaggccccctaggtcattgggttagggtatcagtgctggaaggttggtgccacacacgattcagctccagggcagatatggcccagccagtaggtgtaggtctgtgctcatgctgttccctctaatgaaagacctcacctgacagccagcttctgttgagaccttgcccatcttggagcccacctcctgtgaagccgccccagactttctcagctgttactaattgctattttctcagtgctcacaagctctaagcttcatctctgtgattgttgggtagctcattgtctgtcttctctctagctgagcagccctatgacaacaggaaccacgtctgcctgttgtccataagagttgatcaagttgattagatcttaggctcctgaaaagtttgatgagtcaccaacagaggtgttttgttttgagacagggtcttcctctgtcacccaggttggagtgcagtagcatgatcatggcttactgcagccttgaattcttgggctcaagcgatcctcccaccacagcctcctgagtagctgggaccacaggtgtgcaccactacaccctgctaattttttttttcctttttttttttttttgagacagggtttccctatgttgaccaagctggtcacaaactcctagactcatgcgatccccctgccttggcctcccaaagtgctggggttacagacgtgagctacccagcccaacagaggtctttttatggtcatttcatgaactgaggtagttggcccttccagccatggagaacaagactcatctaagtctctctaaaacagagaagacatctcttctagaaaatggggaaacaaatgcctggttttaggatttgagatagaatactatgctctaaggcctgttttcccatctggctcataaaacaaacatctccctacttccccttcagagtagcagagaaagaaatggaaggtaagatacaactgatgacccagaaaatctacctgcagtacagctgggggtcaggaatgggacttgtgtcatcctaaatcccaaatagctcaggaaacagccatcttggatcttgggagtagagaaagatatacacaagcttaaagtgctacatagagcctgagagagtttaacttaactaaagacctggcatatggtaggacaacaaccactggttctagaatgaatgaatgagaagcttactacaaagagtctcctccccacccaatttaaacctgtggttaccctggcctggtcccacccacactggtctagcagctcccaggctcctgtcttggaactggcctcgctgggatcccaagcctcagacccaggccgtgccctgcaggagcacccagtgtggaagtgggagagcaacaggcagaggctggccactggcctcccctggtctgaggcatcatgcagtgcaggtgcttcctgtattttggaaggaagaactgcaaacaccagcaaaaagtgggtttccttcttcccttctagcctagacctgcctagaaggcagggagatagatcttctagtctctgctgtgcagcccagccctagtatcactttgctcttggttataaggaaaggctgcctgtgggctcatagcactgagagcttcccagattgtagacattcccttggcacttagaattctagactggcagggaccctcaaggtttcccatccacacttctatttcatgggtgggaaactgacatccaggcagtagatcagggatgcctgactccactccccttatctcattctggcaattctaattctttaggcagatctctctgcctccagggcttaactctgagctgagaaagcctaaaacggagttctgtttatttctgcgcccctctcaagtaggtattaaaaaagattgaagacatgaaagaaagaataactgaatgttactgatgccagaagcaactctcgctgggcgcaactctcgctgggcgcaactctcgctgggcctcagtttctcatgagcagaactgcagggggtaggtggtcccagtctctagggtctccaccaagcttcttctcagtgcccaggaagtggtacagtgtgctctcaatagtccttcagcttatgacagcctcagctcatgggacttgatgacagggaagagcaagctgcatgccatgaagtcagccaggtttgcctgtggaggctgctcccatctcctttcagaactgccccctcccctatcaggcccccacttcttccccagggccttgctctcagccagctgtctgggatggctttcctgtatagctttgagctccttcagcacaggagcctgacatggagtaagaaaaaagaaagaaaaatgagttagaggagtccagaggaccatgataccatagcccacaggtttaagtaccttaaaggcggaattagtgatgccctgtcagccagagtcagagagatcaaagtttggtagccaagcagtaggtaggtgctttatgtcacctggcaactccaggagctccaaagggccaaacagagagtgtattattcaccgccatctccctgagagttggatatgttcccagcatcacacatgggactaaacccagaggacaaatgacttgtctaaagccatgcaacaggagaagggatgaggattcaaacctatcctggaggtgacgctgcctccttctccagaggcacagaaagagtcagggctggggttcacgtcccagctctgctactcagagctgtgggaccttgagtttattccacctgaatgtagtttccttatccacgacatggggagaatgatataccccccatatggggttgaggtaagggtcaagcaagataaggtacgtaaagcgctttgtaaaccaggcagctctacataaatattaaccaaaggaccaaaagatgagagaaaccagcgtcatccattggtggtgccatatcctcagtggtaacctagctgacttcttcctctccaggacaagagcgaagccaccaggggagctctctcccaaaggccttgtcgccccagacctaactcgctccccctcaacctgcctgaggaagaaactctcaggattgcacggatattttcttctcagtactcccagaaagactgacgcagcctgaggggctggggggaaggagacacctgcccaccctccgtcagctttgtccagcttgcaggaggcaccaggtctggctccttcagggctgtcacagtcctgaaaccaccacttgcctaggccacggatgcctcaagagacccggtcagcccagactggaggagtgccccaaaccagtccagtgtccacttgccagaatttcagctccttttttctgtggtgaggcaaaggctagaaataaaatggaatccgcgcccaagtgggacccaagcaggcatctttcggtggagaaacgccccccagtgtccttgacacagctgactgctggcatgagcccaccctctgcctgaagatgcaggaccatttttgccttaaaagttggggaggagggacatgtagattgtgtgcattgtgcatagtcaaggaaatcctagggccacctccagttcatttgtgtgggaacaaggatattttatagatacaaattatttttatgctgtgttgaattaatcaattaggagaggaaggggaaatcacttccttcaaactttttatctgattgtctaaaattctaaccatgcttttaacttattatttttacccagctctgaaggtcattgttcttgcctgtgtttgaataaaatcatattggtgtttgtaatctgtgcacaagtgtttcgctggagtggggatgctaggaattcgtgtgtgccctaactgccagagagaaagattaacaaccatacaccccacgcagacgaagatcaatcaccatgagacttctggctcctccagaatcaggttggtccagatgacagtgacacccagtatttcctttgctgatgcttgaaatccatcagacaaagccccgtggggaggacaagaaaagggccatggatgggtgcagtggctcacacctgtaatccaaacactttgggaagccgaggcaggcagatcacctgaggtcaggagtttgagactaccctggccaacctggcaaaaccccgtctctactaaaaaaaaaaaaaatacaaaaattagctgggcgtggtgcacgcctgtagtcctagctactcaggaggctgaggcaggagaatcacttgaacccaagaggtggaggttgcagtgaaccgagaccacgccactgcactccagcctggacaacagagcaagactccgtatcacaaaaaaaaaaaaaaaaaatggggtcgcgggagccaaatgtgcagagtgagcagtgtggctgggcaacaggctttcacccccaagtacatgtcacttcactcagtcctcaaaacagctctctaactctagatattatgatatctagagtttctgtaagttcagtgttttgcctctgtttgtgtagttaggaagtgattaaccacacaagaaatcccagaggtattgcaaggctactgctttcagtaatcaaaacaaggtacagccaataagtgctctgaatttagggacttcatggagaaagaccatgtgggctggggcagtcagggaaggcttcctagaagagacaggtcttggggtgagcacagagaattggcccaggctgtggacagctatagagagagagccaggaaagcctgtgagcagtgtgcagctggagatagagaccagtctcactgcgtctgagcctctgtggcctcgtctgtaaaacagagataatcaccccagcttcatggggttgtgaggaagatcaaatgagatgacatttgtgaaagtgcttcgcctacttttggcacatggtggaagcttaggaaatgtcagccccacccactctcctgactttcgggagcaaaccagtagagaggcaagcatgcagccactggggcaggcagagcactcctgggcctcagagggtgcaaaatgatgcgggaacctcaaggaaggagtgggtgctgccttcttggtgacaagccctcccgcttctatttatctctgctccgacgcctgccagcccacccctccccagcaccacagaggccagcctccctctcaagtcaccagcacagagcattcaaggcccagggccccacttcccttggggcccaggggacctaaagaggggcagtcagggcccaggcctgagggggaaagccccaggtaaagaatattcctccaaatcccactccagctcccgcagacaacctgatcggggtcaggaggacacactcctaccccaggctgagagcagcctctgataacacaaaaggaccctgagggtggagacctcccacctccacttcaaaacagtgtgttatttatcaatatcttatccccggaagttgaatctatctcccagtgccaactccgagataaatgacttgaccaggcgtgtggcatggattaaggcatgagataggtgttcccaccaccagaacgagccagtggctgcctctcttccctttgagccctccctccacagagacctgtgaataggtgtttctgatccctaggctggttgcatcccaacccagagcaggcagccttcggacttctagcatgggctggcctcaggacatggagccaaagcaggcagacctggccctgccctcaagctcccaagctaaagagagcctggccctccctcccactaggtttctccagagcctgctgcctcctggtttgggcttctactctattcttcccccacagactccctgcaatttactgcatcacctctagactagcaattacagatggagctcagaacctacttcctgagccttcctaatctcagcagccctgacagccacttccctcttaacactaatgcagctgcttattctgctgacattaaggtcagggcctggtccaaggaagaggacaggtacagcccaagctttgcacttgaacatccatgcttctgaccacctgccctgtgacgctggctctgtgccccagtccagaaaagacttctgcctactcctcctctgccctacccagttaactccctttccttccctcccttctgcttctcactcctcccctcccttctcttcttcttctccccttcccccatcacctggggcccgattcagctgtgcccagcccttactctgagtgcccacagatggagcctccagtagcttctgtggggcacccttccaccaggtcccagctcccttggctccagcagtgtccatgctaaagcctccaagtgtcatgttggagagaatggtggtcacagtagataagcccaaaatgccttacagtttacaggctggagtcaggccccgccacgtgctggctacatgacttccctgagattccatttcctcctcagtaaaataagtggtaagattttaggatccccagcactaaaaagaaacgaaatactgatacaggctccaacatggatgaattttgaaagcattactatactaagtgaaagaagccagtcacaaacaagcacatattggatgattccatttctaggaagtgttcagaacaggcaaatttatagagacagaaagtagattgattagtggttgcctgaggctggggagcgggggaagggaggtgactaccaatgtgtatggagtttttccagggtgagagggtgatgaaaatgttctaaaatagattgtgttgatggttgtgccactcagaatatactaaaaaccatttgaattgtgcacttgaaacagatgaattgtacggtatgtgaattctatatcaataaatctgtaatttaaaaaaaaaaaattaggtcgggtgcagtggctcacacctataatcccagcactttgccagactgaggcaggaggatcacttaagcccaggagttcaagaccagcctggggaacacagcaagacctcgtctctactaaaaaattttaaattacaaaaaaaaaaagtaaaaaaaatagaatcctaatagtacctatctcataggattgtggaaaatagtagtaatgtatgtaaaatatttagcacatagtaggcacaaagaaatgacattattattaagagacctgggagagctgtgcccagcctatcgtgggaggccttgacctttggactcaaaagtggcagcaggtccacccccccatacacccttgtcaccaaggaagcgtccacagcttaaaggagctatattaaagcaccccaagtcaagaggactgaaccagatctggaactcactcacctcccctctcacctcactgccctcaccagccagcctcttgtcaagtgatcaggctgtcaaccaacttctctaggataaggtttcaggtcagcccgtgtgtataagaccagtgccaagccagaagcagcagagacaacagtgaatgacaaggaggggccatccaatccctgctgccacctcctgggatggagccctagggagcccctgtgctgcccctgccgtggcaggactcacaggtaagacccctttctcctccctcatcccttcccctctccctctcccttctccttgttctccctttcattggaggctttcagagagcagccccgagcagtcagggctcactagctgcagcttgtcagacctgatagagattcagtccagccgccaccttatgaaaagggagctgtggccttgatgagggtactgtggcagggctggggcttgaacccaacacccgtgtcactcactcaagactcacaccccctttgccttgctggctgcctctggtgggattttgcaaatccccatagacaggaagtggctttcttctttgcctgccccagaatctctgcgattcctccagagcataaatccctctctttccatgaggaccctggggccctcttcctgagtagggatgacaggggcacttctgacctgaggcgtggtccaggtcatttgctgggagctttacagagcccatggtctctgcccagacggcttcttcagtgggctgctgtgaaggctttgccgggagggtgggttggagttggggaggcaactggtgttgggtaggatgtctcaaaatggggtcctcttcccctgcttcagagctaccacagggagttttcctaatgcagattcctaggccccaccccagacctaaatcaggatctctggggctgagagctgagaatctgctctgtaaacaagcagctcaagggatccttggctctccctgaagtctgagactctctgggcagtgaaacaggcgcagcttcagatgtcagacaaacgtgggcaccaatctcagctccagcacttcagctgtatgactagcaaaagccctggaagcctcaggtccctggtttacgaaatgagaataataatagcaactacttgtagccttatgaagggatcaaatcagtcagtgtctgtaaagccctcagcacggtatctggtgcaagaagcaaccagcaaacattaatggaccatgctgactagaacatcccatccctcaggagccccagcagagctacagtaatgagggttccacttttgacttcttcctccactggccagtggcaaaaggctgccggctgctaggggtctaggagagtctggagtgaattgggaagaagattggggagtgctggcctcaaggcacctcctacctgtgcccaccactgtggctttccctcctcccgcagcttgactactgaaagttctagagccccaaggtgggcttttgacctgagtctgtgtccatccattccattttccatgagtggctaagaactgcccctcttgtcaagtgatcacgctgaggccaagagttcaagaccagaataggcaacatagagagacccccatctctacaaaaaataaaaaattagctgggtatggtgatgcacacctgtagtcccagctactcgggaggctgaaggtgggagggtcacttgagtccaagaggtcaaggctgcagtgagcctggattgcaccactgcactccagcccaggtaacagagtgagaccctgtctcaaaaaaaaaaaggaggcagtttgatattggggagaacagatgcctgagcctcggtttcctcatgtatacagtgcaggtaccactatcagctctgcctacccctggtaaggaggggagggagagggtcaggaggaggattgcaaaattcaagggataggaacgtgacctgtttttataggccaaattcatgcagcttaagtatggcaccacccaggcttctccctttctaaagcccctcctgggtaaggaagagttcctgggagccaggccagacatcactccatcagccttctctggcctgtctcctgcagccccaccgctgcactgaagcccagggctgtggagcagcctctctccttggacctcctctcggccctaaagggactgggcagagccttccaggactatggttggactgaagccttcagacgtgcctcccaccatggctgtgaagttcctgggggcaggcacagcagcctgttttgctgacctcgttacctttccactggacacagccaaggtccgcctgcaggtaggtgccctttggccaagggtcattgatcacatggaaggaggggctagttctctcccatatcccccatgacgtgtgcccacatgcccttcctcagaaccctgacaaagactctcactccactgcttaggacccttccttgcctcctcccatcaccatccaccaggacaaaaaaatctaaattctttgcatgatgtgacagggccctttatgggctaggccctactttgtaaagcatgcagtgtgaggtaaaagtaaggaattaactgtgtgaccttgggcaagccacgaagcacttataaaatgggaaaaacaatctgtccctctgatttactctgaggatcaaacaccaagccatgtgtataatactgctttgtgaatggtaaaatgctgcgcagacaccagtgatttctactgtgaccagcatggttgttctcaggcccagcccaggcaggcccagccccagcagggttcctgtgcacgcagccccttcttgccttcccatctgagtcctcaccccctgctattgtccctcagatccagggggagaaccaggcggtccagacggcccggctcgtgcagtaccgtggcgtgctgggcaccatcctgaccatggtgcggactgagggtccctgcagcccctacaatgggctggtggccggcctgcagcgccagatgagcttcgcctccatccgcatcggcctctatgactccgtcaagcaggtgtacacccccaaaggcgcggacagtgagtgaccaggtccctgaacaccaaaggggtggctgaaagtgtgtgggtcaagagaccagggaagtctagactcagaggcagagccaggggcggggggaagctggtaccggacgcttatgaggaggctctgagtggacatcaaggaagctgcaggggcagccccgcagagaacagcatgtcccagaatgctgcttagtaggggacactggcccactctctctgcccctcccagactccagcctcactacccggattttggccggctgcaccacaggagccatggcggtgacctgtgcccagcccacagatgtggtgaaggtccgatttcaggccagcatacacctcgggccatccaggagcgacagaaaatacagcgggactatggacgcctacagaaccatcgccagggaggaaggagtcaggggcctgtggaaaggtaggtctggactctggacgcaggcggtcttaggcagagctttccctcccctcaggctggggcagggaccccagtaaggaggggactcccagcatggcgtgttccagtgattctgaaagaacatcacaaccaaagatacttcactgacctgccacagcccctcaaactcagttcattttaccagccctttgccatgtgcaggttgatgtgagggagccagaaatgaacttaagacaccttcacacgcccagggcatgaggacagcagaggagataagatgcagctacaccacaggcaggatgtggtaggggttgccccagaggtggagctccagaggcgggctctgcagagaaggtgacacctaagctgggcctggaagactgaacaggctctaggtgtgtggagacggaaggggaggggccctcaagcagggtccggaggaaaaagaggagcatcagaaaagcacagctgtgaggagtgggcgcagggagatgcaacgaggaagcgcttccttgggagcaaagctggagggctccctatgtgtccacatggcagccactgcgatgaatgcaggactctctccgcatgtgaaccagaggttgcaggaacgtttgcagaagaaactgacccagtgaagtttaagggcaggacacctcttaagttggggctcttcactcacttgttgggcacccttcagagcttgtccccttacctgtgaaaccaggggtttgatcctgacagtttcctagggccctgctggcaccacattctgtcactgttccaagagctcagcctctcgctgaatgactttcttttctggctgcagctgggtctccaggaagcatattttaattttgacagctattgcagatcaccctccaaatgtggccaaatgaacacaagtgggcctctctgttctctgtctctgaggaaaacatggataatctgagagttgttaaccctagaaaggaaaatgtggaatctgctcagctggggtgggatcctctggctgagaccattggaatggggcactatggccccaaaactggggcctgtggccttgcagccagggcatccatttctcccatttcccattcctccctccccacccatttcacatccctccccaccgccttcctaacaggaactttgcccaacatcatgaggaatgctatcgtcaactgtgctgaggtggtgacctacgacatcctcaaggagaagctgctggactaccacctgctcactggtgaggccctgggctccaggcaggcagctctccctcagcagggagggaacccagaactccgtggagtgggcaccacccagaggcaactgggttttagaaggagcagagagagaagcagtgcctagtaaaaagtgccaggtacattgtggtgacaagcaggaaagacccctgggctgggaggctggagacttgggttccagtcccagcaccacctctcactatatagctttaagcaggggtctctcaccttctccgacttcagtttcctcaaacagcctgcatgacctcccacctctgggtcagcccaggcctagtttgccagtacttaccaagagcttagcccagggcactgtgagagatatggaaaatactgtcctatgctcagggagttcacggttgagttggggacaaacagtgcatacatatggacagaacacaaatgcactccttgatatttgcttgtccttcctctgcagacaacttcccctgccactttgtctctgcctttggagccggcttctgtgccacagtggtggcctccccggtggacgtggtgaagacccggtatatgaactcacctccaggccagtacttcagccccctcgactgtatgataaagatggtggcccaggagggccccacagccttctacaaggggtgagcctcctcctgcctccagcactccctcccagagaacaggggcttctttcttttcgaatgtggctaccgtgggtcaacctgggatgtagcggtgaagagtacagatgtaaatgccacaaagaagaagtttaaaaaaccatgcaagtaaaagaaaaaaagtgaaccatacctgatggggagggttagggaagcctgactgagaacaaacactccaggaataggtaaaagtactgcctgtctccagaggaagttagcaatcctgagacctcctggacctcctgccatggccattgagcaccacactgaccatggccagtgccttcctcactgtctccacacgctccacgttttcttgcacttactgctccctctgcgtggaatgcctcatcatctacaggctgtcaattttagccatccttcaagacgagttcaaatgccacctcctccctaacactctcaggtgtaaatttttcctcctccctgggaacttctgcaatgccatttgataccatttttatggtatttatcacctcctgccttgtattatagtatttgtaagcttaaattattcctcatgcaaagagcaagttcctgacagcaaaagtggctcagacatcttttatctcccacagtccctcacacaaagtgagcactcgataatgcaggttgtttatgattatcacaatagctaagtcactctatattaggcctcgtgctgagcactttacacacgttatcccaacagccccttgaactgggtagtattgtccacattaactaaggaaaagactgagtgtcagaaaagttaagtaacttatccaagatcacaggttaaaatggtggagccatggctcaaaccctgaccgtcagacaccacacccaacaatgttgtttatcctactggtaagctcttagcttggccctttcacctcccactgctgatgtcttcaacagagagttttttggtgcccagtgttagaatggacccaacaagtgaacaagagctgctataggttctcaagcctgggaatgacgtaataaaactatactgcaattgacagactgttcttccaaaaagtgcctctatcattacagtcttcagctgtagccacttgtctcagttactgctttcacttgtccaacatttctggagcatcttgtaggtgccaggccctgggttatgcctccctcaaagagcagcagataagttggtggtatttactgagcatgtattgatgctgggccctgtgctgagtgctgtccaacattaactcacctaatctgcacgactaactccacaaggcagatactgttattttcctcattttacagataaggaaactgaggcttagaaagattaagtgatgtgtccagattgtaaagctagaaactgggagagcttggatttgaacccaggtctgactccagagtttacatttgttgtcacagtactatcgtccccacaagagtcaagaaaacccatggcatgaggtcacagtgcccaaactgagtcctccagagcaaagagcaaccagccagggaaggaggagaggaggggacagtccaggcagagggagcaagaggagcaaaggcatggagggaagagggcctggcatcgtcagggaatgtgactagctgagtctggtgggagcaaacgggcccaggaggtggttagtggagggacaggctgagagaggggcaggggccagctcgtgggcttctccctgagttggtgagccacagctgaggtggggacactgtgctatgccatcacagcacagccagcctctctggagaagagctaaatctggtgccacactgtattcaccctgcaaagcccaagcttctccatgtcctggcagggggccatgttagggctggccacccggggtgtaactgagcccagaaacacccagcagcagggtggagttagaaccgcacctctgacacttactagccgcgggtctttggttgagctcttaacctccctgggcctcagtttgtgaaaaagagcctggcagcaacatggctgccttatagaactgtgagaattcgctgcctaacacagtaacccgtctcaaaacgtgagtttttttttcttttccttactccgacttctgcctaaatccccttagcagaaaaaaaaaagagagagagagactgaaaggattcagaaaatgcttgtgatgaacagaagtctggatcctctggcactaccactgtgtcccgggagagcacacgcatctgttgtggtcccctagcactccacctgatgtgttggttgtttttcttatcagatttacaccctcctttttgcgtttgggatcctggaacgtggtgatgttcgtaacctatgagcagctgaaacgggccctgatgaaagtccagatgttacgggaatcaccgttttgaacaagacaagaaggccactggtagctaacgtgtccgaaaccagttaagaatggaagaaaacggtgcatccacgcacacatggacacagacccacacatgtttacagaactgttgtttacttgttgctgattcaagaaacagaagtagaagaggaggagggattctggtcttcactgccatgcctcaagaacacctttgttttgcactgacaagatggaaaataaattatattaatttttgaaacccattaggcatgcctaatatttaggcaagagaaaataaaccaagatagatccatttggacaaaatggaaggttggagacgtgtatccccgtgaaatctggttagataatgaatgataagcaggaaggatggcaagcacgggacaggaggggcccacaatggagtgggagatcagccacggagcctggagggatgccacccagcaacacagagctggcgactgcagctgcaccatcacacatgcatcatcagcctatttgtaatatgtctgccacagagagtcctttgggattctaggaaacccaaggaacaagagaaaaaactagagcctgtgctaaagaagccctgctgggcccatgtgaggctggggctcgtaaatattccctgacgacactgaagaatcaagagggcagcccccactttcctacaaaatggagggagccatcccttccctgtccacctcaccaggggtgctatgacatgcaagtgagaagctgggcatgaacgcactttataaaagcaaaagctctgtgtaaatctaactacaaggacaatgccttgggagagattttgtcgggacagagaggagttgccagggaagaaggtttgaaagatacggttgtctagaggtgagaccaaaggatccagagacttggggaccagaggtgacagtggatgacgtgaagccacaggagccccacccccatgcagcctcttccccacccccccccaccacgcgctcaatcatgagtacctcaaaggattgttgggcttgggggaaaagaggtggattcctgggcaagaacctaaagtagcaggactcggaattctcgggaaattattatgactcaataaaagaattcacaccttaggtgtgggagtaagaacagccacttctctgccttttctttcttggaattttcctttctcacttctatttcaggctttctatgtgtcagggcagggccagatccagccccacatgcctacacttcatctgccccctctcaccctgtttaattgcaggcaagtagctttatttttttagggttccagctcctgcttctgcaaaaggcagggttgaaccagacgaccgacttccaagcttaagactgtacatttttcgaattgataatggggacccaaaatgccactatctttttctacttcttggcagccttgcgtagctctgatgattgtcaggactgggttcaaacctcaccccattctaccttactaaccacctagccacagggaatccttgcaccttggtgtgctaccagagaagtgggaataacaatcgctgcttcacaggcttgttgtgagggttgacctaaaactccttggaaagcagacatgtggtgtgcacctgctacctgggaggcttaagcgagaggactgcttgagcccaggagttcagggctgcagtgagccatgactgcacctgtgaataatgactgcactccagccttggcaacagagcataactccttctctgaaacaaaacaaacaaaaaatcgttggcatacaggaggcactcggtaatgtcatttccctgcttccctgctcctacccctccagaccctgggaaaaagcaaatatctattcatcctcagcactttcctaaatttaaattataacttgagatcatctatgtatacaaactggagagttcatacaaaagcaaaaaaaaattattttgatttaatgtctggcttggttttcaaataaaacccatattttgaaaagtttccggttggtgcagtggctcacgcctttgggaggccgaggcgggcggatcacttgaggtcaagagtttgagaccagcctggccaacatggtgaaactctgtctctactaaaaataccaaaaaaaaaaaaaaaaattacccaggcatggtggtgggtgcctgtaatcctagctactcgggaggctgaggcaagagaatcactcgaacccaggagactgaggttgcagtgagccaaaaccacaccactgcactccagcctaggcaagactctgtctcaaaaaaaaaaaattaaattgaattgaattaaattaaaagtttccctttttagccaggcatggtgacatgcgcctgcggtcccagctactcggggggctcaggtgggaggatcacttgagcccaggaggcggaggttgcagtgagccgagcttacaccactgcactccagcctaggcgagactctgtctcaaaaaaaaaattaaattgaattgaattaaattaaaagtttccctttttagccaggcatggtgacatgtgcctgcggtcccagctactcggggggctcaggtgggaggatcacttgagcccaggaggcggaggttgcagtgagccgagcttacaccactgcaccctagcctaggtgacagagtgagaccccatctcaaaaaacaaaaacgaaaaaagaaaaaagagtttctctttcttttgacttgactgacatgtgcaaatcactctcaaactcctggtctcagtttgtaagtttctagggccaggaactatatcttccatgaatttccatatggcaatattaacacaccacctacccagaggatgctattcaggtgatgattctgagaaagggaggataaaatattctaagagatattttgactgggatcaggagcctactaactgccaagtccagccttttggagaaagaaaaacgagattggtgagtcttgtgaggtttctaggccaaaatactagatctctttctccactggttttttttttttttttttttttttgagtcaaagtcttgctctgtgcccaggctaacacaatcttggctcacagcaacatccacctcccaggttcaagtaattctcctgcctcagactctcgagtagctgggactacaggtgcgtgccaccacactctggctagtttttgtatttttagtagagatggggttttcactgtgttgaccaggctggtctcaaactcctgacctcagatgatccacccacctcagcctcccaaagtgctgggattacaggcgtgagccactgctcccagtctctttccccacttcttaaaggcagagattcaaccagatgacctgaagctctttagttctgtgattccaaggactgagagacagtttctcccaggctacggtgtgaacaccttttcaacgctggcctcaatttatgcttccaggaaaccagggatgtgaattcatgagaaggtcagattaccagctgaggccagtttctaagttctgtgcatccatttccccaccacactcctagagacaccacctccagtcaagtgattcaaaagaaatctgctttttctcaaactcttctactacgtcaggcagaaataagatagttagagtcctgactcagtcccatttgtgacataatggataattcacataaatgttctaagtaatggtaatattttttaaaagaatattttattcagaaggaatgaatgttaagtaaggaaatattattatagctctgtagatgagtttgtttcagggcactttgaaaagcacagtgtgctacatgaatgaaaatattcattgtacatacattgtaagccatatgttatgttaggtgctggggtgaacaagaccagtcctgtcctcaaggagctcactggggtggaggatggtggggcaggaaagacaaactgcaaaccatcagtcaccatactgggtgatcaaagctacaaatagagatgtatacaaagcacccaagagcaggtacacagataagggacatctgacgtggttggggggccaggaagcttcttggaggaagacacctaaaggtcaagtaggtgttatgcaggtaaagaaagtgaagtgaaagtcatcctaggcaaagggaatggttcgtgcaaaggcccagaaacaagataaaaacattcaaggtacatccaagggattgtcagctgtcagtatgtctgggttgcagacttaaagatctactggggagactgaggcaggaaaatcgcttgattgcttgaacccaggaggtggagctcacagtgagctgagatcgcaccactgcactccagctgggcgacagagcgtgactctgtctcaaaaaaaaaaaaaaaaaagaaacctcctttccatttttttaggtatatacccaaagtgcaaagtggaatcatggaatcacttggtatgggtaattctatatttaattttttgagggaccatcatactgttttccatagcagctggaccattctcattcccagctgcagtgtataagggtttgtttctccacatcctcttcaacacttattttctggtttttgatagtagccatcctaatgggtgtaaggtggtctctcattgtgattttgattaatgattagtgatgctatggctcttttcgtgtggttattggccatctgcatatcttctttggagaaatgtctatttaaggcctctgcctatttttgaatgaaaattaaagaactacaattttatgtaacttggatgaatctcacatagcgttgagtgaaagatacaaaatagtacatatagtatcattccatttatataatgtttaagaacaggtaaaacaaatatttggtgttaaaaatcaggatactggttattctttgggtgaatagtgactgatggtagacacaaaggatcacttctgggtgttagtaatgtttcctcatgtgtgctcattatacagggatgtttgctttataaaagttattcatgctgtatacttaggatttgtgcactgttttatatgtgttttacttcaataaaagtttactttaggctgggagtggtggctcatgcctgtaatcccagcactttaggaggctaaggcgggagggttgcttcagtctgtaaacagattttttttttaagacagggtatcactgttacccaggctggagtgcagtggcgtgatcacggttcactgcagcctccagactcctgggcccaagcaattttcctgcctcagcctctcaagtagctgggactacaggcacctgccaccaggcccagctaattttaaaattttttatagagacaggggctcgctttgttgcctaggctggtcttgaatttctggactcaagtgatcctcccacctcagctgcccaagtcattgggattacaggtgctagccaccatgcctggctactcttgctggtttaatgatgggaaatctttcaccaaaagtttgcaaattttcatatgagcgtctggacaacttttttaaagacctacaaaacgttcaaaacactggtgaaaaagaagtacagaatagagagaaattttgatcaggcacttactctgaaaagcacaacactgtgtctgtgtctcagtgatgtggtcacacaaccaaaacaacccaactgtggttttcttctcagtatcttacactgtgaaagccttcttgatttggaacctgtgacttgcagcagagttctaaacaagaattgtatattgcttgtttcatggctcctctcaccaatgaatccaaatccatcagagtagagctcctcagcatattagaccagttatccagaagtcatccccagaagtcatatccccgtttcttttactttccaaaggtacaagatctcaaaaactgtcaagatatatttcaccattgttattcttgctatattattattatgtcttggagttatgatccttgaagtaattcatgcttcacatgtgcttacaatgttgaatgatgggatgagagaaatcttttccatttgataaaaccacaaggagggtttgcttgtgtcgtatgggtgcccataaagcattgaaaatattaaggagcaaagtggatttgcaggatttctgtggatatgtcactatgctgtaccatctcatcaacgcaaacagaaagtgtggtgatgcttctgatgaaaaaggaaaacctgatttgacttcctgctttgagcagatgagaggacagagtcatttgaaatggtcattgaggaagcaaccacagattcaacaacataacagaaatcttaggttgctacaacagaaacagactgggttcctcttgagctatgcttgtaattccactgtttagctctgaattcaatgagtttgtaggaaaacagtcacactacaaaccttgcagaaaagaaagccttcaaaaactcttactttccagtagaaaactatatatgttcttaactttattcactcattctaggaagttgctttaacactagatattcacattcaggctggtttttccagttttctttacctaaatcttaagttctacttcttgaaaagaatgtaatgtgtagagatggcatcttatcagaatggagagatggtcaccttcctcacttctctctgctaatcttcattggtattaattttttcacataacttgttattcacactttgtgtcttttttcttaaatacctttaagaaaaaagcttttataaagcttttataaagctttatactgccaggcactaaaaagaatcctgctggtgcagaataatttaggcttaaattatgttcaaagtgtgttgtgttgtagtttgggtaacatttagtattgtctggtgtcttgatcattataacacatcctaattcaacaaagagctttttagcaaaaagcacttactatattttttaccttgagacaatctgcatttttttataaatctaaggataaactttatagactttatgataactgttaatgtaatgtcattatgaatattggtgattttcagtgttagtttgtcaaacgtatatctggtttaattttatattttgttacctacactctggaggataatggagattttattcttcctgtgaaaaggcttcttggtatttaaagtagcaaaagtataaaataatgaacatccagtattgagaaatgatatgatggaacattaaaaattcctgtggatatttataaattatatgtcagttaaaccttgtcaaaggtatgcaaatcagcataccttaagcttgttttagaaggtctcaactcagactatgaagattcactgacatcttataagaagccttggaaaacattctctttttttttttggctgagacggagtctcactctgtcacccaggctggagcgcagtggcatgttctcggctcactgcaacctctgcctcctggggttcaagcgattctcctgcctcagcctccccagcagctgggactacaggcatgtgccactgcgcccagctaatttttnnnnnnnnnnnnnnnnnnnnnnnnnnnnnnnnnnnnnnnnnnnnnnnnnnnnnnnnnnnnnnnnnnnnnnnnnnnnnnnnnnnnnnnnnnnnnnnnnnnnnnnnnnnnnnnnnnnnnnnnnnnnnnnnnnnnnnnnnnnnnnnnnnnnnnnnnnnnnnnnnnnnnnnnnnnnnnnnnnnnnnnnnnnnnnnnnnnnnnnnnnnnnnnnnnnnnnnnnnnnnnnnnnnnnnnnnnnnnnnnnnnnnnnnnnnnnnnnnnnnnnnnnnnnnnnnnnnnnnnnnnnnnnnnnnnnnnnnnnnnnnnnnnnnnnnnnnnnnnnnnnnnnnnnnnnnnnnnnnnnnnnnnnnnctctgtctcaaaaaaaaaaaaagagagagagagagaatgctaaaatggtctaatttgcattttggtttttttccttttattttttagagacagagtcttgctctgttgcccaggctggagtgcagtggtgtgatcacagctcactgcagcctcaacctcccaggctcaacctcctgagtagtttgggtgatcctcccacctcatcctcctgagtagttgggaccacaggaacacaccaccatgcccagctaatttttttttaattgtttgtagagatgggggatctccctatgttacccaggctggtttttgattcctgggctccagtgatactccctccttgccctcccaaaccactgggattacaggcatgagccaccacacctagccattttctccccatttttgttaacagttttattgaaatataattcataatagcatacaattcatccattcaaagtgtacaattcagtgatttttggtgtattcacagagttgtgcaaccaccaccacaatcaattttagatcattttcactgcctcaaaaacaagcccccatacccattagctgtcatgatcaatctccccattccctgaagccctaccatctgtctttatatatttgcctgttctggacattttatatacatggaaacacaatgtgtggtctttcatgactggcttcttttacttagcataatgttttcaaggttcatccacggtatagcatggatcagtacttcattccttttcttctttttttttttttttttttttttttttgagatgaagtcttgcttttgtcacccaggctggagtgcagtggcacaatctcggctcactgcaagctctgcctcctgggttcacgccattctcctgcctcagcctcccgagtagctgggactacaggcgcccaccaccacgcctggctaattttttgtatttttagtagagacggggtttcatcgtgttagccaggatagtctcaatctcctgacctcatgatccgcccgcctcggcctcccaaagtgctgggattacaggcgtgagccaccatgcccggccacttcatttcttttcattgcttggatataccacattttattagcatatatccgttccgcaattgatggatgtttgggttatttccatttttttggcaaacgtattttttaaacaatgtttatatgtaagtctgctgctcactttgggtttttcttttcacagaattttttaaaacttttttagagatgtggggtctcactatgtggtccagactaaactcaaactcctgggctcaagtaatcctcctgcctcagtctcctgagtagctgggactataggtgtgagccactgtgcccggcttcttttcatagactctttatggaaaaatagaatttgtttccatcttggtagcaatggttactgcataccttcactctgatttgagaatttttggaccaagctctgcttcttctctgagtatggagaaggcaaaaggcagggagtggacctcctcagagaagtcgagggaagaggatcagcaggcttctaatcaaccaaacacaattgctttgccaggaacatcagcaaagggaaccaaaggacaaatttctgctaaaggtgaaaaagcgctctgcccaaagaaggcagcagagtatagggacaaccccaaacctcagaagaagatactaatcccttcattaccctctaaaccgcaacctgttaatcggcttcaccgggacattctgtgggcctggtgtctataattaaaggcaaagccacacaggcctttggtgccagaaataagctcctgtgtgcctttgcctatccaaatcaaaagaattttcctagcacagcaaaagaggccagaatccggaaatcattaccaaaacaatcaaaggtggacaaaggggaaattaccccgaaaagccctgaggagacacatcctcctaaagtagctcttccccctggggaggggttgcctgacctagaagagtctgctgctctccttgagggagttaatacagttgtggtgacaacttctgccccagaagcttcgctggcctcctgggccagaaatgcagccagggagaaggcaccagaagcagtgggatctccacatgaggcccatggtgtcaggtggctagtgtccatgggagaagactccctgcagacacagatggttggcttcacctccagtttcatgctggacaaggctgggttccagaaaagcaagaagggagagtgagtgcactctttttgcttcctgcctccaattttccaccccataacttgaagacaatatgttgtgccccaaatgcgttcacaggtacaaggtcttaataaaaagcctccggtgggaatagaatatcaggaaaaagaccacatctgtggtaattaatggcagaaaggctggacagttgattccgtggtgctgctgacaggtgaactctggtcctctccacacctgcttatgggccatgcagactggtggggtggcagatgttagcctaagacccctagcagtgactgctgcttcgtgggtggacataaaagactcttaagtttaaaaatggaaaaacattttacaaattaccataaattctagttaacacatagaaaaactcattcatactacccttctaaaatagaaatgacttcagcagctcttttaagtgggaacctcttcagctgagcattgtgaaggagttgagaaaacaaacagcagtttgctcctgtgctcaatttccctgacccaaatgctgactactttaggagctgcttcattccaattgcaattacataaaatgtaaagtattttaaggcaaagaaaggctgttaattctctccttccccaaaacacgtgattttcaatattcaaaacaatatttttcaaagttctcttaataacctgcgatttctacaggttggctccaggataaaaacacgaggcactttgtattacttcgcttataattcttttgtttatttccagtatttaaaatgtttaaggttacttcccgttcatacatacataatacattgaatagaaaatgtgtttattagcagattctccataaacaaaaataagatgtgtttataaaataattcatctattgtatttagggaactgtatgtattgcatgcaaattattgttagtgttcttaaagtaggattaaaccaaaaagcatgacttttcttttgcataactcatttgtttgtttctttatcagttggtggtatgggttggatcgtttgtttttatttatttattattattattttgagacagtcac

SEQ ID NO: 1982 - DNA, 2284 bp, Homo sapiens
cagaagcagcagagacaacagtgaatgacaaggaggggccatccaatccctgctgccacctcctgggatggagccctagggagcccctgtgctgcccctgccgtggcaggactcacagccccaccgctgcactgaagcccagggctgtggagcagcctctctccttggacctcctctcggccctaaagggactgggcagagccttccaggactatggttggactgaagccttcagacgtgcctcccaccatggctgtgaagttcctgggggcaggcacagcagcctgttttgctgacctcgttacctttccactggacacagccaaggtccgcctgcagatccagggggagaaccaggcggtccagacggcccggctcgtgcagtaccgtggcgtgctgggcaccatcctgaccatggtgcggactgagggtccctgcagcccctacaatgggctggtggccggcctgcagcgccagatgagcttcgcctccatccgcatcggcctctatgactccgtcaagcaggtgtacacccccaaaggcgcggacaactccagcctcactacccggattttggccggctgcaccacaggagccatggcggtgacctgtgcccagcccacagatgtggtgaaggtccgatttcaggccagcatacacctcgggccatccaggagcgacagaaaatacagcgggactatggacgcctacagaaccatcgccagggaggaaggagtcaggggcctgtggaaaggaactttgcccaacatcatgaggaatgctatcgtcaactgtgctgaggtggtgacctacgacatcctcaaggagaagctgctggactaccacctgctcactgacaacttcccctgccactttgtctctgcctttggagccggcttctgtgccacagtggtggcctccccggtggacgtggtgaagacccggtatatgaactcacctccaggccagtacttcagccccctcgactgtatgataaagatggtggcccaggagggccccacagccttctacaagggatttacaccctcctttttgcgtttgggatcctggaacgtggtgatgttcgtaacctatgagcagctgaaacgggccctgatgaaagtccagatgttacgggaatcaccgttttgaacaagacaagaaggccactggtagctaacgtgtccgaaaccagttaagaatggaagaaaacggtgcatccacgcacacatggacacagacccacacatgtttacagaactgttgtttacttgttgctgattcaagaaacagaagtagaagaggaggagggattctggtcttcactgccatgcctcaagaacacctttgttttgcactgacaagatggaaaataaattatattaatttttgaaacccattaggcatgcctaatatttaggcaagagaaaataaaccaagatagatccatttggacaaaatggaaggttggagacgtgtatccccgtgaaatctggttagataatgaatgataagcaggaaggatggcaagcacgggacaggaggggcccacaatggagtgggagatcagccacggagcctggagggatgccacccagcaacacagagctggcgactgcagctgcaccatcacacatgcatcatcagcctatttgtaatatgtctgccacagagagtcctttgggattctaggaaacccaaggaacaagagaaaaaactagagcctgtgctaaagaagccctgctgggcccatgtgaggctggggctcgtaaatattccctgacgacactgaagaatcaagagggcagcccccactttcctacaaaatggagggagccatcccttccctgtccacctcaccaggggtgctatgacatgcaagtgagaagctgggcatgaacgcactttataaaagcaaaagctctgtgtaaatctaactacaaggacaatgccttgggagagattttgtcgggacagagaggagttgccagggaagaaggtttgaaagatacggttgtctagaggtgagaccaaaggatccagagacttggggaccagaggtgacagtggatgacgtgaagccacaggagccccacccccatgcagcctcttccccacccccccccaccacgcgctcaatcatgagtacctcaaaggattgttgggcttgggggaaaagaggtggattcctgggcaagaacctaaagtagcaggactcggaattctcgggaaattattatgactcaataaaagaattcacaccttaggtgtgggagtaagaaca

SEQ ID NO: 1983 - protein, 308 aa, Homo sapiens
MVGLKPSDVPPTMAVKFLGAGTAACFADLVTFPLDTAKVRLQIQGENQAVQTARLVQYRGVLGTILTMVRTEGPCSPYNGLVAGLQRQMSFASIRIGDSVKQVYTPKGADNSSLTTRILAGCTTGAMAVTCAQPTDVVKVRFQASIHLGPSRSDRKYSGTMDAYRTIAREEGVRGLWKGTLPNIMRNAIVNCAEVVTYDILKEKLLDYHLLTDNFPCHFVSAFGAGFCATVVDVDVVKTRYMNSPPGQYFSPLDCMIKMVAQEGPTAFYKGFTPSFLRLGSWNVVMFVTYEQLKRALMKVQMLRESPF

SEQ ID NO: 1984 - DNA, 1978 bp, Homo sapiens
cagaagcagcagagacaacagtgaatgacaaggaggggccatccaatccctgctgccacctcctgggatggagccctagggagcccctgtgctgcccctgccgtggcaggactcacagccccaccgctgcactgaagcccagggctgtggagcagcctctctccttggacctcctctcggccctaaagggactgggcagagccttccaggactatggttggactgaagccttcagacgtgcctcccaccatggctgtgaagttcctgggggcaggcacagcagcctgttttgctgacctcgttacctttccactggacacagccaaggtccgcctgcagatccagggggagaaccaggcggtccagacggcccggctcgtgcagtaccgtggcgtgctgggcaccatcctgaccatggtgcggactgagggtccctgcagcccctacaatgggctggtggccggcctgcagcgccagatgagcttcgcctccatccgcatcggcctctatgactccgtcaagcaggtgtacacccccaaaggcgcggacaacaacttcccctgccactttgtctctgcctttggagccggcttctgtgccacagtggtggcctccccggtggacgtggtgaagacccggtatatgaactcacctccaggccagtacttcagccccctcgactgtatgataaagatggtggcccaggagggccccacagccttctacaagggatttacaccctcctttttgcgtttgggatcctggaacgtggtgatgttcgtaacctatgagcagctgaaacgggccctgatgaaagtccagatgttacgggaatcaccgttttgaacaagacaagaaggccactggtagctaacgtgtccgaaaccagttaagaatggaagaaaacggtgcatccacgcacacatggacacagacccacacatgtttacagaactgttgtttacttgttgctgattcaagaaacagaagtagaagaggaggagggattctggtcttcactgccatgcctcaagaacacctttgttttgcactgacaagatggaaaataaattatattaatttttgaaacccattaggcatgcctaatatttaggcaagagaaaataaaccaagatagatccatttggacaaaatggaaggttggagacgtgtatccccgtgaaatctggttagataatgaatgataagcaggaaggatggcaagcacgggacaggaggggcccacaatggagtgggagatcagccacggagcctggagggatgccacccagcaacacagagctggcgactgcagctgcaccatcacacatgcatcatcagcctatttgtaatatgtctgccacagagagtcctttgggattctaggaaacccaaggaacaagagaaaaaactagagcctgtgctaaagaagccctgctgggcccatgtgaggctggggctcgtaaatattccctgacgacactgaagaatcaagagggcagcccccactttcctacaaaatggagggagccatcccttccctgtccacctcaccaggggtgctatgacatgcaagtgagaagctgggcatgaacgcactttataaaagcaaaagctctgtgtaaatctaactacaaggacaatgccttgggagagattttgtcgggacagagaggagttgccagggaagaaggtttgaaagatacggttgtctagaggtgagaccaaaggatccagagacttggggaccagaggtgacagtggatgacgtgaagccacaggagccccacccccatgcagcctcttccccacccccccccaccacgcgctcaatcatgagtacctcaaaggattgttgggcttgggggaaaagaggtggattcctgggcaagaacctaaagtagcaggactcggaattctcgggaaattattatgactcaataaaagaattcacaccttaggtgtgggagtaagaaca

SEQ ID NO: 1985 - protein, 206 aa, Homo sapiens
MVGLKPSDVPPTMAVKFLGAGTAACFADLVTFPLDTAKVRLQIQGENQAVQTARLVQYRGVLGTILTMVRTEGPCSPYNGLVAGLQRQMSFASIRIGDSVKQVYTPKGADNNFPCHFVSAFGAGFCATVVDVDVVKTRYMNSPPGQYFSPLDCMIKMVAQEGPTAFYKGFTPSFLRLGSWNVVMFVTYEQLKRALMKVQMLRESPF

SEQ ID NO: 1986 - DNA, 1431 bp, Homo sapiens
cagaagcagcagagacaacagtgaatgacaaggaggggccatccaatccctgctgccacctcctgggatggagccctagggagcccctgtgctgcccctgccgtggcaggactcacagccccaccgctgcactgaagcccagggctgtggagcagcctctctccttggacctcctctcggccctaaagggactgggcagagccttccaggactatggttggactgaagccttcagacgtgcctcccaccatggctgtgaagttcctgggggcaggcacagcagcctgttttgctgacctcgttacctttccactggacacagccaaggtccgcctgcagatccagggggagaaccaggcggtccagacggcccggctcgtgcagtaccgtggcgtgctgggcaccatcctgaccatggtgcggactgagggtccctgcagcccctacaatgggctggtggccggcctgcagcgccagatgagcttcgcctccatccgcatcggcctctatgactccgtcaagcaggtgtacacccccaaaggcgcggacaactccagcctcactacccggattttggccggctgcaccacaggagccatggcggtgacctgtgcccagcccacagatgtggtgaaggtccgatttcaggccagcatacacctcgggccatccaggagcgacagaaaatacagcgggactatggacgcctacagaaccatcgccagggaggaaggagtcaggggcctgtggaaaggaactttgcccaacatcatgaggaatgctatcgtcaactgtgctgaggtggtgacctacgacatcctcaaggagaagctgctggactaccacctgctcactgacaacttcccctgccactttgtctctgcctttggagccggcttctgtgccacagtggtggcctccccggtggacgtggtgaagacccggtatatgaactcacctccaggccagtacttcagccccctcgactgtatgataaagatggtggcccaggagggccccacagccttctacaaggggtgagcctcctcctgcctccagcactccctcccagagaacaggggcttctttcttttcgaatgtggctaccgtgggtcaacctgggatgtagcggtgaagagtacagatgtaaatgccacaaagaagaagtttaaaaaaccatgcaagtaaaagaaaaaaagtgaaccatacctgatggggagggttagggaagcctgactgagaacaaacactccaggaataggtaaaagtactgcctgtctccagaggaagttagcaatcctgagacctcctggacctcctgccatggccattgagcaccacactgaccatggccagtgccttcctcactgtctccacacgctccacgttttcttgcacttactgctccctctgcgtggaatgcctcatcat

SEQ ID NO: 1987 - protein, 271 aa, Homo sapiens
MVGLKPSDVPPTMAVKFLGAGTAACFADLVTFPLDTAKVRLQIQGENQAVQTARLVQYRGVLGTILTMVRTEGPCSPYNGLVAGLQRQMSFASIRIGDSVKQVYTPKGADNSSLTTRILAGCTTGAMAVTCAQPTDVVKVRFQASIHLGPSRSDRKYSGTMDAYRTIAREEGVRGLWKGTLPNIMRNAIVNCAEVVTYDILKEKLLDYHLLTDNFPCHFVSAFGAGFCATVVDVDVVKTRYMNSPPGQYFSPLDCMIKMVAQEGPTAFYKG

SEQ ID NO: 1988 - DNA, 82489 bp, Mus musculus
  misc_feature (1)...(82489): n = A, C, G or T/U
gaggaggaggaggaggaggaggaggaatgtcctatttatagttgctgtgtcacaatccagagtcacactttacagatggtggtgctcaggcctgtcatagttaaaagcaccggcttctcttttcagaagacctgagttcaatccccagccccagcacgtggcagcttacaaatgtctgttactatagttccaggggactaaactttttttttttcgagacagggtttctcttgtagagccctcgaactcagaaatccgcctgcctctgcctcccaagtgctgggattaaaggcgtgcgccaccacgcccggctgggactaaactcttacacagacacacatacagacaaaacaccaatgcatataaaataaaaataaatcataaaaaaaaacccatgcctttaacttaagcatttaggaggtgggggtatgaaggtctcagagttctagttcatcctggtctacagggctacacaggaaaaccctgtctcaaaaacaaacaaaccaaaccaacaataacaacaacaaaaaaaaacaaatggtggcgtccaatcccttcattaggacacctatttgacaaagtgcagctcatgtgcatagactaggctggttgttctgcagggcccagctctgctctcatggggtagctttgtgctctgtagtttctgtaatccgaagtagtgtgtagggcataggtgtctcttgtacttagtatccccagccaggagcagcctattgtgtgctttcattgtgcccaggcctgtcctcagtgaggaggggggcagtgcttcctctcttggagctgagtgtactcactttctcatggggagagagcagagtgtgtgggtttcctgtgttggacgaatgtcagttctgggagagtattatagactacacaggaaaaaaaccgttatactttgctgtgggggttgggctcttggggcaggatagaacagggacatcgaatctcaccgttttgaataccgatcttgagaactctggctctgtctttgcttcccagacatgtgagctggattaagtcacagccctgctacttaaccagccaggtgaccttggctgagcacttaacctctttgaacctcaattccttccttggctttgttacctggcctaatcatttgaagggctaaataaagtgagatgtgcaacttggctgtcctctcccctagttgggaagctctttgagggtacaactgaataatgagaagatgtctgaaaatagagtcctaccaattcactatctagcccaggctggcccttgaacttggggtgctctttttgccccagcctctcaagtgctggtgttacaaagcagttaaatctcacacacacacacacacacacacacacacacacacacacacacacacacacacaaatgtagctaggtcgtaaggtgtatttgggcatttgattttccatttaatgtgcacctatcttaagctccttgctgaattaactgtctgctcacaagctgctcccagcggatagggagggcatagacacagtgtgcaggagcctggatgatttgcctcaaaaggatacggggctgagctggggggctaacggtcccttggtacaagaggtttctggggagctgagccaggctcatgataagaagtggcccctgttcctctgtctccccccaactctgcgcccctgtgcctgtggccctgacaacccatgtctgtctgcagtgccggatggaatgctgtgacgtgccagctgagacgctctacgatgtcctgcatgacatagaatacagaaagaagtgggacagtaatgtcattgagactttcgacatcgcccgcttgactgtcaacgctgacgtaggatattattcctgtgagcaggcacagaacgagactccaaccccctcaccctccacccctacctctcagcacatctcctctaactctccctccctgtggtcactcctatgctaggctgctcggggacctgcatgctgagaaggaaagctgtgctctccttgggcacgcttacatgctatccctgacacacacaaacacatgcatatgcagttgtgtgccacatgccacataccacagggacacatttttaagcacatgcaatcacagtactgtctatctttcaaatatattcacatacacagacaagtcagagcaatgaggtaagggctgtgtgagtccctgggggcagggtaggcagagagacagtggggacaagggttcttctctgcttcctggtttcacagtgtgtctgtggtaggggttggggggtacctgtcgggatggggagggctggcagttgataggatccctgtatttttggcctccatcacacccttccttataggaagatgggccagcagcctggctgaattattccttgccctctacagggaggtgtcccaagcccctgaagaaccgtgatgtcatcaccctccgctcctggctccccatgggcgctgattacatcattatgaactactcagtgaaacaccctgtgagttggcctgccctcccctggggtgtgcagaagggtgatgggcagggctgggctgtggctggctgtccagtgacttcgggcaggcatgggggctggtttccttcctgcacattgaggataatgacttcccttcggggcctgtccagtagctcagggaaagggcagtatgggccggctctgccgtgagtgggtgggatgacctgatgtgggtggaccagcccttgggatgagtgaggctggcctataaatgggctagcaggaactagaaggcaggttcctgtggtgggactcacttgaactccctgggcagagagggcaggcaggtgtagttagcctaggcaagggttcagtgcccacaaacacgcataagccctgacatagcctggcacttccctaatggcacagagaaagcacaagtgagagggggcaaggatggcctggcctgattatttttccttaacctacattaggtctggacgggcacagttgtcaagaaatgtgaacagctatgggttcgtgtgtgtgtgtgtgtgtgtgtgtgtgtgtgtgtgtgtaccttatagaggcagtccctctgaccccacccaagtctcacctccctgtgccttccatccccagaaatacccacctcggaaagacttggtccgagctgtgtccatccagacgggctacctcatccagagcacggggcccaagagctgcgtcatcacctacctggcccaagtggaccccaaaggtgagggcttggccctgcagtccatcagcaggggctccttccctgtacagggaatgaactggatctgccaggctatctgaaggccgtctgttaggagctgtttagtactgggggatctctagccaaagctagtggtttgaaagcaatggacccacgaggcggccagtgctcctctcgggagtttggaactgccttcctggtgctagcattcctagcctggacctgctctcaccaccgcatctccttcggccacatcccagaggcctgagctttccaagctgttctttcagctcacgtctgcgacagatgagccctcatctctgttgaggtggttatcctcctagacatcttcctcaggatgtcttctggacacctgagacttgttgtacccaaccgtgaactcaccattgcccttcttagacccacccttcatcagatcagtagcttgctttctggtcccctttgtttagaacttgctagttaattggggccagcttctccttgtcagctcctaaatgtagcacttagtctctctcttcctccctccctttcttctgactcacccaggctggtcttgaactcgccatcatcctgactttgtctcccgcatgctgggaattccaggcccgtgttaacatacttagcccctgttctcaccttttcaccctctgacagctcccagcctatcattcttctggtactcagccactttgtttgtccaaacaagctactagaggagataaaaacaacacttacttcctctgactcacctgcttaaaatgtcactgtgactctgttgccctctgagtccagccagagcccctgcccagggcggggaagggggatctctagccccctcatgcccttccacttcttacctccatgtccctccagcctttatcctcagctagctccctgaacctctgcttcttactcagtgctcccggagtccctgactcccagagtgagagcctgctgcctgtttcagggcccatccccctccagcagaacaccagtctgtgttgaaatgtcacacactgaattcctgttgtgagtgtccagacaggtgcagggtgggtgtcacagaatgtggagtgagttggtgactgaacacgtaaagacaggattgtcattgacagggataccccgcagcctaggtcagggttccctgctctttatgagtgttctgtgtgtacagagcaggaacttggagggagacaggtggagagctggcctatggattccagggcgggctagactagagtgctgagcctaagatgtcttaggaggctcagcaggacagacaggagagaggctgagcctcagggacagacctaggctattagtgtgaggagaaggaggtgacaggctggagcttggtaggtcagaatgtcacaccacaggtcacttgtggttacctagggccgtgtggttttcttctctgaactggagctcagcagacagacagtggggccagagatgagcttgggggatctgagaaggaatgccaagggggtggcctccccacaaactctgaagagggaggggggctggcagtgggtggggctgggtgcctaagggcttctccctgcccccacaggctccttacccaagtgggtggtgaataagtcatctcagttcctggcccccaaggtaagtggctgtgtgctctgggacatgggggagggggtagcactgaggagtagggcaggggcagagtcaacactgggtgatggctgatgaaccaggtctacccatggccgtagttgggacactactctgcaaggaccaagaccagactggggtggaaccctggggactactgtacaccgcaggagggctctggaggggtgtggccctccaggcacccctaacaatgttcgaatggtctacaggccatgaagaagatgtacaaggcctgcatcaagtaccccgagtggaagcagaaacaccagcctcatttcaagccatggctgcacccggagcagagcccattgcccagcctggcgctgtcagagttgtcggtgcaacatgcagactcactggagaacatcgatgagagtgcagtgacagagagccgcgaggagcgggcaggcggtgcgggaggagagggcagcgacgatgacacctcgctcacctgagtgaccggctctctgcaaggaccaagaccagactggggtggaaccctggggcactgagccttctgcacttcctcccttcccccacctgccttctgggggggcactgggctcctgcccaggtggctgcggcatggctggacatggccccaataaatgaaccacacagccccagccagctctttgtgcctgcttctcatctgctcagccccacgctgctctgttctacagttattttccttaatactcttattgttcacaggactgctgtccctataggcgtcttgtaacgtagggtggagcttgttgccccctcctttcctgtggttcctttcttttcgttcatttgcacattcatttttctggtcacaaaggtggtttgctcattttttcagggctcttaagaggagctggtctaacctgaggtcaggcttctactgtgtgatggacttctggtccaagctagctttaaacagttgatctggcatactctgactggctcctgtcatcacagaaagaaggggagggactcacaggtcaaagactagggctgaaggcctcagannnnnnnnnnnnnnnnnnnnnnnnnnnnnnnnnnnnnnnnnnnnnnnnnnnnnnnnnnnnnnnnnnnnnnnnnnnnnnnnnnnnnnnnnnnnnnnnnnnnnnnnnnnnnnnnnnnnnnnnnnnnnnnnnnnnnnnnnnnnnnnnnnnnnnnnnnnnnnnnnnnnnnnnnnnnnnnnnnnnnnnnnnnnnnnnnnnnnnnnnnnnnnnnnnnnnnnnnnnnnnnnnnnnnnnnnnnnnnnnnnnnnnnnnnnnnnnnnnnnnnnnnnnnnnnnnacacttccactgcacttagtgttaaagaccttaggctggtcacaggaatcgtgaggtcccctgaccaagtgtcaaccctcacttatgcctagctgctctgagatctagagggaagcctgggctgcctctgctgtccaagggatgccgagtcccagagttagtcttaggccctgcttttctctggtatttttggcaccacaagaacttggggtctggaaagaactcaagatcttaccctattcacctctcctggaaagccctgccagtggaaaaccttactgggctaacagtcaagtgtttcccagagaacagtttctgaggagaggcctgtcacctggaacatccagccctaggtctgcccataatggccagtagctttgagaacaccctgagaatgtcagactctcatttcctaacctataacctagggtgataatttttacccttatgcaagtgtgagtttttttttttttaaattaatcagaacaaattgttcatcactggaccaggcatgtaataggctctgattaaagggcatcttcctcctttcagggcaaaagccccttgacccaccctgctgatgactgttcttccaaatatgcccactgttcctatggaaaaatggaagcccagctaaattaaggcccctggtttggctggtcccagaggctagcctcaggatccagaaatacctgccaagtctagggatttcatctctctggggaggaggtgagaagctgccagactctggtgggcctttcccagcaccttctgcagggagatgcagtcctggggacagaagcagagtactaagaatggtgcacaggactcccagggaaggtggttgtcccgcctccaatggttgtgtgtgtgtcctctcccagagggtagactcaccagaacaggggtgtcgaggcaaggagactcaaggatccgtggagtctcagcagggacaggatagactagacatgagcctcaaagccttagcaagctaaggataaaggagagacacaaacccggcggtccggtctgcctagggtattgaagatccggactaggctgggggcgggaccggccggctccctgcccgttccccgccctcacgtcccccggtgtcacgtggggcgggcggaagcgccgagcgaggtgggcgcgcccggaccgctgccgcgagttggctgcggccgcgtgtgacagacggtaccgggaccccgagtcccacctcgtggagttctcttcgctcaaaacaggtcagtgaggttgctgggacctcccaatcgccagttgtggcttgcactgcccccattcctcagaagggaatggtgagccccccacccccacccgctcaattttcccggggtcatctggtgcgcgctcttgcctggggatgaagtgaagtggggtcgcctctggaggtgaagtcatctagccagactcgtagggacagagaaagtgagctggtggacaccagctttcagccgtcagctcttctgctttagggcttgcaggctccggagccagtagcgtcaggcagcttggctttcccacttgagaaatgaagacttctacctagtctaccccggacattcttacagcctcgcaaagctttaggactttagccgtggacctgaggctttggtacagcctcgcaaagctttaggactttagccctggacctgaggtgttggtaaccttgggcaagctacttccgtcctccgcacctcaattccccaccagttaatgggggcatggtttctctagagcttacctggcccagttgccaggaaagaaggggtgtgttcgttgaatggggtcaggctgggaatgggtggatgggcttagagcaggtttgcagtgcagcgggggatgggggcttttggggaggaggcgggtaggtgtttggacacagatctccgtgggtagatttgggtgctgggtgattaggagccaggttgtctgacttatgtttctctaaattcagtgtcttagggaaagcttccctaatgcctagactgggggttcgggattcagggttagacttggggatgctcaggtaaggatttgactactgttgggtccaggggaccctgataacctgtacttggaaagttgtgactgtcctgctaagggaagcctaggctcctagcagcgtcattatagggtagaagaaattcagcagaacccagagacaggcgtggacaggtgcagacctggggaggagaggatgcctggatgagccttggtagttaagtggctgtttgctaagactggctgcaaggtgagggcagagcttgtgccgcacagcagggatactgataaccttccggaggagaggcaagggatgtgggtgtggctgtaaggggtggcaagggaggatgtgcagagaacccatccttgggatttatacctggctaaagtttatttagaccccggcctggggaccctgctccccagtgaccgtttgctcactggaatagggtacaagtgagatgtcccaggcaggctactgctggctgtgaggaggtgatggccccgacgccccaggtttcatttggacgttcaggcctccttatttggtccccaccatgcagaggagagtcagtttctgggcaaaggtgttccccaccaagtttcctcctcatccaagtccccgtgttctgtgagacttcagggttcagatgtgggctgcaagttgcagtgccttccagcctggttgtcagttccgggtaatggcaaggctcagggcaggtttctatggacgtctatgaagatggggtatgggcatctggagttctagcactgctaccaagccctgtctgactttgccacactccgtccttttcagagtcccctttccacatccgagggtgggatgattagcctgccattgtgttccaaggacagaccaagagtcaggccagtgtgaatcctgcccagagtcagagtgaaggaaaggggagccggagagcctagcactggctagtggtgatccaggcctaggacctctgtctctaatattctctagggcttctccctccccactccactctcttggctgagctcaaagccagccgccaatgcccaaacaagtggcctctgttcctaggggagggggaggggaggcaggccctgggctctgggcctgcctgtccagcactgaccctgcctcccccttttgctgtgggtcttaactcttggaagcctgaactgggtactggactgtttgagggctggtacctcttgtcctacagctgccctgtccaccttgcttcagatctctgggctctcactctttcagaggggactgataggatgtccttctcagaggagcatgtacatggtatatggatgacagtcagcctctctcaactcctttcaagtccatcaggccagacttagtccctccacagacagcacgaggatgttgtgttttagagaaaggttctgtgctcagaatgacaacccgatgtctgatagtaaagatagaaagttcccttcaatgcatagttttcacagagctcacattttacaccaggacccctcccgccagttctgacagagtacatagcttcatgtccacctatccctcccccaagccagaccccccagacctgtccattccaactggggctccctggggacagcagtccctgcccaaggaagcaaatgtcccctaaatgacagaaatcaggagtggtgaggggccacagctcagggctcagtgcccacagctttcctgtggaatatctccctgcccctctcattttttgggttacagatcagaaagaaaagcctgttctataagatttctgagtcaggtgtggtggcctgtgcctttcatcctaacactcaggcagcagaggcaggtagatctctgagttcaaggccagcttgacctatagagtgaatttaagaaaggccaggattacacggagaaatcttgtctagaaaagctaagaaagtggaaaaaaaaagttcagccctagatcactgggaaagagtgactgggagagacgtggagttaagtgacaacttcgataacaatattttgttcagtataataagtactatctgagtatagtcaaaacagcaatagaagctgctctttcttggccattcccattttataggtgaacaaagtgaggccaagaggcaaagtgattttctaggaaccagacatttcttttcttttctttctttctttctttctttttttttttttttttttgttgttgttgttgttttcgagacagggtttctctgtatagccctggctgtcctggaactcactctgtagaccaggctgtcctcgaactcagaaatctgcctgcctctgcctcccaagtgctgggactaaaggtgtgcgccaccactgcccagtgggaccagacatttcttagactcgtggggacgcttttttgcatttttgttaattagagtgagacccttgagcacagggagagattttacaggttcaaactcggcccttccctagatactccccattgcagtaactggcatattggaggactgcttaacattggtggtgatcaatttggggcaaagattaattttttccctgtcccctggatttcccagaccctattttactgctgaggaagccagggtctgtaaacagtcagcgtcttggagacaaaagcggggacaggagtccaggctgcgggtgtacctgtgctctcctccctgcctggggtcaggggcttctctgaaaccctgagctccttcctaaggctgcccgttgccttctcacagtgctcaggtctgtgtccttaataaaccaggagctagctcttcttaggggccctggtattgctgccatggtattggtaggtattggtgactgaacaaacctgggaaggttcccagagtcaagagaccaaggcgccaaggccgcctgaggtcaagtacattgtgcttagggctccagtgggccagggagggtgtgggatgtattcccccccccccaatctaatcttcttttacctcattttgttttgtgaagacctctcagggccattcctccgtcatcatctgagggtagagagccggagtttctggaatcttagtggcccaggaccccaccggagtcttgtctggccagaccaggctgcagtaggtggctgcatacccaggacaggacactttaaggctgaaatgttcttgttctgtagcctcctaggagccagggtctcccccactggcatccatctctccagacatatttttcctcctcttcctaggtctacctgtcccatatgtggacagcaccagagagaaaccaatgggacagtctcgggctcgatcagtggtagtggctggaagagaggcatcgctcatcatcactctgtcccttgacccacattagcaaactctatgattctgaatctgccacgcaaagtgttaagagacttgagcagtgtggtttatgcaggcgtttccagcttttaaattttaaagtcccagggggcctacaaagcttggatttggagtgggtctccttgaattgaagctaaaccttgtgccacccttggccacgttgtcatcagactgcagcttactgttgtgggttactcggtggctttggttcccttctggcctccaggctcatgcgaccacatatgctctgctctgctgcttctctttctagaaatccacagggccagccctgtggcccaggggtagcacgtggcacagtagtcttatagtggagaacctcaggggtaggaccattgactgcattcacaaaagagaagccctgtggataggagggtgcagtagaggaggaagccagcctaagggctggcagggtcatagaacaaggtcaaggattgctctgtggacatcaaaaatagcatgagatgtggcacagcagacccagatcaagtctgtaaaggatcggggtcaggctggaggaccctacagagaggggtggtgggcagaggcttgagtcaaggacctttggatgcaggaagctggaccttggccagtgcctttagggttttttgtttaaccacatcagctatgtagaaggagacctgttccttacactatgtgtgatgcttcccagaaggctccctggctgggaggctccttgatacgggttggggtacatctgccagtcctttcctatgccattccgtggatagttcctgtcattggattcagcatttaatgtcccaggacttggggcaggtggagccctctctgtacccatggtgtgtgagcttggctcaaacccctgagtgtcagctctcaggctccttattgaggaccttcagtgggctgtgtgtagttttgtaactaagatgcaatgatccccaagaccccagacctgaccgggaaaaaggggaacccactccctgaagggcagaacctggtacagatattttcccagagggcaggtccctcttgcttggggaagaggtgccagagtattagctaattagcccatcagcatgggctgtgtgtgcctccaacacctgctaactcttcctctgccctaaagatgactcagctgggcgtggtggcgcacgcctttaatcctagcacttaggcagaggcaggcagatttctgagttcaaggccagcctggtctaccgagtgagttccaggacagacagggctatacagagaaaccctgtcttgaaaaaccaataaataaataaatatataaagatgacttactcagcctagggagtctgaacatccagggacctgaccaggacacttcctgtggcctgaaaacccacattttcaggtctggagagatggctcagtgacttagagcacaggctgcttttccagaagattcaggtccaatttccagcactcaaatggcagctcacaactgtctctaacagttccaggggatctaatgccttcttccagccaccgagggcactaggcacacacacataaagagacatacatacaagcaaaacatctgtaatatagaataaaatggaagtgtaaaacccacattttgggctagggttgatccagcacccactaggttcaatctccaggatatcaaaaactgggtatgacagtatttctgtaatcccagcacttgggagatggaggcaggagattcagaagtttaaggctgggatgaggagatggatcaggggataaaacacttgccatgcaagtgaagggaccagatgtaccaccagaacctatgacagaagttcaatcatctgtaattcctgcactcccacggaaagatgggaggcagagatggaggactccagaagctgggggccggctagcctggtctgtgcagcagagagcaaccagagaccctttctcaagcaagatgaagatgaagacccacatcaaaggtggccctggttaagctcttgctctctctgagactcacctctcttctggaaatgggaagagtttggtgaggcactgctcggtgtgttaggagagagtggttagggctccggtagtgctggtaagtcagggcaggaggtagaattgtatcaggtgcagtagaataaaaagtccccatgcccggaaagccgctcgctgacctgcagttcctgcttcatgtgtcaaccaggaaatgcccacccagttatcagctgtttactatgtgctacctttgagacacaggggaatcagaccctggccttgtctgggtcgggttgagaggaagcacgtgatccaactgtgacctgggagtcagagactgtcctttggagcaggctggaaaggctgggtggtgaagaaataatgcaggcagaggggattgtgcaagcccaggcctggaagaatgcatgggtgtgaaagaaatggggccagtgtctgagctccctggacactgaacagtagtggagggtaggcaggcaggggagagacatgtgtgctgtgctgtgagatgagtggctgggctcagattcctgggagccaggtgtcagctgctccagagacctgtgcgccagcatttctcctctgtgtggactccccagaagtttatattgagctacccagctggaagtggctgggccagcctcacttgggaagacagctacagaggattccaggggaccccggaaccttatgtctgagagattcctagacttctgccttgaacttcacaggtgccttgcccaactctgctgtctcaccgggtgactgctgtgctcattgtagccatctgtagatcctgtcctgcccacgctgacccactgctggctgtgtgtggtgtgtctgcattctggaggctgagggaaggtggttgttgtcagttctggaccagcccaggataaacaacaaacactggaacaataacaaaacaacaccccccaaaccacccccaaaaactcctccctttgtgccccctacaaagaaagacaatgaaaaaaattcatagtcgggcgtggtggcgcacgcctttaatcccagcactcgggaggcagagacaggcggatttctgagtttgaggccagcctggtctacagagtgagttccaggacagccagggctataaagagaaaccctgtctcaaaaaaaataaattaattaatttaaaaaaaaaggatttctgagttcgaggccagcctggtctacaaagtgagtgccaggacagccagggctacacagagaaaccctgtctcgaaaaacaacaacaacaacaacaacaacaaaaaaaaaaaaagaaagaaagaaagaaagaaagaaagaaagaaagaaagaaaaaattcatagcccagaaagcaagaacacaatgtcagtgtagctgaggactccctggggggctagagcggaagctcgagggtaaagggccttggtgtgctttcatgcagacctgagttcagatctccaacacccaggtaaggagctgggcacatctgtaaccccagcactgggaggacagagacgagcgccctcccgacctcagtgcattcaggctagtgaaactggtgagcttcaggttcaatgagagatcctggctcaaaaactaaggtggaggatgattgagaaagatacctggcataactccctagcctctgcatgcatatacacacacacagacacatacacacacacacacacacacacacacacacacacacaccaaaaaaggaaaacacaagtgaatcttcaagtcttgcagcattaggagcccctctgtctctgagtgttctgtgtcccttctggctggctgtcaccattgtctgaacagtatggatgagtgtcttatttaaaaattaattaatttttcgagacagggtttctctgtgtagaattcctggctgtcctggaacacactctgtagaccaggctgtcctgggactcagatccgcctgcctctgcctccagagtgcgggaagcaagggcgtgtgtcacactgccctgccttggccgagtaccttcgggtctaggccttgtgtagcctgcactcaccctctttctttctctctttctttcctgtgccctccttggacctgcttgtctccacattcgttctcccgtctgaggaaattagagtggatggagggcttcttaggcttatatcccggcttttgggtccccttgaatgagctgcttcaccttcctgaggttcattttagtcatctaaaagagagtcacctgctctctaggatgtgagggttgtgggtagggcgtgcagagtggtggtgggattcttgttggacagtgtggactctgtaagttcagtctttgagtgccctgtgcgggaagcccgatgatggacaggctacacaccccaccccctccacacatgctgccgaccctcttcagcatggcagctttcactttcccaggctagcagcagccagcaagtcctctccatccctggggacttctaaggaagtggcaggttttgtgtctatttcctggggcactagttctgagtacagaaagccagagtcccttcctcatggttgcccagctctatcccaccccccacccccaccttccccacagccagtacatggtgagggtcctgcagccctctggtgaccctggtctgtcccttcctgatgcctgtgatcctgtggtcagccctgtgccctctctccctcctgtggtcagcagcttcctgtttctaccccatttagtctctcagtcccctgagtggagggtgcagcggccacaggagtatcttcctggaaccatgctgtggcaccttgggcagtgtatgcccttgtaggggcaggaagtctcagtccccaggaaggcactgctacaacatgggcaggggcctaggccaatgctcagctgtccaatgtggcaccagggccaccgtagtgtacactaatggagagagctggagcaggaggcagggcttgggaccatggctgtgcagaggcagttaggggaccattcctgcctgatatctgcaggggagggaaaggcaagggacagggagtccagccgagggctgaggctgaggctctggcagaccttggctagaatgtgtgtgtgtgtgtgtgtgtgtgtgtgtgtgtgtgtgtgtgtgtggtggggtgtgtgtgtggtggggtgtcaggggctgggttccatctctagcaaaacaaaaaggcctgggaaaatattgaggagaacatgagtcggaggtacgcctgtaaggaatggcaggggcggggcaggtgtgggcccattgagggcttcaagttgggctatgaaaggaacagtttgtagcactttttcacatggcctaaaaccagccctttgactttcagctttcttgatttgcaagtgagggactaaagagagaggtgtgccttctccctgtgtgacctccatctagggtggtgcctgggtatcagggggccctggatgaggtttgaggctgtgatgggtcacatgctgtcctggggaccaagcaagggtccttgactctggcttttactaacggggctctgcttccttgtggagagttagcacgcccagcctcactgttcaggatggagtgggaggggcctcgaatctcctctagaccagatggcccaggacagtagcaatttcatacataatagttccgctagtaatctatatatattgctgggtgtggtggctcacttctgtaattccaatactcaggaagcaaaggcaggagaattgttataagttgagatcagcctggcaaacatcgaattccaggccagccagggttgttttacataggaagacctgtctcaactcaggggctggagaaatggttaagaccattggctactcttccagaggaccccagctcaattatcagtatccacaatggcagcttacaactgtctgtaacttcagttctaagagatccaacaccctcacacagacatacatgcaggcaaagcaccaattaatgctcataaaataaaataataagtaaaaaggtaacagcaaaattaaaacaacacaaaccaagtctatgttatatttaaaaccacgaggctgaggctaccttgtgtttggttctgagaacaagctgccttgactctcgttttgtgttttagtttaaatctatttctttcgtattatgttgtgtgtacatgcatgacacatgggaggcacacactgcagcatgcatgtggaagccagaggacagcgtcatagaatccattcactcttttctcctttacatgtgtcccaggggtgaaacttgtgtcaccaggctttgtgtggcaagcacctttacctgctgagccatcttgccgacccattggtttttactttaaaaatattatttttgaagttgtgtgtgtgcgcgtgtgcatgtgtgtgtgtgtgtacagcattatgtggaggttcagagacaacctgagtgccatcccctctttttgttgttcaccactgcgtaccccaggctagcttctctttttcctgtctttgcttcccatcttgctggagccttgctgggattacaggtgcatgctaatgctaatgctacacttagctttacatgggtttgaggatttgaactcaggtcttacacttctgtgataagtgctttacccactgagccatctatctccccagccctctttctttgcctgtttttttttttaaagatttatttattattatacataagtacactatgactgacttcagacacaccagaagagggcatcagatctcattacgggtggttgtgagtcaccatgtggttgctgggatttgaactcaggaccttcggaagagcagtcagtgctcttacctgctgagccatctcgccagccttctttgcctgtttttgagacaaggtagctgaggctggactctagctcaggctggcctcttaactcttgattctcctgattgactttacagaatactcggccaccatgcctatccctgaactcaattctagtgatttaaaatacatcatggttgggatgtaattttcttggtgggatgcttgcttagcatgcttcagctccctgtaaactgggcatcatggtgtatggttgtgatacaacacactcaggtggtggagacaggatttgaagttcaaggcaacagagtgagtttgaggccagcctgggatacacgagactctgtctcaaaacaaaacaaaacaaaacaaaagtcatcttcctcttgcctaatgtggcgcgaaccaaaggcctcaatgttccaggcagtgttctacctctaagctcagcccctgtctccattttaatagtagaagtgataacactatttaaaactttaaacaacacagacatgagatttatagaaagcctctcaagatatagctgtgtggctcagtggtagagcgtttgcctagtatgtgggagttcctaggttcaaatcccagcagtacacaaatgtgcacatacacaaaacatggggataggagttgagagttaggcctgaaattgtggccagggactgtcagctatccttttgtcattagcatctcctgtttattaataaaactgtgggttagcagcgatgctgtaaaaatcttgttcaagccaggcacgccttcaatcccagcactcaggaggcagaggcaagtggatctctgagtttgaagccagtctggactacagagaaaggcctaggacagccaaggatacacagagaaaccctttcttgaaaaaccagaaagaaaagaaaaaggttgttagccttttgccagttcctctatgtatggatgcccatgctgtgtgctgtctaggattccagatggagggttgtggtgaaagccaggagaggcaggattgattccccagcctgtcctctgtaggctgagctgcatcctgttgtggggttctggggttctgggggaagaggtacctttttctgatttgtttaagggccccacctggattagggacagcagttaatttagagtggggagcattggggagcagtgaggagttctatgtaggatggagtgtgggattcctgaattataggctcgtgtgtgtgtgtgtgtgtgtgtgtgtgtgtgtgtgtgtgtggaggtggtggtggtgtggagtgcagggggaggggctaagttccatgtagtacaggtgtctggaacaaagctcgttagagaacatcactggagctggggtgacagactcattggggacagaaacctgagaacattaggtactgggacctggctataagcccagataccaagtccagtcaggaccagtcatggccttaggactggggacaggaagtgactgcctgaactgaggaggagtgagcagaagatgaaagtctggcttatgctatgcatgaggtgacgtgtcactgtcatctgagttcccggttctgtgggcagagacctccactttgtggaggggaaaaatgtggcctaaggtgggatggctatacttagggtttcaggaaggcaggagagccaggtggagttaggctggcctcgtatccctggtgaggatgggggccaagcttgggtctatttttattcatgtagacctgggaggcacagccatactcaggaccccccagaaacaggccccactccagatgggataaacagaatgcactgggagccagggagagtcaatagggcagacatagctgggagtagagcaggaagcctagtagaccctttatgagacctgcatgccgcagcttccagtccctgagagtcaggaagtaactttttggtctaggggtctactatgctgtgccccacccctttgcccttgctgctttggctcagagggagttagcttgacagagtcgggggtcacttctgcaccctctgagctgggagcccagccccccacctagttcctcatagctacgggaagtatctccaaggcttcttgcctgctagtggaggctcacagagtcctgtggacacgcatgagagccacaggagcctaggagggtggccctgccacaggtattccctggttacttggcccaggcatatgtggggcgtgtgctgggcatgtcgggggttttagggaagttgtgtgggactcttgggcagttgcctgggggacgggggacgggacgggggggctctgggacagttccgtgtgtcttgagttgtggataggaacatgggttctggtggctgaaaggcagctctgcccagcagctgctagtgaggagaaggcctgaggccttgcaagtttgggaagcagttcaggcgtgcttgtgtggtgctgtggtatgtggttttgtagatccaggtaggtgtgtggttgtggttcttgtggaggtagagctgaggggtttactgaggactagacattggagtctctgtccagctgcctggcttgggaaacctgcagtcctggggcaggggtgggactgtgtaagaagccaaggaaaggagagcaaaggccacaggtaggcctggggctgccttccccttcctctttctccagggctgggtctttcctagaacttggagcagagtcctgtaaagggaatacagcaagggagaccacctggccacgggccctccagagctggagtgggaggagccaggacctttaagattgctctgagtcactcttgtaaatctgaatgcaaagaagacaaggggaaggcctccagagaggcacaccctcagggccagcaggctcacaagtggccttgcaagctgctgcccaaacctccggggtggcctgccttccttctccgctggactgtctcatccccagcatacttgatcctttgctgtgtgctgtgtgatcccgagccttgtacattcagttcctgtctccacccgtcaggcccagggaggcagcccattctccaaagactcggggcttccgcaggggacttggtaagtgtccaccttacccatgtgacattgggtatgtccccagatcttgggatcattgtaagagctaaggggacatagatgggaatctgggaggcactgaaccgatagtggcgttggggctgtgactcccttgctgggttggtgacacttgtgtcactggtcagtagtagtaagcataccatgcaggaaatgttgagcagggccagaaatgggtggtggattcaaattctgccttgggacagggctgataaggtcattaaaagggtgaaagctttgggtccagcaacagggaatcaagctagacctgaacaaagactggctgacaaggattagaaatttcacatgacttccttctaaagtgggactggatgccctgagctccactatgggtggtggggttggaaaatgaggcagactcaggtcatcacagaagatgctgaaggcaggatacaagtggatcctcacagacagaccgaccaaggagagcaggcagaaacatggaggccaaggggcagtctcggaggactttctggaggaggtggttcagagtgggaccaggatggttgatatactcgttgtcagctgactcttttgggggcttccctatgtctggctcgtgctgatgaaggaaatgacacagaagttgtggatggggccagggtttggggtatgtcattgagcatttgggcaagtcacttcctctctgtggtgtttatttcttcatccataagaggcaggccctgactacagcaaatgacaggctgaggagccctggggggagggggggagagggagggcacagggagcccgagcagttgtggcagctggtgggtctggctgagcaacactgaaggaagagcggggtgggtgttggggtgtacccctcagcccggctgcagtgttgttagatgagtgaggctacttcctcagctgggtgtctgcctcccagagagtgagagagcagatcccgggtgctgaagaggtccagcactgcggcgtgtgataccttgctgccatttaaagagtgaaagcccatgtcaaacacctgtggttttcaataaagacaggctagtgttcccggtactctctggcctctgcaggaatgaccacaggcttctgtcagggacagtcacttctgggaagccactctgacctagcttggtgcaggctctaggctgtggtttctgggtggtagtgtccagtttgatgttcctggaggcttctgagttgtgcttccagctccttcagtagcattgtccccaaggctcttagcacccagtccccaggtctctgaccttggccagtgtcctttagtgcaggaataggaacttgagagaggccaggctcttctcagggagagcagtgtgttcctgtttcccagccccagcctgtccagcagtgagggttgggatgatccccgttccccagtcagctgcctggctcttgctcgtgagaggcagcaagcagtgtgactaaggagagcccaatagacagtgcaagagcaggctgggaagatggcccaatggttagaacgctggcctgatgacctgaatccgatctgcggaacccaggtaaaaagctggggaggcagctcagtgagtacaggctcctgccctctagtcggacggcctgaattcagggtgcacatggcagaaagagaaagttgtcctctggtgcacacacatagcataaaaacaaaacaaaatcaagcttagatgcagtggtgtgtgtgtgtcgctccaggaggtgagaggttccagaagtttgtggagagtgagaagaagttgggctaagctgccagctgcacagtggtgagcagtgagagtcgatgtctcaaggggataggtaagggacacgtgcctagagttgctctctgatctcaacaatgtatcatggcatgtatatgcactgctcacacgtgtgcatgcactcacaacatcagacacaaacacacacaaacacacacacacacacacacacacacgagtgcaaaagtaagcatattagcacactctgtcatcccagctctcaggagcttcagtggcagaggccttgcctagcctgggcaaggcccagggtttgaacccagacagaacaaaacaaacaagtgtaatgagttttgacattttaatttatgattttaatgtttactttttgagtgtgagtgtgttgcctgcatgaatgtacgtgtactacatgtgtgcctggtgcctgaggggaccaggagaagcattgagttccctggaagcggtgtgggggacaggtggtggtgagctatcatttgggaacctaggttctctgtaagagcagccagtgctctttaccgctgagtcatctatccagccccgggttttaaattgttaaatattatcatcaccatcattgttattagagtcaggatgttctgtagcccaggctggctttaaactcactgtgtatccaaagcaggtgaattcttgatccttctacctctacttcccaagtgctaggtttataggtgtgcatggccgttcctaacttcacattgctttatagtattttaaacctaaatatccccaatattattactcatcatgcaatcaatagcaagacaacgagatattttgcattctttttttttttcactctcttcaagattcagtgttcctcattttggagaccatgtttcaagtgttcagcatatatggccgtgccagctacctattgggcagggcagggctagatgtgttaagactgcttcttcttagccatatgacatagataagtcactcaacttccctctactccagcctctttatcttaaaatctctagactgttctttgtacttcacagatcgtggcgaggataagtgaatttcagtgtggagacactgggtggaatgcatggtgtttgtctttttcccccccaagacaaggtttctctgtgtagccctggctgtcctggaactcactctgtagaccagactggcctcaaactcagagatcctcctgcccctgcctccctagcgctgggattaaagatgtgagccactttgtctttttaaagcagccatttaattcatccgccactcaggccaacactttctccagggtaccagttacctaccatgtgttttagaggctggggagatgactcaggggttaagagcactgactgctcttccaaggaacccagatttgattcccagcacccacacagtggctcacaactgtctgcaactccagtctcaggacatacatgcatgcaaaatacctatgcacataaaataaataaaatcttcaaaatttcttttaaaaaaatctcagtttaaaatcacattcctggggccagtgctgtctgtaaagggccacctaaggacggggacctcgtgtctatcccttcatctaagaagctgagcattgttctgtactcttgggggacacagtacaggattccctggggtcctggccagccgacataacctagttagtgagctccatgtcccagtcagagatttgaaagcgaggtagctatgtcttgagtgacactggagattgacccctggtccacacacccctgcacacatttgcagcagatccctcacaggccctggtactagcacagatacccatagacacccacatacacataaagcaccattttgtttttgtttttgtgggaggtgttattttgcttgatttttttttttttttttgagacagggtttaactatgtagtccaggctagcctggtacttgttttgttgtccagggtggccccttcttcataacagttcttctgcctaagcctcctaagtactgggaaccagatgtgtaccaccacacctcgttccatgtccctggggttttgttttgttttgttttgctttgttttgttttccgagacgggtttctccgtttagtcctggctgtcctggaactcactttgtagaccaggctgacctcgaactcagaaatccgcctgtctctgcctcccaagtgctgagattaaaggtgtgtgccaccaccgcctggcccatgtccctgttttaaccctgttctaagcagtgactgttgtagcatctacttaccataaataaatggtcatgagtgcctccaaagccattgtgcagggcccagcagttactaggacacttctgccctggttttgccccaggggagggggtctgtccattctactgtgctcacgacccccccccccccacctcacagagcctggtccttgtgagcggcaggagcatgggtctgtcagctagcctgttctctcttcctctggaaaccccctattggctcattctcctcaacccttctcatgtccttgccccagtttgccacacttttgtctcagcctgcttcatggcctccagattagtgtggtcttgtgttcctgtgtccccagctctcctgttaggaaagcatcctaccctcttgcctccctccctgatgcagtctctttgccagactcctgtgtaggcagtccaccactggggtcccagccctgagcctgttagtaactgcatgtcttacctcttaaagggaccgccccatcccaacctcccatcccttctcctggaaggagtttctctggtcttactccatggccagcatcctggtgctctggagccttctctctgcctgctctctttctttacctcctccttggctctactttctttccctgtctctggtttgccccacttcatccccctttccctttctctctcctcctagcattgcttgtctcattgattttctcccccatctctgtccctgcagctcccacctcagagcatcatgaggagcccttgggactaggaacaacctccttggaggaccaggtgtccttggtggcaggtaagtgaggagctgggatcctgaggtggaagtttcatggagactgagactcgggcttttatattctgtttggggagctgatgttgtaggcagaagatgaggcctgaaaacctggtaaagcctctctgaggggctctgggaggagagggcaggttcccaggctgactgattggtgtctcctccttgcttgctgagttttggtttctttttcattcccaagcagtcttgatgataatagccctcccccttttcaacatttattttgtttgtgtgtgtatgtatgtgtgtgtgtgtgtatgtgtgtgtatgtgtgtgtgtgtgtgtgtgtgtgtgtgtgtgtgtgtgtgtgtgtgtgtgctgtgctctctggtgccctagcatgtatatggaagtcagaggacaccttgtaggaatctgaaggagtgttccctgcttccgccctagggattgaactcaggtcatcacctttacccactgagcaacacgttctcttaaaattgaattcattttggggtcttgtggcacaaaatcaaaaagaaggacctaaaaggatcctgtctcctcacctgccatttctccccaagcatagcttttgtttgtttgtttttgtttttctgaaacagggtttctctgtgtagccctggcagtcttcgaactcactctgtagaccaggctggcccctgccttctgggtgctgggattaaaatcatgtgctgctgccaccacctggcccaaatgtagcttcttatgcatctcccagatgtgtgtgctgtggtttgttgttgtttgttttgctttagctcagatgtttatacagtgatgttctgcaccttgctttttatgctcaagcgtacatctttaacatcagtttatataaaccttagggccttacccagtttcaggttttcagtttggaaattgctttcaggttctagttcaaccgtggaagatcttcttcctgctattatgcgattgagggccgctgtccccaagaacactgagtgtatttgtgactgttcttttaaaactcacataattgaacactaggtggcagaatatagaaggagccatcttcctccacaccaaggtagtttactccagggaagctgaagtttttgtgttcaaggccgttctaggactcagagaggggcccgagctatgcaaggtcctatgtttagttgatttttcaaacagtaagatattcttgtgttctcttccctcaaaagatcatctgtgtttctgtccctgtcccctcagcacctctcagcccttaacttcctttctttaaggagagttccttcgtgtgaccttgcctcctgtctctggagacacatggacacacttatcctgacactcaatttgtcgttactgttgttggctcttcttgtatgtacaaggcagaatgtaacaaccctgttttggttcttggtcacataacagggagctcattcatgccagtgtaaaaggatcttcctcattttcctagccacttggtattttattgcatgattaccccctaatttagtcatccatttcctgactgatgggcattttggttatttccatcttatataaaacacacagtttggtcgctgataaacttccatatgtgctgctttggacgggtgccagtaacactgcaggagaaacacctttatttgtgttttaacccagggtgactaggtcaaaaggcagcagcagaggggctcttctagtggctatgatattgcccttcctggaggcacccctgccagtcagggaggatgtgcctaccccgtgctgtgtatattcaggctctttgtgttggtagcatgctgggtggaagtcagaattttacctttgtgtgctgttaagtgtcctgtcctgtgtttaaaggctgtgtgtgttctgaacttctctgttcagattattccccactgccccacaccattctctctccattagttctgtgtctgttgctgtaataaacaccatgaccaagaacaacttggggaagaaaggacttgtttcatcaaacagcctacatcatgaagggaagtcagggcaggaactcaaggcagaaacctggaagcaggaactgaagcagaggccagggaggactgctgcctgctggcttgcttctcatggcttgctcagcctgcttccttatagaagtcaggaccacctgctctggagttgcaaggctctcagtggtctgggtccttgcacatcaatcattagtcaagaaggtgtctgttccacagactcgcccacaggccagtctgatggaggcaattcctcaattagcatttcctcttcccagtaactctagcttgtgtggagttgacaaattacaatgtgctcactcttgtgtgcttccttacccacttgggttcctattctctccccctccccaccatcccccctctccccgccccctcctctctccttttcatttgtaagagagtttcaagtagcccaggtaggctttaaatgaatactgtcttccttcagcctcctgagcgctgggattacaggtcggctctcccaagcccagctaatgtcctgtttctaggtgcttctcagcctttgggaagtaaggggccagggaacacctcctcggtggtttcttacctcccactttgtttatagtgggttctaccatgcagagtagcttgacatgacacttaatgacaaggactgtctggggaaaaatgtagggagcgacagggacgtggctggattggtagagtgccctgttaaggaacagaaagctctaggttcaatactcagcgatgcatagcagggtgtggtggcacatgccagtaactggcaggtggaggaggaaggctttgaagatcaacagcatcctcagctaccaggggagtttgagacgagagaatcaatacatacttatgtgatgacacctatcctgtttgtccgggtcatcttatttgtgtgtgttttgtttgcatgttagactgcccgtcatgtgtgcctggtacttgaggagcgtgtgttggatgcctagggactggagttactgactactgtgagctaccatatgggtgctagggaatcaaacttgggtcccttggaagagcacccagcgctcttatccaccaaacaagcttttcagccccatatacagccccccccccttttaagtcctcagacttttattcaggtagcttctctgactgccttcttctcccgtgtgagaacatttttaactcttcctgttcccttctgtccttcgctctcttcccctcgctgggaatcagcccatcaagtgcactgggacagagctgtgtcgcctctcttggtattttgtgttttgtgagactgttgttgagttgggtctttcatcctggttcccacctggttacggcacagaaatgccgccatctgttgtgttaactttgaactcagcaatcataccaaactcttctatttgtgctcataagtttctcagagaaggagcttgggctcccatctcaaaactcttatgggcaactgtggatggtttatctgtcctggtttatatttgcaaccatttgcttatctgtggttgcctagaactttcagagcaagctggacaataaacctaatgacaaaatcactgtcttgttcctcactgtaatgggaatgtttttcagattttatttttaattatgtgcatatgtgtgtgttcctgcttgttggtatgtgtgccacatgtatgcaggttccttcagaggccagaagagggcactggatccctgggggactaaagttacaggtggttgtaagccatccaacatggttgctggtcctctggaggagcagcgagtgctcctgacctctaagccatgtctccatgcccctgcaattggacttttctcgtagtttgaggttatatgaggtttgtttaagtctgttaagttagctcagtgctgagtaccatcacctcctcagtgctgagtaccatcacttcctcagtgctgtggggatgaccaagagccttcactctttggatctcttagttgcctcttcctgtcttccttggactctcagcagaaagaggctctcaagttcttgatatgagggtgagttcccactgctcagtgcctggtgtgagggagagttcccactgtccagtgcctggtgtgagggtgagttcccactgctcagtgcctggtgtgagggtgagttcccactgctcagtgcctggtgtgagggagagttcccactgctcagtgcctggtgtgagggagagttcccactgtccagtgcctggtgtgagggtgagttcccactgtctcagtgcctggtgtgagggtgagttcccactgctcagtgcctggtgtgagggtgagttcccactgctcagtgcctggtgtgagggtgagttcccactgctcagtgcctggtgtgagggagagttcccactgctcagtgcctggtgtgagggagagttcccactgtccagtgcctggtgtgagggagagttcccactgctcagtgcctggtgtgagggcgagttcccactactcagtgcctggtgtgagggagagttcccactgctcagtgcctggtgtgagggagagttcccactgtccagtgcctggtgtgagggtgagttctcactgtccagtgcctggtgtgaggaagtgttcccactgtccagtgcctggtgtgagggagagttcccactgtccagtgcctggtgtgagggtgagttcccactgtccagtgcctggtgtgagggagagttcccactgctcagtgcctggtgtgagggtgagttcccactgctcagtgcctggtgtgagggagagttcccactgttcagtgcctggtgtgagggagagttctcattgtccagtgccaggctgctttgatgactgagtcaatgaacgaatggatgaacaaattaatgtgtttgtttgtttgtttgcttgttttttaactactgtacttggtggtaggggaggggattgcacagaaggccagnnnnnnnnnnnnnnnnnnnnnnnnnnnnnnnnnnnnnnnnnnnnnnnnnnnnnnnnnnnnnnnnnnnnnnnnnnnnnnnnnnnnnnnnnnnnnnnnnnnnnnnnnnnnnnnnnnnnnnnnnnnnnnnnnnnnnnnnnnnnnnnnnnnnnnnnnnatatttttaaaaaataggatacagagctaaacgaagaattctcaactgaggaattttgaatggctgagaagcacctaaaaaaatgtttaacatccttagtcatcaaggaaatgtaaatcaaaacaaccctgagattctacctcataccagtcacaatggctaagatcaaaaactcaggtgacagcagatgttagtgaggaggtgaagaaagagagacactcctccattgctggtgggattgcaagcttgtacaactactctggaaatcattttggcatcttcccccctcccccccgggcactccacttaagggacatggaggccagcagtgtggccttccatcccacatgtgctcactgagcctccaaacctggccctcacctggggataggtgcctcacagggattgggccctggcctgtgtcttgcagagaagaatgagtacgggtgtcttgcctagtaccgaccatgccatttctcatggcagtagctgagcctgtaggtagggggtgtgatggctgtagaggagatgatatgtgaagaaaccttgagtagatgctacgaacacagggactcacagagtagggagaccagggttattctgtcaggcctggcagctcagctttgcctggtatgtagtcacagtgtagatctacaagaatagaactggagttgggcattgtggcacacacctatcgtctcagtgctcaggaacctgagggaggaggactgatgtaagttcaggctagcctgggctacgtagtaagtttagggctagttcaaggccagagccaaagaggcacatagcaaaatccagggtcaaaacatgaaagccactaacagcgagagaatagactttgagttcatggcataagcaggtctgggtatttcagttttcagctttcaaggcttttgtctttcaggattgtagtctctgggatttaggctttagattttgttctgttggaattctgcctttgaaattatgacattcaggattcgaaccagcatagtgtggaagctcacagagggacactgttggccatgttccccgggttgctgcgcctctcacctgtgaccttctgttccaggtctgagcctagccctgggcctctgctgacagaagccatggcagagggttacgatgccgcactgtctgtagctgagtggctgcgggcacttcacctggagcagtacacggcactctttgagcagcacggactggtgtgggccaccgagtgccaaggcctcagcgatgctggcctgctagacatgggcatgcacctccccggccaccgccgccgcatcctggctggtcttcaccgcgcccatgcaccccccgtccctctgcctcgccccgccccacggcccgtgccgatgaagcgacacatcttccgttcaccacctgtgcccgtcactccaccagagccgccgcccacagctggagaggatgagggtctgcctgccgctccacctatcccaccccgcaggagctgcctcccacctgcctgcttcactccgacatccacagccgccccagatcctgtgctgcccccactgcctgccaagagacacttggtagaacccagcgttcctcctgtccctcctcgaaccggacccccctacccacaggccaggtgagtgacatcacggctggtgggtggaaagacctagaatgcagaggaaccagggttggaggaatgaccctgactgctggtggggacacaggtttagagagaagagagcagggccaggccagggcagagttgggtaaggggcagacgggaggatagccaggacttaaggatacctagatatgtgtagaaagagcaggggagccaccagggtcgcgagtgtctatcccagcaataggggggacccaaatcccaggacctgtctgagcggcagcctgcttaacctgcttactgtcggtcctcttcagaattccttctcctctctccagctagtctcctccttgcttccccgaacttttcccactttctatggacactccactactcattcctcccagctctcggctgtttgctctggtgccagccagagaagcgtctaaagtcaggctcctttggagttttgaagggatgtgctgtcagaggtctcttgtccttgtcactgctggacggtgttggtgaatttcattgatgtctgcagcaagccttctgtggaaggtgggaattgtgttctgatttctagctgggaacctgaggcttgggaaggactagctggatccatgcaggcgtgtgggagtgatgggaggtgggggcagggtgcacttttgtggagaaaacctgtgaggttttgtccatctagagagtagcattgagtcagaggatcttctagcccaagccaggtctgaaattatgagatgtaattgatggaagaaatcacaagatgttttttgtttcctggatccttgggaccctgtttccacagtatagattcatggttcttagtgctattgtaccctctagtggccattctcctgagtgcagaggagagagagagagagagagagagagagagagagagagagagagagagaagattcagagttgctggaattcaagataccctggatttaccatgccacatcccttttctcctgccttctcctaacccagggtgtagattttgatttttttttaaccttaattttaaatgttttaacctcctttcaagtccaccatccaccagaggtaatagaaaagaaaggttattagtatatgggagcagtggacctgtttagaaattcttttttggagcaaatctcatttgaattgttaggataccagtagttcaggtcacagagatcatcagtggcagctcgatcgactcctgagcattttacaagtttactagcagtctagttggtactgtcaggttagcaaacaggaatcagtagcggtggcaggacctagcagtgacagccgggtctcagctgaattggcatgagtcagcaggagggaccaggaccatcagagaaggcaggggacattttttttttcaagacagggtttctctgtatagccctggctgtcctggaactcactttgtagaccaggctggccttgaactcagaaatctgactacctctgcctcccaagtgctgggattaaaggcatgcgccaccactgctccgccaggagaaattcttggctgtgcctttctcagtgaagcagagatcaagaagcccctgtctctgtccgttgggtcctttttatactccccccaaaagtcatgcgtcttccacgggtcttgtctcagcgtgtgagtctgtcttagcaaaacttcacgtgagtctgtatctgctgacgtcactctgtcaattgtcctgcgtctgtggaagtggcaagaagccgtgggaacctctcgagaagtttttttggtgtgtttctctctatggaatcatgacaaacaaagtccaacaatgcgatgtaaggtggatgaatacacgcgtgtggttattgaagaatccttcatcgtgcaccgtttcacgtccttgctttagcagaacgtctttttacctgtgtctgcctcaggaaaacactctttcacatgtttgccccagcaaaacaccatctgacacaactgactttccaaagaaaccattaagtttccacttcaccagggtaaccctccagcgatgttttaggaagggagaggcctttagaagaagacaatgggaagaattcagctgagataaaattttagactatagaccaaggtctataagcaaatcaggaaaagaaaacaagaatgggatttccaccctctgtcttctgccctctgccccccaggacctgatgtcctctggcctctgccctctgccctcaggacctgatgccctctctaacttatctgggccctctgtgggtctcctgacacttgtacttattcaggaaactcttagggtaaataaaaatcttatccgaagccctgagtcccaggatacaaggttccactctcacagtctgaatgcaggtacttggccaggatatggggagtcaaggcctctaagacatcgggttcttcagtagtcatggggctggggggattataaaatggtgtaatacttgcaagaaatctctgtgcattcttcatggttttttttttttttttgctttggtgtttgtttgtttgtttgtttttctgtgctttaggatcaagctcagggctatgcctatgctaggcaagttctccaccactgctctgtgtttccagccccatctcttgcgctacaaatcatctggacgttactcacaatgccagatgcgctgtaaatgctctgtaggtaactaccatactagattgttagggaacagggacaaggaaaagctctccatgtattcacgacacatgtgggtttgccgcatacatttggatctgcagtttgttgactccgtggacgtggaggcagagggtgcatctttgatccccttggggcaaaatggtgccaggcctgacatctttttcctggggatgacacatcaagagtcatctgcagtcttcagctcgtagtatttagttaatgtatatgagtacactgtcactgtctttagacacaccagaagaaggtgtcagatcacattgcagatggttgtgagccaccatgtggtttctgggaattgaactcaggaccactggaagagcagtcggtgctcttaaccgctgagccatctctccagcccctagttgttgttgttttaatttttattttatgtgagtgggtgttttgactgtccacatgtctgtccacatgtctaggtatacatatgcacatatggccagctgtctgggtggtagcatgtctgtgtatttgcatatttgtgctggttctgcaggtggccatgctggatcccaataggtacagggatctgtacaatttcagtggtgacaggcctgtctatgtggctcatttgggctgagcagacatatacatgggcctgtggcttattgctgctatggggattgcagtgctaggctgtgttgttaatagtgtgcagatgctgtttgggtaaatgaattggcacatttattgtttgtgtactgtcaaagtgtgagtcattgtgcacatatgtgtgtgcatatgctgccaagagccgttagaatgtcagctctcctagggctgtgggttcttcgtcagtttcctttacgattggatccccaacgcctggcgagcagtacctaatagccctttatacatgtcatggagacgaaaggcccctgaggccaggagctttcacactggggtgctgagcttgggcgtctgcagatgatgtgagcagcccaccctgggcattgagctaaggggccccgagctcatcatctaactcctccttaattcgtgtcatcccacctgtggggtgggggtgccttcagcagagatggtgggaagcaagaagctgataggattctaggtcacagaaaagctgtaagcaaaccagaaaacaaggaaagatgggggttccctccttcctgtctagtcagattgggggcttttagaagcaggctggcatgcagcctgaagaccccacttcacctctacatctgtcacattgttatttcagcccatggccatgaactggctgaggggaaacttgcccaaagccactccgctcaagaggggaaaccagtgttcagatcctgcctcctgaccctgttcacccggcttcaggtgtcagagacaaaatcctcaggacttgcttctttggatcacagaggaaacatttctgaccaagggtcctagaatcactccacacagacccttccaactctctgtgggtctcagcttcctcctctggtacttggatacctacaggtatttgaggaaaaggaagtatttgcccagagtggctagccactggctggagtcacaccttgcaaggtttcccttctctgacccagaatgccttgccgctcagccaatcccttggtctttctgaagcctgatcacctgttgctggggcagaaactcttcccttcagggagcctattttgcagcttctttgggcctcttcagcaggttgggatgggaaatgcaccataagggctagctagaatcagggcttcctggatacataccctgtgaggcctcaggggaccagctgacagggctaattgccccattttagtttgcacggtgctggcgtggcctgaggggcggggaggaagtatctgtcccaggggattatgggtgacgtttctctttctctctctctctctctctctctctctctcagtgttttcaggaagtgtgttggcctaggcagaaggggggcggggaaggggtaagagaggcggagagcaggaagcaaagaccagagctggatacacacatacacacatactcacacaatctctctctctctccctcccctccctgacatatttatgattatattcagatacatacacatttacacacattcagagacactacccataggtgtgcatagacatacctggggctcacatatacaagggaacaggattcagacacagacgacaatagggcttctggccacaagaacagccagagcccacacaggcttctagggacagacacaggacaccttggcacacactggtctacctggctggagccttaggagttcttaggcctaggacaggattcagcaggcctctgagggtgagtgaggggcagctctggctacggggctgggcaggtgggagggctgggaagacgagagtctctctttgtcactttctgagctgcttttccagggtgctgtgatttcccttggtttgctcagacagttccaggaccctttctcagcttctcctgtggttttgttttgctttgctttgtttggttgtctgctcttttctaacatcgcccccttctccttccttctctctgtgtatccacatcaacctcttctaatccactaatcctaatacctgttttctggtcctttgtcagattctgccccacagactggtgtgtgtgtgtgtgtgtgtgtgtgtgtgtgtgtgtgtgtgtgcgtgtgcaggggtgtctctgctccttagacctctcgtgcttacctgttcccttcaggcagtcattcccagttccctccaccatcaagcaattcccttgggggagatttaggttagtttgtggcactgtcaagtttaagattgctgtgtgtctaaaccccttatccccagcccaaggtgacagggacctccctgaagagggttggcatttcatttgtatggttcctcccctgctggccagggtgggtgattggtgggtgcatgttgagtgtaaggttgccctcccctccttccagttactgggaatccctaatgaacccagcaccccttgggtcactggggacacattatggcctctactttggactggtcaccagaagtggtgggggaggggtcctggaactgtccgaaagctcgacaaggcctgacctgtttttgtcctcatggagacagtagtgccagacccaggaggtgcacagagcagatgctagctgcctcttacccaccacggcaggactggtctggggggctcagactgtggagtggtgtggagtgcccagcaggctgtgttaactaaaggagggtaaaatccacatctgggtagatttcctggagggagaagtgagttttaagcaaaagggaattgatggtttggggtcattttctgtaaaagtttccagcagaagcctggctcacagtagtgcttagggagaggagcccctggcccaggaagaagtgcccagggctgtggggccttggtagtacgctgaactctaagtgggtgctgttaaagggtggattggctacaggctttctagagcaggatgctggtagggtggctatacagagcatactggcagcagcccctttgtgttaagtgacatgtatgctgcagacctcagttcctgcaaaggagacctgacaagagctttgtgcacagtgacctgggcagaagggagtaggacagagccagggtgtgcagcagcagcctgtggtggaggaggaaggacagaagtgacatggaggaagcgaggagtgcaggacccagctgttgaggaggaagtgggcagctgggagggcagctgggaaagtttaccactggaaggggcatcaggaaaggccacagtccccagatcactgggacaggcctcttcttgcagctgtgctggtgagagcctagagggattggcctggattcctctaaggtccgtggaatgttttaggggaaaggttctgaccctggggtaaaatgtagtctgggtcctttgtcctctgaggtcatcgcagcaaaccaaacactgaaggatgtagcatggtaagaaatacagaggtagtctggagaggtggctcagttgttaggagaactggctgctcttccagaggacctgggttcaattcctagagcctacatagaggctcacaaccacttgtaacttcagttccagggagtctgatatctcttctgacttctgtgggcacttccatgcaggtggtacacttcatacatacttacacatatgcttacataaataaatctttttttttccaagacagggtttctctgtgtagccctggctgtcctggaactcacttttagaccaggctggcctcgaactcagaaatcctcctgcctctgcctcccgagagctgggattaaaggcaagcaccaccacgcctggcccacataaatcttaaagatagagaagtattatggagggtgggggagccccaaggaagcccctaagaaacctgaggcatgggggaaaggccatacatagcagaggtggaggatgtgggatatatgtcttaaggaagagcacaaacttggccagacaggtacaggtgtccgagatgaaaggaatgctttatgcaaaggctttgaaggatatgtttctagactgcagcttgggactgtagagatggcccagaagttaagaattcatactgctgccaggtgtggtggcgcacgcctttaatcccagccctcgggaggtagaggcaggcagatttctgagttcaaggccaacctggtctacaaagtgagttccaggacagccagggctatacagagaaaccctgtctcggaaaaaccaaaaaaccaaaaagaaaaaaaaaagaaaaaaaaaaaaagaattcatactgctcctgtagagcacctgagttcggttctcagtacccaggctgggtagttcacaaccacctggaacgccagctccaggggatcctctggcctctgcactcatgtacatacacttatacacaaacatgtgcaaacatgcaaaatatttatagactgcagattagatttttggttggttggttggtttggtttttctttcttttttttaacatttcttttattattattattattagatattttcttcatttacatttcaaatgctatcccggaagtcccctatacccccccacccccggtttggtttttccagacagggtttctctgtctatctggctgtcctggaactcatactgtagaccaggctggcctcaaactcacagagatccacctgcctctgcctcccaagtgctgggattaaaggtgtgcaccaccatacctggcctcagattagctttttgtagagtgctcgaaagtgactggatagggggtggagagtcagtccagagtcagcttcacatgtaggctgcccctctctgcagtcttcctgccctcaaagtgagccttggcttctctggctggaggtggatacagacagaagtactgggagggagcccagggcatttggagaaggagaaggctgtcatgccgcttgaggccttgcctctgaggctgtggtgcctttggctgcagcccaggtaaggaaccgtgcaatcacacgtgagagcagtgtgagtgaacctgccggttagtcagaggggaaacaggctcaggggtgctgactgagctcgggggctcaaacccagatctgcttgcctccaaaccggagcagccacatgtcactgtgtccaggacaagctgcttgcacctgttgccctgtaatggtcattggccgaactttaaagaaacttaaaacttaagtttctggttcatacaattagtgacagggtcactctaatattacccatttagacttggggtcctcatatgtctctcagccctgggtacaaggtcctggggtatttcttctcatcttgggctaagggtctagcctaaggtgggtcaccccctgtccctggtgcccagtcataataattagaatagatgacccacatgtccgttggcaagagaagggcctgaaagacagcagagctggaggtaagcaggaggaggggctttctttgtctctccatggcccgtggggctacattttgaagtactggggccgctcctcagggttggaagtgggtagaaatcaaaggagacggaacacggtgagcacagggatgattcgccagtactcagggctgagattgtttattaagggcggatacccaggggctgttccccctcctggggtgctcccctgcgctcagttctcggtaggggatactaccccttcccttggggatttcccataggctgtgcctttctgacctcacttctcctttcctggccctgactcagcaatactggatgccctgtgccaggcggtctggctgtcatggaggcttcttgccacaagggttatttatgagaggctctgttgtcttccctcctcgggcagatgatacagagggcacccacagctagcaagcctcagggcaggctgtggactgtcaggaccgtggtggaggtagacatggtgaggaggattgtgcttgcctgacccctgaggacgaggaacaagttggcaccggttgccacgctccacccctcaggacactgaggaggagactgacagtaggaagccaggcccacttgtttgacctggagagtaggaatccacacttccccataggccacagtctgctctcagctgactcctgagcatggctgcctctgcagccccttcttcctggtctcccgaaagcaacagtgtggtggattgatgtactcatccggaaggctaaggacatcgggtatctgggaccaggcaggctgttgggcaagtctgcattcaggtgcttggtcgccattgaatcattcatttgtttctctggcaaccaggatgctcagcttgttgtgagtctgtccaccatccgtctgtctagcacgctcttgttgcccattcagccaagctcaacacttggcggtggggatactaccccttcccttgagagtcaaatgctttctttcccccctgcaaagagactcagggagacagcctggtgttgtgctcatgaaagattgttatgctctctgtaccaccaccccttagaatcagttcccagagaaggtaggcagggtatagagagcagctttctcccagggtagagatgggtcatgacagccatcccagctgtcaccatccacacagctgtctagcagccattccttttgacaactcagaggtgagaggctgaggatcagagtaagcaggtgaccctctgggagccagcctggcttagtaacttctattccattccaaagggccagtgagccttctagtggccctgcaagtgtgtgtgtgttctcagttgccagtcactacagagtttgctggcggtttctcctgcagttgtcatgcaggctgctgtagcaccttgtgcaggacgtgactccacagggaagttccctccctgtctgcatggccgtagtacaagctatttggaaacagacacattctaagaaggatgaggtattagagctctcagctctgttagcttagatgctgatggagcctgggcaggagagatgtactttgaagagttttatttggaagacctttcacatacaggggagagcagcagggtttagggaaacagaaaggtatagctggagagatgtgatgtagaggcagggatgcttctacaaggaacagggagaggggaactggtagattcaggagtgacccagtcatatcctcccaggcctccttgcgtttctggcagtcacatgctgctacccactgctgggaacactggggaacagaccaacccgaaagtgaccaaagaggaggaagctgctcactctgatgcccctccttagcccttggcagatgtggacagagatagctggtggggccaggccatcaggactcagccgccattctaactgctgggtgctgaggatcctgtgtgttggtatgtgacctactctttttctgtctgtgaaagcagatcctactctacagaagaggagacccaggcctggagaggctaggcatttatttagtccagggcacacagaagtgaagataccaaggtggggctcaaacctatgtcctggctgacaaagccctttaggagacttttatcaccagaataggacaataggaaaactatggggatggggaagagctgggtagttacctgaagcagcccctagagactgacatcatagatgaataaaggtgtgtgggggtgtgtgtaaagagagcttgggggaatgaggtcaccatttctgaatgtggacagaaaaaagaggagaggtccttgtcccagagactacaatctgggctttaggaaccagtttctgggattctggcttatgacttcagcgctagccttggtgcctgtttcaatcccatcctgtctgctagcatatgccctgtatcctccatggtacatgtcaagacttacctccctcttgctccattccggtcttttctctgtgtcagcatggaggttccatgggtgtgttgctagaagcagaagcactaagactgggcgaccagcacatacatatgggcccaagaggtgctggcctgagaatggtgagggctgtgtgaggcaggctggtgtctgggtcgggacgatgcttgcctagtgagcagggcctcagtgggtcagaaccctggctggtgcctactgacacccggctctggttctgttctcagccttcttgctaaggaggagttactgctgccatcagtgtcaccccggtcccaaccagagcctgcagagactccgtccaccctcctgcctgcctttccccaggggcccctgcagcctccgtctcctcctccctgtcctcctgtgatccctcccaagcctcctcgcctgctccctgagtttggtgagtgctactggggaactgggctctgggtggtctcctgagatcagccatggagagcaggtcatggggcttattccctctctcctggtggccagcagtcccctgggtgtcgtaagccttctcaaagagcacgtcctttctctctcctctgtctcctgcttgccaagtgtgagcgtggccaatctttgaggtatcgaagttcttgggctgagtaacccttggggccaccgctccatcttgattctcattaaccttgtgtgtctcgtttggacagtccccaccccgactcccaggctgctgcttggtcagccttggcccttcctttccttcagtataaatagtacttcctgtctcctgtgcctttcttttcaaactcaagcctgggtgtgtgtgtgcgcgtgtgcggtggggagtttattctagcctgggagtggcctttgtgaagccaagccctagccccttagaggaggtcaagctcctagcttctgagccattccctctcttttaccagacgactctgactatgatgatgtcccggaggaggggccaggggccccagccagtgtgatgaccaaggtaggcagggcaaatgcttgcggttgcattggctgcctgtgttgtggagggagggctgctcattggccttagagaccccaggatctcctcccctagcagagtggatgctaagcctgctttactgtctgcccttataggagtcaccctggggtctgcagctctctggtctatggcttctattccaggcttgagtgtatgtagtctgttgctgtgtgagtcttggagtggcttcactttctctgtccccaggtcaccttctctcttgaatgtgtcactctagctctgagtctttctctgctttcctgcctttctatctttctccttgccctagatccatgtttgccaacagttctcctgaccctgtcaccctggtccctgtgtggtctcagctgctgggggaggggtgcacaaacagaagtaaaagtgctgagttgtgggtgtggagtagaggggtgggtgtggcggctgggggtgtggtctgggatttgagggagaaatgtgacactgggtgatccttgggggggggggcaggaggagcccctgccgagccgagtcccacgggctgtgcgtgtggctagtctgctgagcgagggggaggagctgtctggggatgatgcggaagatgacgatgaccatgcctatgagggtatccccaagtgagtattaccccactcagttgcctaaagcccaacctagcccaccactctaccccagtcccagcctgagcaaaccctcagcctccctccctgccttccttcccttctcttgttctagtggtgggtggccaacgagtggcctgaatccacccttacgcagcctgatccctgatctcccactgcaccccatggatgagttgcctgggggtcccacccccatcacacctgtcatcaaggctggctggctggacaagaacccaccacaggggtgagtgaagcctgccaggtccttctaatgtctgcagggggacaagccatactccaggatactggtgtcatggatccaaaaatcagagggtccaagactgtttgatcaattttccctccccacacactgtaaccattggtaaccactggatgatcttaactgtgataggaaagggggactgggtatgatggtgggacctctcccacctcgttcccagtctttgctgagccctgcctctgcctgtttaggtcttatatctatcagaagcgatgggtgagactggacgctgattacctgcgatactttgacagtaacaaggtgagggctccatcagtccctcacttgacccttgctcctacccaggcctaggctgaaccccaacattgctttaggcagagtccttagctgatcttcagtggggatcctggtctgtgggctggtgagggtagtgatcagagccagcacaaagtcgacctgcagaagacaggcctgcagtcatcatttcagccaactggcaagaggctctagggtacccactctaaaatgcagctcttctctccccaggacgcctactctaagcgctttgttcctgtggcctgcatctgccgagtagctcctattggagaccagaagtttgaagtgatcacaaataatcggaccttcgccttccgggcagagagtgatggtgggagttcaggagtgtatatgtttgtgtgtgtaagtgtgtgtatgagtgtgtaagtgtgagtgtatgaatgagtatatgagtgtgagtgtatgtgtgtgtaagtgtgagtgtgagtatgaattgtgtaagtgtgtgagtgtatgtgagtgtgtgtgtaaatgtatgtatgtgtaagtgtgtatatgagtgtatacatataagtgtatgagtgtgtgagtatatgagtgtgagtgtatgagtatgtaaatgtatgtgtgtgagtatgaatgtgtgtgagtgtatgagtgtgtgtaagtgtatgtgtgtgaaagtatatgtgagtatgtaagtatgtataagtgtgtgtgagtgagtgtgtgtgtgtgtatgtgtgtgtgtgtaggggagaagggcctgtaagttggaagagtaggaagggaacagtgtcccagggaggcatcgtccctgtatggggtctgggaggagaaggaaggagatactgaccattgagcatagccagtgctcctttccagatactccacagtgccacagaggcacacatcagtgtgcacaagggatacagtttccaacagttggggtgacttgcccagtgtaggccacagtaggtggcattgtaagcattgtggcattgtagcctaggttgtccaagacagagaagtctagcgatgggacagaccacaccagtaggattcctagcagaggtgacctctgagccccctagagccaggaggcgccaggggctgagttcatgtgttaccttcacccttttgcagtggagcggaacgagtggatgcaggccctgcagcaggcagtagttgagcatcgagcccgttttcggctttctagtgcttctgtgttgggagtccgaggctccgagcagcctgaccgtgctggcagcctggagctacgaggcttcaagaataagctttacgtggctgtgactggggacaaagtacagctctataagaatctggaggtatgaagggctctaccaggccactgaggtctccctgtcccgtactcatccgtcctcttacctgccctgctcctgtccacctggtctctccctggtcctgcttaggatctaagtccagtactttcccttccagccttttctgcactgggacagcatctcccctcttctctcctgcctgcctgtgcctcatctccatcctgtccctgaacagcaccccccccccacgtcctgtttcactcactcctatgcctcccctactgtcatccccgttgctctagtccagactgctgtcctggctcagattcccgcccttcctccttcttaggctctttccactccctagggacgacttccctatcccttgtcctgcacctgaagccctgttgtcagcctttgccttcctcccttcccacccacccatcaggaattccatctgggcattggtatcacctttatcgacatgaatgtgggcaatgtcaaggaagtggatcggcgcagctttgacctcactaccccctaccgcatcttcaggtgagcccctgctccaccttcagctcatgggcagtcaatcctcttggtatttttttctcccttccattgctcacccacctgccttagtctgccagacgtcttcatccctctccatctgttctggccagctctgttctctttgcccaccacgctgtttatgaggtgtcccaccagcacctgcaaccctccatggcctgggacccagggaacgtctgcagtgccaccctgccatccccgactccgagctgtgggttctccagcagaacttgcttgtgctcaaagcacgtgggcctgttgtcccttgaacatctccccatggcccttctctgcctcatgtggcttgacacagtttacctcctttgcactctgccttgtctgtttcttctctgtgtctgtcgccattcaggccctctggtctccgtctcagtactctggttgccagtctcagggccttcactctatccatacttatatcagggtagtgacctttgatctcaagagctaagtgggtgtttgtccatcctcccattcgaaatatcctatgactttggccctatagttctttgccatagtccttagtgaccacaaatgctgcagccagacactttagggtttccctttctgtcagctgcagaagccactgtgcttcctgattactgtcattgtcaccaacttgaaggaggctgatagaggttcagcagaaagggcttccaccgcttgggaccacgggtttactgcagcggggtgagcgtgcttgttgcttatctgaggccctggcagctttcgagttcctctcctggctgtcctggtggaggccatcttcagcccctctcttactcatggccgttacctcttggtcactcccatgtgacttgcagttggtggtgacagcagcagacaaagagccaggggagttttgtaggaaggaagacaattctgcatttgctgtctagatggagcttcccacttgaagagtctttctgcctctgctgctgagtgctgttaaaggcatgtgctgctacactgggtgctcactaatggacttctttccgggatggagtaaggaggttgagggtggagatggcacacacctttatactctctctcttccgtctgtatatacccttgactggtgccccactgtcctaagggtgccctgtgcctgctctgcctctcaggcctgtccctgcctgtctctcatcatctcctctgccagtctgttttctctctagttttcttgctccctttgttggttgtttcccaacagtcttaggatgacacctcctcccgaccctcaaatccctccaaaccctttcccaccggttctacttatgtgtccctagcttctcggctgattcagagttagagaaggaacagtggctggaggccatgcagggagccatcgcagaggccctatctacctcagaggtggctgagcgcatctgggccgcagcccccaacaggttctgtgccgactgtggggccgcccagcctgactgggcctccatcaacctctgcgttgtcatctgcaagcgctgtgcaggtgggtatgtgtgcagcaggttggccgttgggcagcaggcagtctgctgggcagatcctacagcccttatatctaacggtgtgtcagcattattggctgttctcttgggagaaccttaggtcctcaattcatggttatactctctccacagggatggggacacacaaagagggaaaatgcattttattcagggctatctggcaagtaagtgagctcagatcagagcccaggctgttggaatctgatgtccctgtcacatcagaaccatgcaggaggccaggcccaccagggctcttcatgctgagagaagagccagtgttttgtccagaggggatataagacaagggacccagggacatactcagcgctgtgggccagactctggcttatgggcagaagctgggattggagactcccatccaggaatgggagtggaagcactgaaccttccagatggtctgaaagtcacacatatgaaagcctccatggtaacatggctgaggagcatgggaatggaaaaccatggggcccaaggtgcagtcatctattgactcaagccctaagggcccagcatgtgccatctgctgactgcaggctgggcattcgattatctgagagctgacagtgcgcaggtggtggtttgcacggccgcaggggagaggtgggatttgatgtgggaatccaggggaaaggacagatctgagtgagtcactgagcttggagaataacccctgggcctgtgggactctaaggcagatgtcaggctctggggccatgaggtgtgtgcagacaagtggcagcttcaccggcgaccagataaggaaagtgtcaactctcagagctaacacaggacgactgtggctctctgtggaagatgggtgcatgaatgcagggccagggcttcagtcaggcagtggcgggtgttccttgtgtctctagctcccttctctagtcatggggtccctgctgggacctgtggctgagcaagcttcatcctctgtctccaaccttagcctttcctttccttccagtgacctttattaaatgcttgttctgggctctgaggatgaaacctaaagccaggtggtcaggatcctgttcttatgcagttgcattgcaacgggaacagcaaaaataacacaggagcctatcaaaatggaatgatgagaggtgggaagagaaagtgctgtttgtttgggacattttctctgaggaggtgacatgtcagctgagacctgaatgacaggaaggcatggccatggaggtagggaggttgggaagagagttgaggcaggaagttgaagatgacaggggagagataaggtatttatatctacactggaacagctgatgtggctggagcagggattggcacatcaaagcggtctcttggtagggaagatggtctggagggtctgttgtggctggagcgtagtgagcaatgtgaacaggttctggaccatgccaaagtggagatgcaggctagctccaggcctgcctgaggagcaggagggatgagccagtgctcacaaggagggctgtaccagagtaactgtatccgcctcacctcaggggagcaccgcggcctgggtgcaggagtgtccaaggtgcggagtttgaagatggacaggaaggtgtggacagaagcactcatccaggtgggggtgacctgtggtttgtccatgcctggggtgggggtaccctgcggtttgtccatgcctggggtgggggtaccctgcagatcatccatgcctggggtgggcatgccctgaggtttgtccatgcctggggtgagagggcccttcgttcggatcgtccatgtctgaggttgcctctctcagctgctcccctccacccccacctcactggcctcagaactttggagctgagggagctctgtgataatctagtgggtggggattttggaaaagcctgcttttagcaatgtcagcaaactggctggtgtactgagaatgtttttacagttttaaagggttgtttaaaaaaagaggtttgacagattgtatgtgttccataaaacctaaactatttattatttgaccttttagagaattgctgacccctgatatagttcagctgttgtcctgatgtggagactggagccctgggttgggctgtaatgggcctgaggttacctagcctctgcatattaaccactcagcctgctccttcccaccccatatcctagctgggctgggagttcgccactgtgcacaccactcagagcctctgagctctcactgcacccgaattcatgtgcacagggtatataatgcatggcttgaggcacacatatgtacatctgtttatacctatgctttaaacttctctggtacccgtgtgtgattgttgttatgggaaacctgcagcaggaggccggaccaagggacctggcactcagagcttagctgctaagttgggaacttcatagcatatccagttcatgtgcccacactgtgttcagtatagcactgctgggaacactgcttttgttaatgaattgtcttttagaataatcctgagataggattagaatacccaggatacagttgagaacattgaggctgaggcccagggaggaaaacaaaacaaagcaaaacaaagccaactctgatcgggtgcctagtggcaaggaaagtttctgctttgtcctctgctgagactccagcactctaaatgattgggtgggaagcccaggaagtgcctgtgacagcctgatcagcagaagggaaaagtgagcttgcccttaatgctgcccatcccccatcttctagaaactgccacccctctctcatccagagaggaatgttaggaacagatagaccccaaatctctgcctgcctagcctattggctgaaaggttagacaccactcctcgctgggacagtttcaggaatgcagagttccagatgtgggcctgggtgagacaacagagagggccccagagaccaggcctcaaacgttcacctatcagactgtcggagacaatctgggctcagagcccaggccttgaacaagagtacggtggccatcagcagacccagctgctcctgacctccccttggggaaaatgggtgtgtggtctgtctgtctgtctgtctgtctgtctgtctgtctgtctcaggagttgctgcccctctcacctcttgcccgtacccacagctcttcttacatctgggcaatggccccgggaaccacttctgggctgctaatgtgcctcctagtgaggccctggagcccagcagcagccctggtgcccggcggtatcacctggaggccaagtacagagagggcaagtaccgccgctaccatccgctctttggcaaccaagaggaactggacaaggtcagcacacagagcctctgggattcttgagccttcttgtccctgcattatcccttgaacccatccctttcttcctgtggccccattcctccctctcaacccatgtcttccatccgcttagagggctgtgcatgtgtggggagattgaggcccacagggcagtagggcctgcctaaggaaagctggaacaatgtagggaggagtcaggcttggttcttggtccagtgccatgtcttcagcatctggctgcctcctcctgattcctctgtctcccgcaccctgtcctgttctttcagaatcctgccaaaggagtgaacttggtggggatgctatttcctgtcaggctcatgaaaaacagctggaccactctgacccaccccatccacgccccattctagatgaggccccatatgggccccaggccccagaagattgggagccaagtcttagaccctgatctggctcagaccgcttgcttagaggcagcagggtaacatttgtaacctgtgggcggcagtcctcagctcttcctccaagctgtcctatccaggcaggctgagtctagccccagagttgtctagaaaccaggcctccacctccccaggacccaggcgtccagcccccagttcagcccagcccagtctggcctaaaagccagaagggtggtggctcccattggtcgggagggctgggccggcagtgaggaattcaaatgtgggaggaattagctacaacccctcagctcctccctctgcccctgctacaaggcagagggagcctgagatcctccaggggctccttgtgccctgaccagcagctgtgcctcaggacccacagggtgagggcctgtggctaggaccccagcctcagctgggtagcctctgcccagcctccctggcttgccctcccctcttctttttctgactctcatgcctttcttttcttctcttctggcttctttaagccctgctctctttcagtctgaggatggtccatgcaggtttgagtgactccttccccttccctcctccacctcctcctcccatccctacccctccacctcccactctttcttggattgatctcccccaccccctcctctaggccctgtgtgctgcagttactaccactgacctggctgagacccaggcactcctgggctgtggggctggggtcagctgcttctcaggggacccagcagctcccacacccctggctcttgctgagcaggccggacagactctgcagatggagtttctacggaataatcagagtacaggtgagtgaccggtggctctgtcctctgtagctggaggtccctgctggcagggtctggtcttttggagagttttataggggtgtcaacaggaaccatgaatcagctgagaacctggatttgtaggccactcccaagctgtgattcaagttcttggtggtccctggggcagtaagcagcatgatacttgggacaagtgtggcttatgggtcagtgcttcgtgtgagtggccttttttgtctgtatctctgtgactgttgtgtgctctgtcctgacttaaatgtgggttcctagtggagctatctgctctaggaagaaccttggagctgcctaggttctctttcctcatgttggtgatgctgaggctttggggtttgtgtatgtgtagtgggtctgtgttgctgtggaggagggtgttgccatgtgtgtgtgtgaactacacagcagccttgtcgtctgtttgctcagtctgggtggagttccatcatagacctgggttggatcccatttggctcctattcttgggatgggtgaggagggggtcgctagggtgaatgcgtcggttatggcccaggccaggtctcttgaggccacatcctaaggcagagggtggggctcagcggctggggctctgggccttgggccatgggtgggtggggtgtgctgggctggagagaacccaggtgtctaagggaggtgcaagagaccacccagctggcttggactacgggggcaggacccctcagtgctgagcactgaatccagcctacttcactgggctttgtgctatctgggacaaacctctctctagggactactattgagttggcccagagcccccctcattctaacatgcttggctctatgcctccaacaagcagtgtggggtgggcttgggagtcatggagccttcttaagatgggtagggctggagctgggccctgagaatggagtgacatttccactggtgagcagaggttgagatgtggcttttcaaaaccctgaaggtagcagtaggagcctgacggtgctggtagggagctgaggaaacagggctgtgaccatgaacctaggtactttgccccagggggcatctggagagggcaccacctggacacccagtgtgccactaccattctttcttccactccaaagaggtccctcggttggactcagtgaagcccttggaaaagcactactccgttaccctgccaactgtgagccacagcggcttcctgtacaaaactgcttctgccggcaaacctctgcaggaccgccgtgcccgggaaggtgagtacagcatcttacccatccaggcctatggtgtgtgttagcctggctgcagggccagcaaactagggctggtcctgctggaggacctgagggtgccaagtggactctagcagagccacttggaaagtcttggatacggtctcttgaatacaatgagtgcttgagaaataggctaatcggggtgggacatggagatggcaccaccggggagcgtgaagtccatatggagcccccgttgggtgtggccttgtgctgagcagctggcatattccagatgtggatggaaggcggtttgaggacttgaacttgagtgccatccctctcagatctcagttgccttccatttactccctgcctccaagttcagcctatagtccttgcacatcacccaagagctacctaccttcctatccggcagactcccctccctggattctgccccagctctgtggctttgtcacacaagccagatttacctacccccaccaggaatctgcatatgctactgtctgccccaaaggctttccccaaatatcccttaaaacctcatgtctttggggatatcatgtctttcccagccactcaatactgtgccccctgtcacccccaatactattttttctcttactgttccatctgatttttattcttatttttttcctccaagataaagtctttttgctacccagagcctgacattgaactcctgggatcaagtttccatcttgtctcagcctttccaagtagctgaaattattatagtagatagtgccactatagccagctcagttgtcctttattgtatacctctgtatacatggtacctggtacctattgtagccctagcacctggggcgcactggtacccactggtaacgtagcatacatctgcagaatgaagaagacctcagcaggctagtgtgcttctcagagcacatccttgaggacagccttggagtcacatggttctcacggacaggatgagggacagcaagctggaggagcagaatgcccactgcttacagcctctctcggaaccccttcttggagtcccccagatactctctctgacagtactctctaactcctagatggtgtagccctctgctgctcctggtcagttccctctgcctgatgatgtcatttatggaacccctctgagtcatccttttcaccctgagtgccaggaagctctgagccactgtgaggctggtgccgtaagctacagtcgcctgcctgcctggctttggtgctctgctctcttacctttcatggtccaggttcccatttctggttctactggggatctcgtgtatcttcagagccattgtaggaggaggcagactatagagtgaggagtgtatctggcaaaggagacggggcacagggtgggtcttagggttttactgccgggaagagacaccatgactaaggcaactcttataaggacaacatttaattggggctggcttataggttcagaggttcagtccattatcatcaaggtgggaacatggcagcctgcagtcaggcatggtgcaggaggagctgagcgctctacatctgcatctgaaggctgctagcagaagcagctaggatgaaggtcttaaagcccacacccacagtgacacacccactccaacaaggccacacctcctaatagtgccactccctgggccaagcatattcaaaccaccacagctcccaaggcttcctgtacaattgaagctgtaggtagaaggagcagcagggaaagaagctaagagtagccaaagagacagacagaggcagacctaggctgagagacacaggttgccctgatgattgacagcttgggacctaacatttaaagagaagtggggtcaagactcagtcgttcctggtctccaagctggagaccaaaagttcatatcggctataggggagagttggggactaggtatagagggctgcagctgggggaatactcaggtaagtggtgagttaaaatgaagagcttataggttgggtaggagcagagacccagggaaatggcaggagtgcttttcagccagcctggggttttcttcatggttcctctgtctaacttctccacagagttcagccggcgctggtgtgtcctgagtgatggggtcctgagctactatgaaaacgaacgggcagtgacacccaatggggagattcgggccagcgagatagtatgcctagcagtttcccctctggacacccatgggtgagtacccctaggcataaccacaaactaccagtgctaggaagtccagtgtctgattgagaagacagggacataggcccagagaaggacaggaccttctcaggtccacacaacaaagagactgtaaacattgaccttagctcatgaggctgcagcccaaagctgctcgtccacctcttgggaatcagggcaaggaatagagaattaatgggggaggagggcaggctgtgctggatgagtgaatcctgatttgtatatttgtagctttgagcacacctttgaggtgtacacagagggagaacggctgtacctgtttgggctggagaatgcagagctggctcatgagtgggtcaagtgcattgccaaggtaggcctgggttaggagggcaggcgtgtgatggaggcagggcgggccctctggctgaaccccatgaactccagttcttccatctctgatggagaaggagccaggcgtgggtataacagactcaggacagacctctcagatcaacggcaatgcagatgtagccctctggtacctaatggatatttgttatgaggaacatgtttgggggggtcattgtttgcaggtgtgcaattaggctagatgggaaggcagggaggctacagaagagagggctgccttagagacaagagtcaagagccagccctcttgtgctttgagagcctggggcttcattcctcattggctcatttgatgagctctcaataccttctgaggatcagtgcccagggcccggaggacccgagtgtaccagtgctctgttgttccagtgggagtgcggcagacaggctgagtctagacactatggtagcagatggtgaagtatatggacactgggaacacagagaaggacacatccaaatgggtacagaggacatggtcccaaagtcctctgtcactgtgctatgctctgccttgggaaggaggaagtagttagagggaaaagagcccttgcccacagggtgtctccagcaggctgtgctgtgcttacatgctctctccactatttcccccccgactaggcgttcgtgcctcccctggctgaggacctgctagcccgggactttgaacgtcttgggcgcctaccctgtaaagctggcctgagccttcagcaggctcaggaaggctggtttgccttgactggctctgagctccgggctgtcttcccagaggggccctgggaagagccgctgcagctccggaaactgcaagagctttgtatgtggacctttgcttagttccccaatctnnnnnnnnnnnnnnnnnnnnnnnnnnnnnnnnnnnnnccccacccccctaccccccaatcccctagtccttgtctggaagtctgagttctattatggcctgagcagatgatccagcctcccctccatatcctctcctgtccttgaagtacatctcagcagccctttaggttggtgggtggaatctaagggtgagacccagacagcctcaggagggagcagtgtatgggtcatgaataaggcctgggcctcaccttggctggcccctccatagctatccaaggagacagcgagaaccaagtgctggtgctggtggagcggaggaggtgagccttggcttccctgaggatcctggagaagcctgagggcaggtgggatacaggggcaggcaggtgggacagtgactatctctgctccaggacactgtacatccagggtgagcggcggctggacttcatggcttggctaggggtcatccagaaagcagcagccagcttgggagacacactatcagaacaacagcttggggactcggacatcccagtgattgtgtaccgctgtgtggactacatcacgcagtgtggtgagcccagcctccaagtcccagccacccctcttctctagtgatacccagaccccagtgcccaggatccctctaaagagtggtttaactccctccccaggcttgacctcagagggtatctatcgaaagtgtggtcagacctccaagactcagagactgctagacagcctccggcaggacgcacgctctgtgcacctaaaggagggagaacagcacgtggacgacgtctcctctgcactcaaacgcttcctcagggacctgcccgatgggctcttcacgcgtgcgcagcgcctggcctggctggaggcctctggtgggtcctgctgcctgcatccagccccatccaccctacctacctcaggatgtccccatcgtaccctgggcaaggcttgccccagctcctccacctattctgcttctaggtcctctagtcactatagagagggagatgctcagaggtggagagtagagcactccctgtcctgataggtgtctgtgaatgatgcctccatcctgagaggcaaagctgttgggagggggcattggtggccagtttctaacccagtccatctctcccccacacacacccagagatcgaggatgaggaagaaaagatctccaggtatcgagagctcttggtgcatctgccccctgtcaaccgggccactgtgaaggcccttatcagccatctgtactggtgagggccgtgccagagtgaggctctggggagatgggggtcgggggaggttcttctactcccaacctggctcactgccctctcctgggaaacaggtgggtctggggaccacccaatgattgccctgatcttggacgttgtatcttagcttacgtccttcagggtaaaggggagaatgaggtatttgtcagttttgggccaggttactgaggccaaatcttgctccccagctctgtgccttgccaggatgtgaaatgtttccctttcactccttaaagtgcggtctactctgacctctttgacctcagtcccttggctagtcttgcgcctgatgggaactagggaggtggctgggaagctctggaccaggctctttaattatcagttacctgtctttccagtgtacagtgcttctcagacacaaaccaaatgaacacacacaacctggctatcgtgtttgggcctacactcttccagacagacgggcaggactacaaggccggcaaggtggtggaagacctcatcaaccactacgtggtggtgttcagtgtgcgtcccagctgggattgggggtgaggggaggggtgggcaaggctaagcctctcagatggcagtgacagctgaccctccccaggtggacgaggaggagctgaggaagcagagggaggaagtcacggccatcgtgaagatgcgagtggctggcactgccagtgggacccaggtgcaggccagggtttgggaaggcttgggctggttgccagctctgctcccagacctgtagctgagccccatctctcctgcagcatgctggcgacttcatctgcacagtctacctggaggagaagaaggtggagactgaacagcatgttaaggtgggggctgttgagccaggctgtaccagggcagacatagtcacttagagatgtgtgaggttccccaaagacctctttgcatctcggggctcagaggacctgatgaggaatgggtttgggggccaaattacaggagattgtggccacatagaagctggagatgcatttgggactggctgatcttgtgggtctgtgcagatcccagcatccatgactgcagaggagcttactctggagattctggaccgccgcaatgtgagcatcagggagaaggactactggacttgctttgaggtcaacgagaaggaggaggcaggtaggtggccatgggctgcctttagcccaaccatcatttctcccgctccctgccgtttgggagccagaggttctagatgacactttttgctggctcacggatgaaaattgtggtctccatgctggtggtgactggcagctggcaggtctgggtgacagtgccatccaggtgtcagaatggtgttgcttgcggaagggacaatgctgaattcaatgacaggattgtagaatgatactattggggtaaagagggtggtggatagtgatcatgcaagcaggtggctgtgatgggggagcctggctgtggtggtgagtggccagttggggccttgtatggttgagggagccatgttgaggtgagaggtggggatgttgctgatgcaagcgtcagctgtttttgttgagtgtcagttgctagactgaggacccaggcagtggttagtctagtaagggacagagatgctaataccatgatcactctaggaaatagacaactcccttggtgttagttaactgctttaaaggaaaggcccatgtcgtcagcagaacctatgatatggtcctgggttctgccttttctctcggagtatccagataccaaccgtacactggctcggagaggacagagtgaagttcagaagaggtggggtctgcggtctgcctcttcccttcggagtgtcagatgagcagtctgggccgagcagggtgttggcctggttgggagtgagttagggcagagcttcttcaaagatcttagtgttaaggctcttttagatgcaggccttctccgactatctttaatgaagtagctctctaagatgatcttagcttgtttatatttttttttaattgggggtgtatctgaactttatttgggggtgaaccaagtgttatatagtttggggggggtgagaatatccaagatgcgaaaaagtcactggctgagagctaagatactaagatacctcattagcctggagaggtggtctaggtgctgttatatgattggctgactgcctgtgaccacctgattgggggtcgcttggttacaagctctgagacaggcacgaaaacagggaaggagttaggcagtctcaggatgagattctagtatcagttttttgagatttccagggtttggacaccctctgcctcacccagtccatgccagttcctctggtggcgtggtccacatgcctgccctacactatgcagggctgatggctttggagtgccttagcctgctgtgaggaagagtaagggctacttggtaaagacaggacaagtgatcccagaaacaagaccagctccagcacccggctgggccttccacggcccgaggaaacccagggtggaattggaggtggagtcagccacccagggcctggtggggctgcagggctgtgggagggctagtaacagggctttgggaagatgatgtttgctgctagattgggaacgtttgacaggtagagtacatgctagaggccatttgatggtcagactgtgcgggacaagtacagatttgacccacaagtgtggaaggagctggagtatttctaatctgagcacaggcagtgtttgttggggacacctggggtgacaatatagccttggttttggctatgagcaggtatgacaagtcagaagctagcttataggaagggtgatcatgatggtggtgtgtcaccatgctagtggacgctgagctgtgtaggtgacatgtgtccatttgcttgcccttggtggtactaagtggtgtggacccagtgacagtggtgtggcctctccacagagcgcccgctgcactttgcagagaaggtgctgcccattgtccatgggctgggcatagacagccatctggtggtgaagaagtaccagtccatggaggccatgctgttgtacttgggtaagtggcgtctcggggaaggggatgtggggtggataggtacctccatctacaagcagggtgggagctggtggcaacaggacagagcaggtcaggtggaggaaactggggggcctccatggggaggctgggacatgaggtggggcactggagtctgtaggttgggcagtgtaacccatgcccactctggacctcccttagccagccgtgtgggtgacaccaagcatggtatgatgaagttccgtgaagaccgcagcctcctgggtctggggctaccttcgggtggcttccacgatcgctacttcattctcaacagcagctgcctacggctctacaaggaggtccgggtaagccctgtgatggacattagtatctcctttgtgctcagacactcacacgcaagcattgtccttggtctgcaggagcgaggtccttgtctgagggtctcggcagcaccatgactgatgataactgtatattctcctgccgggaccctgagtagccactcaaagcctctatccacgtgaggccttacgtgaggccaggacatcatacacatgctcccatgtttccctgtgcctgtggcttatcacactctcataagaatgtgtctgttccatggcatctattttgagttgtgcccaatcctgctccgccccttcctaggacacagccctcctgacctactctacccccatgcccagtggtctcctagaccacactccttggcactccattcttctgtacacagatgccctgccatccccctctcccttgcccttcacaccactacacaatgtcctggctctagactgggatgatgccctccataaccctgctcctctatcaaacagagccagaggccgtggagcggggcccctgagaccgtgagtagctgtgggccagctgccagctgccttccttacactacctggggccaggcgagcagggtagagcttgaagacaccatcagggctcccagttctctccaagcatggctccctgttttcctaccaagtcactggcccctaccctgacccaagatctttttctcaatatagggtcccttgttggtgtgatgctagaatttttcgtagtgctcagagaagttttggaggcagtattagagacccaagtgtgggttaggactggttcatctcctcttactgtcagagctccccaccttccaaacctagacagagtgctggggctgtccttgaccctgttgggacacaaggctgtaagacattctctctcacgggtggctgtgctttcccagcctccctagctggtggcccagccttccttggccactcctgagagaccctccatgtgcctcttagggctgcccagcctggctctaatgtctggaggttgcctctggctcaggttcagctgagaagcaccgtctgtggtataccgtgggtaccacttttgccacagggcacacagagtgtagatggttctgcaggagagcagtggaggctcgatgccaagcacggtgttctagcgtgaggtccttcagtgaccccgtcgtggtctccagccctttcttgcctcttgcatctcctgagcatgtctgaacagatcttgctggctgccatggaagatcagatggagggagcagcatccccatctccgtttctttgtgcattgtacctctgttaatgctgcctggactcctggcaggcactcccgtttgtccttcctcctgtggatctctcacttctgaacctgcttctagaattttctcccccctggtcctccttctagaggcatttccttagactcacggagcagagtgaggccacctgtataggtagaagggaaggagggcacctgaggcaccccaaaaggcaggtgctaggcatggagaggtggtctgatggttactgagcagggcttggcatttgtccctactcctctcagagcaggaagttacctttccaaggtgagaaagggcccagggactttcccaaggctactttgctcatggcaggctaggatgtaggccagtgttagggtttgtcctctgtctggtgtcctggcagtttagagctccagggtatagcaggaaagctgccaactgttaacaggcaatgctgtcatctcgaggccactgaagtgttgatgattctgacatcagttggcttatggggccgcaggaaagaatatttgaaattagaatagtctcataccaaggagactctgtggcctctcagtccccatcccaagacctcctgctgtttaagactctggagcacgtgagaaaggcatattctagaaaaatcatggtactagcatgaggtacctgagtactgagcataaattttatttcttggacatcagggtaccagaaccctgagctgcttgaaaatatagttcctatataggagttagtctcttctctgtgtttctgcctccccttaccccacactgtccaccagtctcctgccctgacagggactgcccaggaccttctgcctgacttcttccagcccttccccattccattgtctttgcaggggcctctcttctcccagcctgcatcctgttctgtctatctcccatcccttcgcccgtgtcctagtgtgcaggctgactttttcagtgcctcagccttgcctctgcctgatgtgtgtgtgtgttgtgtgtgcgcgcgcgcatgtgtgcacgtgtgtatttgtatgtgtgtgcacatgcatgtgtgtgtatgtgtgtgtgtgtgtgtatggacgtgtgtgtgtgtaggtcttcctctcggtgttctgcccacaccctgtcctgccccccccccaaccttagctttattgtccatcccacatcttgatccccattctgcagccagtggtctaggctgtttgggacatgtgattattgggtgaggtgctctatttgaagagttggggctccttcatccaccagatccaccaggccttagatcttgacatgttctctggcccacatccctgaggtgacacagaaggaccctctagttctgagacagattatccattcttctcctgttaaggagccatgcctggggtggctgggagcaatggtggggagggctcggttttggagcctcagttgcagttgtaagtacatctccctcccctaccatcctctctggtacctctgatgggtccaggggagcctggtaaggggaggaaggaagctaagcaaatggctcccacaactggaagaagttcattaaccttcaaacagtctcttccttgagggtcattgctcgtgtcccctctgctttcgagccagcctgctcccaccaagcctagacccatatatgcagaggtgagggccaggcaaacatgtcaacagtctggttccccactctggtctatgggtctcttgcttcctgccttagaccattgggacttctccctctggcctatcatgcagaataccatgcaagcttcagtgtcagccattggccttctgatggggccagatgctaatgatggccggtccccgagcttccgttcacacagtcaaccctggagcctccacaggcaggggaagggagcatgatgagtgactgagacaaatgcagaccctagtggacaaccttgaaggcactctcacagcctgggcctgcccccgtgtgctgtggggggaagtcaggcctgtgacttccaacctgagtctccagtttgacaagcggcagggtctgggaatcattgccctggagctcccagctggagtgtcatctttggggactgagggttgactgtctgatgctactgtcatctttggctggacaatgaacagggagggctttggtgagaaggcttcctggaggaggagccctgttccagaatgcctgggcgttggggacgggggagggcagtatgccagtggaagagctacttctgactgtacccacctgactgatggaagtgtctccccccactccccagagtcaccggcctgagaaggagtggcctgtcaagagcctcaaagtctacctgggtgtaaagaagaaactgcggccacctacttggtaagccaggactgaggtgccaggcctatgtctaggacctgtggcatcaagaactgacaggaaggcacagctggggttcagagctttataggggatagtgtagtggttttatagtcggggtcctctcggctagtagcatcaccgagacataccttagaagtacagtctttcaggtaacccctgagcttcctgagtttggggtgctgtagtagggcttggggctcagggctcagtgtctcctcgagctgtccaggtaacagagtgagtttatgatttggggggttggtgtgttttatgtgtgtggtgcaggccagtgagtgtctgggtgcatgtgcctgtgtgtgctcatgtggaagccagagcaggatttagggtgtcttcctctgtcactctctgccttattctcttgaggcagggtgtcactgaagctcactgtttcagctataggtgtctggtcagtgtgccctgggggtccacctgcctgtctccgctctccagtgctggggttacaggcacccacggttatgcccagctttttatgtggttgctagggatttgaacttagaacctcatgcttgcagagcaagcactcttattaagcggtctctcttagcaagtcgaaaagcaatgcgtgccactgtgactgttaggcaccgcagtcgtgtgacttgatttgctaactttctcatctgctggctgtgccaggctacctctggttcttgggtgggcttgggcagacatcagcacagttggatggttttttttttttgttcttcagtggtgagggtagaactcagtaactcaggcaatgctagacacacgtaccacccccagctcaggccctgtgttcaggtggggagagaaggacacgggccctagtgtgctgcactgggggaagctttggcccttccctgcccaggcttctgggctctgtcccacaaatctttgcaagtgcaaagtgaccccttctctggctctccctgcagctggggcttcacggtggtgcacgagacagaaaagcacgagaagcagcagtggtaagtcctgggcccggagggagacaggcaggattggggcctccctctcagcctatgaggagacagggaggcagaatgctcgctctccaaggccctcggcggcaacccgatctgtgccttttgcaggtacctctgctgtgacacgcagatggaacttcgagagtggtttgccaccttcctctctgtgcaggtaccggctgcagggggcttctccagaggctccaccatggagagtggggacagcagcagagaaatggtggcagaggaattaggtctctgggcacagggatattcacctggtgcagagtggcttccaggaagaggaaacagcatatccaaagaaaaggaaggctgcttatgaaatacagaatttgatttttgtgttcatggttccacagtgttagagtccccatcatggtggggagcgtggcagtagtcaggcagccatggtgctggaggagctgagaccttatacctcatccataaatggaaaggagggagggagggagggagagagggagagagnnnnnnnnnnnnnnnnnnnnnnnnnnnnnnnnnnnnnnnnnnnnnnnnnnnnnnnnnnnnnnnnnnnnnnnnnnnnnnnnnnnnnnnnnnnnnnnnnnnnnnnnnnnnnnnnnnnnnnnnnnnnnnnnnnnnnnnnnnnnnnnnnnnnnnnnnnnnnnnnnnnnnnnnnnnnnnnnnnnnnnnnnnnnnnnnnnnnnnnnnnnnnnnnnnnnnnnnnnnnnnnnnnnnnnnnnnnnnnnnnnnnnnnnnnnnnnnnnnnnnnnnnnnnnnnnnnnnnnnnnnnnnnnnnnnnnnnnnnnnnnnnnnnnnnnnnnnnnnnnnnnnnnnnnnnnnnnnnnnnnnnnnnnnnnnnnnnnnggagggagagaaggagagagaagagagggagggatggggagaggagagagggaaagagggagagaaagaggggggagggggagaaggagagagggagagagcaagggatggagaggagagagagaggaagggagagagggagagaaggagagatggggagaggagggagggagggatggagagaggagggagagagagagggagggagggatgggaagaggagggagagaggaaggagggaaagaaggagagagaaagagagagggagggaagggagggagagaagaagagaaagagagagggaggaagggagagaaggagagagagagaggagagagaactggaaatgacaagagcttttgaaacttaaaagcctcattctccagtgccacacctcctccaacaaggccacacctcctaatccttcccaaacagttccatcaagtggggaccaagtattcaaacatatgagtgtcattcccattcaagccaccacattcaccacttgcaaggggagaagccatcagtgccggaggttggccctgattgtaagaaccttgagaccatggtcaagtggctgaactagaccttgagtttcaagtgagtccaagcagtgtgtaggattgagcctgaagggggtctctcagctccctcagcaccagtgtacagggaacagagcctgaagggccacacccacggagaagtcacgccagagactggttagacatgaaacacatgagttagaacagatgttcagcagaattcagaactgtgtagggagaaggaattcaaaactaccagggctctgggctctgttcctgctgctgttacatccttctaatgccgagcttcctggtggtcaaggacgagatgaaaacggtggattctgtagttcttggttgctgggaagaggaggcacaatgcctttcgttttcttgatgctgagttcttaggggaggtttgtggatcttgagtaatctagttggctgggttgtgctgggctagggtcatctatgaacagctgcttctcatatcagcctcgatcaaagctgaaggcgttagctcagatcctagctgaaggcttttctgagaaggggtgggtggaacttgatgctgcaagctgagttgtggcccagaccctagcactcctttcctggttgttctctagcacgatggcctggtgtggccctccgagccatctcgagtgtcccgggcagtgcctgaggtccggatgggcagtgtatcgctgatccctctacgaggcagtgaaaatgaaatgcgccggagtgtggcagccttcactgctgaccccctttccgtaagtgtctctggttcatgtgggcaaggctgggtgggacctggctggatgcctgcctgcacttaactgatttctctgacagcccatctagtctcttccctaggtttctggggccccttttgtctagccttggaaaccccagctgctgatatttcggcatctactccattgctggctgctcctttttactttcacaaagcacttataggatctgggcttctgtgctccctacagcttctccgccatgtctgagcacaggagtcgttctgactctgggacaccatcactgccaccaggaagctttcctgttcagacgccctcgtgctctgcgtgtttggtgtgggccaacagaacacacggggaagccatacccacatcccatatcctgactgcagcacaggctccttggctgggcaggaatgggctggcaatggggatttcccaggagggacccttccttttcctgcaggcaagcaatgctcttgacctggcttgcttacctagggtcatgctctttgaatccgtggaattggaaagatggacagaaatcaggagctgtgcaggagaagggtttggggccccgctgggagggagcccacccccttcccacaggctcccaaatggaaagggtgacactctgaacgtactcccgggggtctacaagggagctcgtgggaagcttctgcagggtgacatctggacttggggacatcagccctcttctggtgtgtgctggcagggaggcccaggctgtggctgtctgctatcccttccccactttggatactttttgataatataaatatatctgtatattttaccctatggtgctgaggcctgtgatggtttgtgggcactggtgtcctaggctaagggtacagttggctgtgaagcccagaggtgaatgctggggctttgaagccaggagcctgagtctaccctctgcatgtttactgagctatttaccctccactgtcctggcagaggcctggcctggccctgtacctactgtgccactgtacagccaggctatggaatttctgattcaggacaaggcagaccccagctagtctgagtcccggtccctgcaaccatctgagctggggcctagatctgtgttagtgaccccggcacagctactcagagcctcgtgctggagacacgaggccacagtgcataccacaagctttggaagactgtgaagggggctttaccctgggcactatgcgtgtgcttccagagtggagtctgcctctcacatcacagggcatcgccttcagagggaagtgctgacctacagaggtcaccagctactcaaagacagactggagacttctgggaaagtgctaagcattctgccttctctggagtctcattgccaccctatctcaaaggcttagtgagcagacttgctggtgtcctgtccttagcctcgaaaggggcagagcagagctggataaggctggggtacctgtgccatctgtgacccccccatcccctataaagctctgaaccccggctgtgccttcctgtcagttcttgatgccacaggtcctagtcataggcctggcacctcagtcctggcttaccaagtaggtggccccagtggggacctggatgtacacctggacatgtgtcctgggtgtttgccaggagacagcacacgatccttgagctctactaacctgttgcacaagctacggtccccatccctttgtcctatcttcagggagcttctccaagccaaattatcatgtcctccaggcaggacatggctagagggcttatgtgcccaagagctgcttcctccctgaacttgatctactgtccaccaaccccagagaccaaggaagagggtacaactagaggtgccctctgctggtctggcactgtcattactctggtttagggattagccagaggggagctgcatttggccactagggggcagtcatggaccactcatagttgcaaattttgagcagggtctgtgtaacacctcctaaccctccctacacctgcaacacttcctccctccctcctctccttcccctcccagtgatattcctggatctggctttgttcttctgccagctggaccactcagccctgcctctggccagcaactagtgatgtgttgtaagacagcacagtagaggtgctttgctttgatctcctgggctctaggacatgagaggagcccttcgcccaatgcctacagaatgcaaacctaagcctgagcctctgctctcagctttccctgcctgacattagagtctcctcagctttcctcctgctcttagcctgttctcccctcttgtgagcgctccccgtagccagcactatgtgacactgtagagtgctttcccttggcgtgaggtcacatccctgcaggattgagactcaaccttcgtgaaaaatacctgtgactacagtgttgggggggggggcagagcagaaggttctgttgtctcaaggattcctaaaactggagccagtgccagaagggagggatgcacttggtactttaggttgcttgggatgggaggagcccagagttaggggtgggagcctgaaggaggaaggacttcctggaggagtgtggttgggggtgggattggatgttggggaggagaatagggagggaactctgagagaaaaggctgtagtagggcacagcctgggcaccgagcattgctggtggagtgttggggaaaagtgggcagggtaggatatggggcagaagagggctggggtatctgcctttctctcttctggctccttcatttcaaccctcccactctgcatgatatccagcagtgaggacccaggaacccttggctccagggagctctgggtacacaggctgtagtgagacaggtgggggtaaagctggaccctgctacctccgtactaaccctggggctggagggggcatggaacctctttcctaccccctggctcttattgctgcctgcccacagttctgttttggaaagcatagatgggtaggcagatatcctttatagtccacgtggctttgacagttacttagatctctgatcgtctgtgtgctctctgtcctttggagctaagctgcatcccgatagcctcctgggaacactgaatgagcaggcgcaggtaagtgtgaagtgccagccgtgccccttgctagtcttcctagatatatccgcagtgacatctttgtgacatacaggagaagagcttgagaggttcagccagcacttagtgactacttcctgtgttcagccctcactcaccaagcacttgttgaatacctgctgtgtgcagagcttttgccgcacacgtggggcagatgagtaagtggtgtgggggaggaggaaacccttgaggagagaggatgctgctcagagggattcatgaagggctcatgtcctgaagccaggagggtaggggatgctgaagagagacagacaaatgtagatggcctgaagtaaggacctgttgtagctggatcttaacacccatgcaaccccagggcctcacaccctcagcaccagacaccctaaggcctcccctccacaccctagctgtcaggtcttagctctactggctacctaggagacacgactacatccctgtctaatgggccctttaggatcttgtccctaccagaaaacagcatcttttctactacttaagtacttagtgacctgaatgacccagatcctactctcagactgtgtgactgtttctgtctcactgacacacatgcatgcacgtgcgcacccacacccacacagagctggtcagaatctccctgcctctcctgtcagggaatgcctttggattcttgttcccagtgtccatgttctatgaaaacatggggaggatttgtacccagctaaccaaccagggggatggctccttgaagagctcactggccctggcatgtgccctcctctatgctactttcagcctgtggaaatttccacacttcctctgccctggttacagctcctactgctgtatttatcaccctggagacacagtgacacaggccacaggcacacactcatgctctgcacacacgtgcctgcacacctcagcttgcactgccataactcaagtgcatcacacacacacacacacacacacacacacacacacacacacacacacacacagagcacgtggaggagggacacccacacacaaagagctctctaggaaaattgttctccctcctgctgctgcccctcccccacctcctcctcctctgttctgtccgcccacccccacccacagaccaaagagctgggcctgaggactgtacctcccactccttatcagctgggaggcactctgcctggtgacttgagtgtgccctccctcttgccattccgccctccctcccccctctgccactcccctgcaatcttgactgtcttctatgcataagtcccctctttgtcactcttttgactctgaagtggaaactgtcattcttctctgctttgtctcccggaggttcaagtcgaggaaccccaaggatccaggcagagagatagactaggagggggtgccaggaacccacatctcctcagctcctgtcaccttcagccctcctcttgatgaggggagggctgtgtgcctggaaccatggagaccagtgagcgtcatggcaacacagtctgggtgggcacagccttcctcctccggggtttgggggggtgcgtaggaggaaccccatgggcctgatggctgtgggccttgtgctggtgcccagtgctggtcaccgcatctgcctgcaacctgttctagtcctacccctccttgactcactgcactgtgggctgcaggactcgaacgaaggctctgatgctccctggacactgcaggaaagatactgcaaacaccaacagagctcaggggcttgcctagggccccacagacttcatagttggccacccatgtcagtttactcagggcagagaagtcagctcaatgtgagtttggactccctgtgaaacccccaactagccctttgccttgccagtgaggatatggaatacctgctgtgccaaggcttcgtgtgttctctcacttcacccttgggagacccagggtggccagagagtggcctaccaaggacagataggcttgggacaacccgtcctggcaggtacccttttctcatttgtgtcttccttgctgaagaggagtccctggcaggttctacagcttcatcagaatctggccttaggttgtctagaaacctgagagctagttttggggggtggggtggggtggggtggggtagacccttccttaagtgcctagacatagggaggactttgcaacctgtgcacaatggttgctttctggtcctgtaaagacttgtctctgccctagattagagtgtgcagagtccaggaggagacccccgccttgcaacccagacttgacttgtctcctggcctctgtgcagtcacgttgcagctgccttcctcctggcttatgtaatcactcaaatataacagctgcctttatcccactgagtcacgccccctccctccctcctcaggtgtggggagttgcacagaagaggtaaagcaggactgagtgggaggctgggggactccgggaaaggggggtcctggtgtgccaggttggagggagatgaggacagcaaaacctttcttagaagaggaactcagggatcgcctctgctctgacccaccctagtaaaatgctgcattcttgttgtggggagggggtccaagtgctaaagctctatccacagcctcctttgctgagcctccgtccttaccagaggagaggcagagagtatgaagaggagaaaataacttgggacacaatgaccaggagtctctgatctgtggtccagctctatctactctttatatcctttggtcctggatatgcccctggcctgtttgcccaccagtgtaatgaggagtcggaccttctggccctgacctcttatactccctgatatcagcgtctagtagaggcacccaaggatccagctgtactccaggttggcctccctcatctgcctcagtcttcctctgagccacatctgcttagctgtaccccttgcactgggtaggaagcagggccactggattctgggttgaaggacacagtagtagccttcggctttcctctgacttgatatctgtcccagtgcttcatccccccactggtaactggagattactacccactcctaaggtcaccagccctgcccctcagaggaagctgagccacgtctcctcatctggactgacagagccatcttcctgaaatgatgaagaagttgccccaccctaaagctgttctagagaccgtggtggctttccatgtccttgtcaaagcaaaggctttgcccctggtggtgtgatgaggtccctgctcagagacctgtccctggcaccaagggtacatgccatcctttcacagtggcatcattctgggcatcagacctacaggaggaagcttcctggccacagggggacgggcactgtgagatgactctctgagctaccaattcatctttcctctgtcccatgggtgcttgttaacaagacccaggctagacccccactctatatccctgcccccaggcagagtgtcccagtcccttgtgaagtccatggcctggcagttactccccatccccagtggatggcacagtttattgcagcatcagcctgccccagggagtaggggacagcagcctgccccaactccttactagactcactgcaacatgatcctggaccaaacttggctctgattagcactattcctttccatctttggtctctctctggacttctccatcagcattcttcccttgcacccttgggctgggctgggagtcaaggcctatcctccatgaaaggagggttcagcagatgaaatgagaagaacccagaccaggaggagggggtagggcaaacgcaaggtgtggaggaaaagccaaaagcatattagctccaggcccagaatcccaagggtgctgggttgggtgtgtgctgagatggcacaggaagggcaggccaggatttgggatagtcatttaaaaaggaggaagaagaggaggaggaggagagaaggagagaggaggaggaggaggagaaagaaagaaagaaagaaagaaagaaagaaagaaagaaagaaagaaagaaagaaagaaagaaagaaagaaaggaaacttgtcagtatcctggaggataaacattgtacaaaagaagaaacagaggggactggaaattgatagagattccaccccccccccacacacacacctgtagcagaagaggataaagagagatcattcggggccagattgaggaccctgatccagggttgaaggagttaggggtgaaggagggttttgagggagcacagtgtgaccgcatatgtcaggaagctaccactaggtgcagcatggatgtggaatacagaggttgaactggaactggggggctggggagaggccaaaataaaggggaggagtcggggacctgtgaataagtatggatgtaagaatccagtgacttctggggatgggggatgcggggagcagaggggaggagaaaggtcaagctgtaaagttcagtctaggagttggaaattttgctggtacatcacacacaatcatcagtcaagttggttcttcactatttggctttcgggtcaatgggatattcctggaggagatgctcagagacatactatactggcctttggcaccccagaagagggctggatgagttggtgtgtgttgggagaaggatcgctgcccagtgggacaaagagaatggggaattttgttagaagcatccgcattgtggaggcaaagatgggatgcgcccctggagggagacagaggaggggccgtctggaaggtaggagggaaacagcagcgcaggaggaggcacaggctggcgctgaaaaagtcgtggtcttgggcagagaagatagctggaacccggcatcctgcagtcctccggaggcaaggagtggcagggtggaggccggtcccagaaagacactcttttcatttttcatcacttttggcagcctccctcatttccataaacattcttcctactcccacttacttctaccgcgacccagttagaaaacacacacacacacacacacacacacacacacacacacacacacacacacaaacacacacacacaaacacaaacacaaacacaaaaacaaatcgatgactgctgactctcagcaagggccttaggacgcggcagacttggctcggtaccctggagagcgtccttgggcggggtcttgggtgggcggagtctgcagccaggcggaagatctaagcgattgaggggcagagggtgatgaggagaatcttggactcaatccctcgcccctttccgcacctccccatccagatactgtcctggggaagcccctgtcccggcacgtgggacttagaacatcttgggttccatccattcaacgtcttcgtccatgaggaagtcaactgtttactgagaaattagagttattcccccaaattttacagttctttatattttgaatctgtgaccttgtctttcatgtgaggaaatgaaattggagttcaaagaggtgaaatggctcccttaggcgtgtggcagagctggaatttaaatcccatctgagccctggagcccacttcatcttcattgttctggactttgaccttgttcctgatgatcctgctacgggggaactgtaaggtgtgggctggcatttggataaggagcagagcacaataccttgttcccaggagatttctgagcaggaagccaccactaccgtttccaggtgggagaacagaaagggggccagtcaaggcttcgagcacccacacccaggaggcaccctcatttgaactcttctggcccaggtccactgaccagcccctcaggtctgtgagcagattctgagtccgagggagagctgtgagagacagccatggtccagaccttggggagcacctcagctcacaatcctggagcagggaggtgccaggctaagtaagacaccagttcctgaactggctcagttgtcttagaaccatcctgatccttgttccctctgagtgagatgcatttcccccagagctttctgtgattttcaggtccatctttggggttccagaggggaagcaaaggctggcacgtctgaggctatgggcctcctgcgtctagaatactctgcttggataggctgcgtgcacaagctggcgcattcctgtccttcagcttgtgtcaggtttccattaagtctcaggggcttctctgcctggagccgtgtgtgtgtgtgtgtgtgtgtgtgtgtgtgtgtgtgtgtgtgtgtgtgtgtgcgcgcgcggggggtggcacactctccatgacttgaagagatgaggtcacccgtgagactcaccatagcatctccttggattagctctcccttctgcctttaaagacacaactaagaccctccactggaaacattggcaacttcctgcttgggtcagggtgggcagaggggcaagaaacagtttgagtcatagctgatggggctgaccagtggcaggtgtctgcaaacgtatgaataaatcagtggtggagtcagaactccatttccttaccctaacagtctcccacccaccaccacgcctgtttcatggtgtggcactttctctcccacgcacattaattgtctactgagacaactgcctacctgttcctttgctcagtgctcccattctgttaggttaaagctttgacctgaagagtcctccatgaggacaggctatggatgcagatcccccccatgcctagaacctgtggccactgaaggtgggggaggggcacctggnnnnnnnnnnnnnnnnnnnnnnnnnnnnnnnnnnnnnnnnnnnnnnnnnnnnnnnnnnnnnnnnnnnnnnnnnnnnnnnnnnnnnnnnnnnnnnnnnnnnnnnnnnnnnnnnnnnnnnnnnnnnnnnnnnnnnnnnnnnnnnnnnnnnnnctttgccgtcccatattctgaggataatggtgtgtgtgttcccaccctgagggatgttgtggtggggcctccgaaagtctgggttgtgtcctcctgtccctggggtccccaaccccatcttgattcttatgagaacgctgtgtttctgcatcctttctggtctctgtgtttccatctttatctctctgagatgcagctatctctcccttcagatgtttctctctgtgtctgtgtatctctcagtctctccctctgtgtgtcttttccctcctccctcctctctctctctgtctgggcctctctctgttcctcctccacgctccctcccccttctgcattatcagacttgctctagcctcctcccagagccagcctagcagcagaggcagtagcagccggagaggcaggcggagcagcccaggcagcagagctggatcgtgtgttgagtacaggcagagtcaagaaccagccattgctcttggttcctatgcctgctgggagtgccccagtcagaactctgggcagtggggacaggggggacggggcgaggtgccaccttagtctggctggggaggcagatgatgaggagtgatggggcaggcatgcggccactccatcctctgcaggagccagcagtacccggcagcgcgaccggctgagccgtgagtactagcaagggggtttgggggctggataagcagcagcgaacgataccacagacagggtctggggagtccctctcggaattggggttgacatggagctcagccacatgggaggttcaatcctgctggggacggctgcaggacggcaacctagttaggggtctctgtatagaggagtgatgcctggcatccttccaggaggtgatgaagctggggtcctgaagaagggctcctggctgggggatgggtggtgagaagcctgaactatccttagggtggggtgaggagtttggccaaggagtttctaggagctctggtggctgagtggtgcttcagcaccatggagaaggacaatctttgccaggactgagtgtagaggagtctagggtgtgtgtataggagagaataaggatacatataagtaagagtgatcctagaacaagagagtatcagggcaatacattccatagaatcaggaattaagggtttgggacattactttatgcaactttcacctcaaagcctccgtcccaggatagtgtagtgagagcctcaacgctcccgctttgttcaggagctgcatgagtgtatgaaggagccactgtgagaagttccaaggtggcaagcaggtgatgatggtggagtggtgctggtgtgtgtgtgtgtgagcacgcgtgcacacgcacacgcatgcacacacctgtggaatataaggggcatcctgggtgtggaggtcttgagggttctggggtccctgggttggatgtgaagcaggctgtgtagggttgtgtgg

SEQ ID NO: 1989 - DNA, 4435 bp, Mus musculus
gacagacggtaccgggaccccgagtcccacctcgtggagttctcttcgctcaaaacagctcccacctcagagcatcatgaggagcccttgggactaggaacaacctccttggaggaccaggtgtccttggtggcaggtctgagcctagccctgggcctctgctgacagaagccatggcagagggttacgatgccgcactgtctgtagctgagtggctgcgggcacttcacctggagcagtacacggcactctttgagcagcacggactggtgtgggccaccgagtgccaaggcctcagcgatgctggcctgctagacatgggcatgcacctccccggccaccgccgccgcatcctggctggtcttcaccgcgcccatgcaccccccgtccctctgcctcgccccgccccacggcccgtgccgatgaagcgacacatcttccgttcaccacctgtgcccgtcactccaccagagccgccgcccacagctggagaggatgagggtctgcctgccgctccacctatcccaccccgcaggagctgcctcccacctgcctgcttcactccgacatccacagccgccccagatcctgtgctgcccccactgcctgccaagagacacttggtagaacccagcgttcctcctgtccctcctcgaaccggacccccctacccacaggccagccttcttgctaaggaggagttactgctgccatcagtgtcaccccggtcccaaccagagcctgcagagactccgtccaccctcctgcctgcctttccccaggggcccctgcagcctccgtctcctcctccctgtcctcctgtgatccctcccaagcctcctcgcctgctccctgagtttgacgactctgactatgatgatgtcccggaggaggggccaggggccccagccagtgtgatgaccaaggaattccatctgggcattggtatcacctttatcgacatgaatgtgggcaatgtcaaggaagtggatcggcgcagctttgacctcactaccccctaccgcatcttcagcttctcggctgattcagagttagagaaggaacagtggctggaggccatgcagggagccatcgcagaggccctatctacctcagaggtggctgagcgcatctgggccgcagcccccaacaggttctgtgccgactgtggggccgcccagcctgactgggcctccatcaacctctgcgttgtcatctgcaagcgctgtgcaggggagcaccgcggcctgggtgcaggagtgtccaaggtgcggagtttgaagatggacaggaaggtgtggacagaagcactcatccagctcttcttacatctgggcaatggccccgggaaccacttctgggctgctaatgtgcctcctagtgaggccctggagcccagcagcagccctggtgcccggcggtatcacctggaggccaagtacagagagggcaagtaccgccgctaccatccgctctttggcaaccaagaggaactggacaaggccctgtgtgctgcagttactaccactgacctggctgagacccaggcactcctgggctgtggggctggggtcagctgcttctcaggggacccagcagctcccacacccctggctcttgctgagcaggccggacagactctgcagatggagtttctacggaataatcagagtacagaggtccctcggttggactcagtgaagcccttggaaaagcactactccgttaccctgccaactgtgagccacagcggcttcctgtacaaaactgcttctgccggcaaacctctgcaggaccgccgtgcccgggaagagttcagccggcgctggtgtgtcctgagtgatggggtcctgagctactatgaaaacgaacgggcagtgacacccaatggggagattcgggccagcgagatagtatgcctagcagtttcccctctggacacccatggctttgagcacacctttgaggtgtacacagagggagaacggctgtacctgtttgggctggagaatgcagagctggctcatgagtgggtcaagtgcattgccaaggcgttcgtgcctcccctggctgaggacctgctagcccgggactttgaacgtcttgggcgcctaccctgtaaagctggcctgagccttcagcaggctcaggaaggctggtttgccttgactggctctgagctccgggctgtcttcccagaggggccctgggaagagccgctgcagctccggaaactgcaagagctttctatccaaggagacagcgagaaccaagtgctggtgctggtggagcggaggaggacactgtacatccagggtgagcggcggctggacttcatggcttggctaggggtcatccagaaagcagcagccagcttgggagacacactatcagaacaacagcttggggactcggacatcccagtgattgtgtaccgctgtgtggactacatcacgcagtgtggcttgacctcagagggtatctatcgaaagtgtggtcagacctccaagactcagagactgctagacagcctccggcaggacgcacgctctgtgcacctaaaggagggagaacagcacgtggacgacgtctcctctgcactcaaacgcttcctcagggacctgcccgatgggctcttcacgcgtgcgcagcgcctggcctggctggaggcctctgagatcgaggatgaggaagaaaagatctccaggtatcgagagctcttggtgcatctgccccctgtcaaccgggccactgtgaaggcccttatcagccatctgtactgtgtacagtgcttctcagacacaaaccaaatgaacacacacaacctggctatcgtgtttgggcctacactcttccagacagacgggcaggactacaaggccggcaaggtggtggaagacctcatcaaccactacgtggtggtgttcagtgtggacgaggaggagctgaggaagcagagggaggaagtcacggccatcgtgaagatgcgagtggctggcactgccagtgggacccagcatgctggcgacttcatctgcacagtctacctggaggagaagaaggtggagactgaacagcatgttaagatcccagcatccatgactgcagaggagcttactctggagattctggaccgccgcaatgtgagcatcagggagaaggactactggacttgctttgaggtcaacgagaaggaggaggcagagcgcccgctgcactttgcagagaaggtgctgcccattgtccatgggctgggcatagacagccatctggtggtgaagaagtaccagtccatggaggccatgctgttgtacttggccagccgtgtgggtgacaccaagcatggtatgatgaagttccgtgaagaccgcagcctcctgggtctggggctaccttcgggtggcttccacgatcgctacttcattctcaacagcagctgcctacggctctacaaggaggtccggagccagaggccgtggagcggggcccctgagaccagtcaccggcctgagaaggagtggcctgtcaagagcctcaaagtctacctgggtgtaaagaagaaactgcggccacctacttgctggggcttcacggtggtgcacgagacagaaaagcacgagaagcagcagtggtacctctgctgtgacacgcagatggaacttcgagagtggtttgccaccttcctctctgtgcagcacgatggcctggtgtggccctccgagccatctcgagtgtcccgggcagtgcctgaggtccggatgggcagtgtatcgctgatccctctacgaggcagtgaaaatgaaatgcgccggagtgtggcagccttcactgctgaccccctttcccttctccgccatgtctgagcacaggagtcgttctgactctgggacaccatcactgccaccaggaagctttcctgttcagacgccctcgtgctctgcgtgtttggtgtgggccaacagaacacacggggaagccatacccacatcccatatcctgactgcagcacaggctccttggctgggcaggaatgggctggcaatggggatttcccaggagggacccttccttttcctgcaggcaagcaatgctcttgacctggcttgcttacctagggtcatgctctttgaatccgtggaattggaaagatggacagaaatcaggagctgtgcaggagaagggtttggggccccgctgggagggagcccacccccttcccacaggctcccaaatggaaagggtgacactctgaacgtactcccgggggtctacaagggagctcgtgggaagcttctgcagggtgacatctggacttggggacatcagccctcttctggtgtgtgctggcagggaggcccaggctgtggctgtctgctatcccttccccactttggatactttttgataatataaatatatctgtatattttaccct

SEQ ID NO: 1990 - protein, 1227 aa, Mus musculus
MAEGYDAALSVAEWLRALHLEQYTALFEQHGLVWATECQGLSDAGLLDMGMHLPGHRRRILAGLHRAHAPPVPLPRPAPRPVPMKRHIFRSPPVPVTPPEPPPTAGEDEGLPAAPPIPPRRSCLPPACFTPTSTAAPDPVLPPLPAKRHLVEPSVPPVPPRTGPPYPQASLLAKEELLLPSVSPRSQPEPAETPSTLLPAFPQGPLQPPSPPPCPPVIPPKPPRLLPEFDDSDYDDVPEEGPGAPASVMTKEFHLGIGITFIDMNVGNVKEVDRRSFDLTTPYRIFSFSADSELEKEQWLEAMQGAIAEALSTSEVAERIWAAAPNRFCADCGAAQPDWASINLCVVICKRCAGEHRGLGAGVSKVRSLKMDRKVWTEALIQLFLHLGNGPGNHFWAANVPPSEALEPSSSPGARRYHLEAKYREGKYRRYHPLFGNQEELDKALCAAVTTTDLAETQALLGCGAGVSCFSGDPAAPTPLAEQAGQTLQMEFLRNNQSTEVPRLDSVKPLEKHYSVTLPTVSHSGFLYKTASAGKPLQDRRAREEFSRRWCVLSDGVLSYYENERAVTPNGEIRASEIVCLAVSPLDTHGFEHTFEVYTEGERLYLFGLENAELAHEWVKCIAKAFVPPLAEDLLARDFERLGRLPCKAGLSLQQAQEGWFALTGSELRAVFPEGPWEEPLQLRKLQELSIQGDSENQVLVLVERRRTLYIQGERRLDFMAWLGVIQKAAASLGDTLSEQQLGDSDIPVIVYRCVDYITQCGLTSEGIYRKCGQTSKTQRLLDSLRQDARSVHLKEGEQHVDDVSSALKRFLRDLPDGLFTRAQRLAWLEASEIEDEEEKISRYRELLVHLPPVNRATVKALISHLYCVQCFSDTNQMNTHNLAIVFGPTLFQTDGQDYKAGKVVEDLINHYVVVFSVDEEELRKQREEVTAIVKMRVAGTASGTQHAGDFICTVYLEEKKVETEQHVKIPASMTAEELTLEILDRRNVSIREKDYWTCFEVNEKEEAERPLHFAEKVLPIVHGLGIDSHLVVKKYQSMEAMLLYLASRVGDTKHGMMKFREDRSLLGLGLPSGGFHDRYFILNSSCLRLYKEVRSQRPWSGAPETSHRPEKEWPVKSLKVYLGVKKKLRPPTCWGFTVVHETEKHEKQQWYLCCDTQMELREWFATFLSVQHDGLVWPSEPSRVSRAVPEVRMGSVSLIPLRGSENEMRRSVAAFTADPLSLLRHV

SEQ ID NO: 1991 - DNA, 2901 bp, Mus musculus
aaggcagagggagcctgagatcctccaggggctccttgtgccctgaccagcagctgtgcctcaggacccacagggccctgtgtgctgcagttactaccactgacctggctgagacccaggcactcctgggctgtggggctggggtcagctgcttctcaggggacccagcagctcccacacccctggctcttgctgagcaggccggacagactctgcagatggagtttctacggaataatcagagtacagaggtccctcggttggactcagtgaagcccttggaaaagcactactccgttaccctgccaactgtgagccacagcggcttcctgtacaaaactgcttctgccggcaaacctctgcaggaccgccgtgcccgggaagagttcagccggcgctggtgtgtcctgagtgatggggtcctgagctactatgaaaacgaacgggcagtgacacccaatggggagattcgggccagcgagatagtatgcctagcagtttcccctctggacacccatggctttgagcacacctttgaggtgtacacagagggagaacggctgtacctgtttgggctggagaatgcagagctggctcatgagtgggtcaagtgcattgccaaggcgttcgtgcctcccctggctgaggacctgctagcccgggactttgaacgtcttgggcgcctaccctgtaaagctggcctgagccttcagcaggctcaggaaggctggtttgccttgactggctctgagctccgggctgtcttcccagaggggccctgggaagagccgctgcagctccggaaactgcaagagctttctatccaaggagacagcgagaaccaagtgctggtgctggtggagcggaggaggacactgtacatccagggtgagcggcggctggacttcatggcttggctaggggtcatccagaaagcagcagccagcttgggagacacactatcagaacaacagcttggggactcggacatcccagtgattgtgtaccgctgtgtggactacatcacgcagtgtggcttgacctcagagggtatctatcgaaagtgtggtcagacctccaagactcagagactgctagacagcctccggcaggacgcacgctctgtgcacctaaaggagggagaacagcacgtggacgacgtctcctctgcactcaaacgcttcctcagggacctgcccgatgggctcttcacgcgtgcgcagcgcctggcctggctggaggcctctgagatcgaggatgaggaagaaaagatctccaggtatcgagagctcttggtgcatctgccccctgtcaaccgggccactgtgaaggcccttatcagccatctgtactgtgtacagtgcttctcagacacaaaccaaatgaacacacacaacctggctatcgtgtttgggcctacactcttccagacagacgggcaggactacaaggccggcaaggtggtggaagacctcatcaaccactacgtggtggtgttcagtgtggacgaggaggagctgaggaagcagagggaggaagtcacggccatcgtgaagatgcgagtggctggcactgccagtgggacccagcatgctggcgacttcatctgcacagtctacctggaggagaagaaggtggagactgaacagcatgttaagatcccagcatccatgactgcagaggagcttactctggagattctggaccgccgcaatgtgagcatcagggagaaggactactggacttgctttgaggtcaacgagaaggaggaggcagagcgcccgctgcactttgcagagaaggtgctgcccattgtccatgggctgggcatagacagccatctggtggtgaagaagtaccagtccatggaggccatgctgttgtacttggccagccgtgtgggtgacaccaagcatggtatgatgaagttccgtgaagaccgcagcctcctgggtctggggctaccttcgggtggcttccacgatcgctacttcattctcaacagcagctgcctacggctctacaaggaggtccggagccagaggccgtggagcggggcccctgagaccagtcaccggcctgagaaggagtggcctgtcaagagcctcaaagtctacctgggtgtaaagaagaaactgcggccacctacttgctggggcttcacggtggtgcacgagacagaaaagcacgagaagcagcagtggtacctctgctgtgacacgcagatggaacttcgagagtggtttgccaccttcctctctgtgcagcacgatggcctggtgtggccctccgagccatctcgagtgtcccgggcagtgcctgaggtccggatgggcagtgtatcgctgatccctctacgaggcagtgaaaatgaaatgcgccggagtgtggcagccttcactgctgaccccctttcccttctccgccatgtctgagcacaggagtcgttctgactctgggacaccatcactgccaccaggaagctttcctgttcagacgccctcgtgctctgcgtgtttggtgtgggccaacagaacacacggggaagccatacccacatcccatatcctgactgcagcacaggctccttggctgggcaggaatgggctggcaatggggatttcccaggagggacccttccttttcctgcaggcaagcaatgctcttgacctggcttgcttacctagggtcatgctctttgaatccgtggaattggaaagatggacagaaatcaggagctgtgcaggagaagggtttggggccccgctgggagggagcccacccccttcccacaggctcccaaatggaaagggtgacactctgaacgtactcccgggggtctacaagggagctcgtgggaagcttctgcagggtgacatctggacttggggacatcagccc

SEQ ID NO: 1992 - protein, 738 aa, Mus musculus
MEFLRNNQSTEVPRLDSVKPLEKHYSVTLPTVSHSGFLYKTASAGKPLQDRRAREEFSRRWCVLSDGVLSYYENERAVTPNGEIRASEIVCLAVSPLDTHGFEHTFEVYTEGERLYLFGLENAELAHEWVKCIAKAFVPPLAEDLLARDFERLGRLPCKAGLSLQQAQEGWFALTGSELRAVFPEGPWEEPLQLRKLQELSIQGDSENQVLVLVERRRTLYIQGERRLDFMAWLGVIQKAAASLGDTLSEQQLGDSDIPVIVYRCVDYITQCGLTSEGIYRKCGQTSKTQRLLDSLRQDARSVHLKEGEQHVDDVSSALKRFLRDLPDGLFTRAQRLAWLEASEIEDEEEKISRYRELLVHLPPVNRATVKALISHLYCVQCFSDTNQMNTHNLAIVFGPTLFQTDGQDYKAGKVVEDLINHYVVVFSVDEEELRKQREEVTAIVKMRVAGTASGTQHAGDFICTVYLEEKKVETEQHVKIPASMTAEELTLEILDRRNVSIREKDYWTCFEVNEKEEAERPLHFAEKVLPIVHGLGIDSHLVVKKYQSMEAMLLYLASRVGDTKHGMMKFREDRSLLGLGLPSGGFHDRYFILNSSCLRLYKEVRSQRPWSGAPETSHRPEKEWPVKSLKVYLGVKKKLRPPTCWGFTVVHETEKHEKQQWYLCCDTQMELREWFATFLSVQHDGLVWPSEPSRVSRAVPEVRMGSVSLIPLRGSENEMRRSVAAFTADPLSLLRHV

SEQ ID NO: 1993 - DNA, 4755 bp, Mus musculus
accagagctggatacacacatacacacatactcacacaatctctctctctctccctcccctccctgacatatttatgattatattcagatacatacacatttacacacattcagagacactacccataggtgtgcatagacatacctggggctcacatatacaagggaacaggattcagacacagacgacaatagggcttctggccacaagaacagccagagcccacacaggcttctagggacagacacaggacaccttggcacacactggtctacctggctggagccttaggagttcttaggcctaggacaggattcagcaggcctctgaggccttcttgctaaggaggagttactgctgccatcagtgtcaccccggtcccaaccagagcctgcagagactccgtccaccctcctgcctgcctttccccaggggcccctgcagcctccgtctcctcctccctgtcctcctgtgatccctcccaagcctcctcgcctgctccctgagtttgacgactctgactatgatgatgtcccggaggaggggccaggggccccagccagtgtgatgaccaaggaggagcccctgccgagccgagtcccacgggctgtgcgtgtggctagtctgctgagcgagggggaggagctgtctggggatgatgcggaagatgacgatgaccatgcctatgagggtatccccaatggtgggtggccaacgagtggcctgaatccacccttacgcagcctgatccctgatctcccactgcaccccatggatgagttgcctgggggtcccacccccatcacacctgtcatcaaggctggctggctggacaagaacccaccacaggggtcttatatctatcagaagcgatgggtgagactggacgctgattacctgcgatactttgacagtaacaaggacgcctactctaagcgctttgttcctgtggcctgcatctgccgagtagctcctattggagaccagaagtttgaagtgatcacaaataatcggaccttcgccttccgggcagagagtgatgtggagcggaacgagtggatgcaggccctgcagcaggcagtagttgagcatcgagcccgttttcggctttctagtgcttctgtgttgggagtccgaggctccgagcagcctgaccgtgctggcagcctggagctacgaggcttcaagaataagctttacgtggctgtgactggggacaaagtacagctctataagaatctggaggaattccatctgggcattggtatcacctttatcgacatgaatgtgggcaatgtcaaggaagtggatcggcgcagctttgacctcactaccccctaccgcatcttcagcttctcggctgattcagagttagagaaggaacagtggctggaggccatgcagggagccatcgcagaggccctatctacctcagaggtggctgagcgcatctgggccgcagcccccaacaggttctgtgccgactgtggggccgcccagcctgactgggcctccatcaacctctgcgttgtcatctgcaagcgctgtgcaggggagcaccgcggcctgggtgcaggagtgtccaaggtgcggagtttgaagatggacaggaaggtgtggacagaagcactcatccagctcttcttacatctgggcaatggccccgggaaccacttctgggctgctaatgtgcctcctagtgaggccctggagcccagcagcagccctggtgcccggcggtatcacctggaggccaagtacagagagggcaagtaccgccgctaccatccgctctttggcaaccaagaggaactggacaaggccctgtgtgctgcagttactaccactgacctggctgagacccaggcactcctgggctgtggggctggggtcagctgcttctcaggggacccagcagctcccacacccctggctcttgctgagcaggccggacagactctgcagatggagtttctacggaataatcagagtacagaggtccctcggttggactcagtgaagcccttggaaaagcactactccgttaccctgccaactgtgagccacagcggcttcctgtacaaaactgcttctgccggcaaacctctgcaggaccgccgtgcccgggaagagttcagccggcgctggtgtgtcctgagtgatggggtcctgagctactatgaaaacgaacgggcagtgacacccaatggggagattcgggccagcgagatagtatgcctagcagtttcccctctggacacccatggctttgagcacacctttgaggtgtacacagagggagaacggctgtacctgtttgggctggagaatgcagagctggctcatgagtgggtcaagtgcattgccaaggcgttcgtgcctcccctggctgaggacctgctagcccgggactttgaacgtcttgggcgcctaccctgtaaagctggcctgagccttcagcaggctcaggaaggctggtttgccttgactggctctgagctccgggctgtcttcccagaggggccctgggaagagccgctgcagctccggaaactgcaagagctttctatccaaggagacagcgagaaccaagtgctggtgctggtggagcggaggaggacactgtacatccagggtgagcggcggctggacttcatggcttggctaggggtcatccagaaagcagcagccagcttgggagacacactatcagaacaacagcttggggactcggacatcccagtgattgtgtaccgctgtgtggactacatcacgcagtgtggcttgacctcagagggtatctatcgaaagtgtggtcagacctccaagactcagagactgctagacagcctccggcaggacgcacgctctgtgcacctaaaggagggagaacagcacgtggacgacgtctcctctgcactcaaacgcttcctcagggacctgcccgatgggctcttcacgcgtgcgcagcgcctggcctggctggaggcctctgagatcgaggatgaggaagaaaagatctccaggtatcgagagctcttggtgcatctgccccctgtcaaccgggccactgtgaaggcccttatcagccatctgtactgtgtacagtgcttctcagacacaaaccaaatgaacacacacaacctggctatcgtgtttgggcctacactcttccagacagacgggcaggactacaaggccggcaaggtggtggaagacctcatcaaccactacgtggtggtgttcagtgtggacgaggaggagctgaggaagcagagggaggaagtcacggccatcgtgaagatgcgagtggctggcactgccagtgggacccagcatgctggcgacttcatctgcacagtctacctggaggagaagaaggtggagactgaacagcatgttaagatcccagcatccatgactgcagaggagcttactctggagattctggaccgccgcaatgtgagcatcagggagaaggactactggacttgctttgaggtcaacgagaaggaggaggcagagcgcccgctgcactttgcagagaaggtgctgcccattgtccatgggctgggcatagacagccatctggtggtgaagaagtaccagtccatggaggccatgctgttgtacttggccagccgtgtgggtgacaccaagcatggtatgatgaagttccgtgaagaccgcagcctcctgggtctggggctaccttcgggtggcttccacgatcgctacttcattctcaacagcagctgcctacggctctacaaggaggtccggagccagaggccgtggagcggggcccctgagaccagtcaccggcctgagaaggagtggcctgtcaagagcctcaaagtctacctgggtgtaaagaagaaactgcggccacctacttgctggggcttcacggtggtgcacgagacagaaaagcacgagaagcagcagtggtacctctgctgtgacacgcagatggaacttcgagagtggtttgccaccttcctctctgtgcagcacgatggcctggtgtggccctccgagccatctcgagtgtcccgggcagtgcctgaggtccggatgggcagtgtatcgctgatccctctacgaggcagtgaaaatgaaatgcgccggagtgtggcagccttcactgctgaccccctttcccttctccgccatgtctgagcacaggagtcgttctgactctgggacaccatcactgccaccaggaagctttcctgttcagacgccctcgtgctctgcgtgtttggtgtgggccaacagaacacacggggaagccatacccacatcccatatcctgactgcagcacaggctccttggctgggcaggaatgggctggcaatggggatttcccaggagggacccttccttttcctgcaggcaagcaatgctcttgacctggcttgcttacctagggtcatgctctttgaatccgtggaattggaaagatggacagaaatcaggagctgtgcaggagaagggtttggggccccgctgggagggagcccacccccttcccacaggctcccaaatggaaagggtgacactctgaacgtactcccgggggtctacaagggagctcgtgggaagcttctgcagggtgacatctggacttggggacatcagccctcttctggtgtgtgctggcagggaggcccaggctgtggctgtctgctatcccttccccactttggatactttttgataatataaatatatctgtatattttaccct

SEQ ID NO: 1994 - protein, 1200 aa, Mus musculus
MTKEEPLPSRVPRAVRVASLLSEGEELSGDDAEDDDDHAYEGIPNGGWPTSQPPLRSLIPDLPLHPMDELPGGPTPITPVIKAGWLDKNPPQGSYIYQKRWVRLDADYLRYFDSNKDAYSKRFVPVACICRVAPIGDQKFEVITNNRTFAFRAESDVERNEWMQALQQAVVEHRARFRLSSASVLGVRGSEQPDRAGSLELRGFKNKLYVAVTGDKVQLYKNLEEFHLGIGITFIDMNVGNVKEVDRRSFDLTTPYRIFSFSADSELEKEQWLEAMQGAIAEALSTSEVAERIWAAAPNRFCADCGAAQPDWASINLCVVICKRCAGEHRGLGAGVSKVRSLKMDRKVWTEALIQLFLHLGNGPGNHFWAANVPPSEALEPSSSPGARRYHLEAKYREGKYRRYHPLFGNQEELDKALCAAVTTTDLAETQALLGCGAGVSCFSGDPAAPTPLAEQAGQTLQMEFLRNNQSTEVPRLDSVKPLEKHYSVTLPTVSHSGFLYKTASAGKPLQDRRAREEFSRRWCVLSDGVLSYYENERAVTPNGEIRASEIVCLAVSPLDTHGFEHTFEVYTEGERLYLFGLENAELAHEWVKCIAKAFVPPLAEDLLARDFERLGRLPCKAGLSLQQAQEGWFALTGSELRAVFPEGPWEEPLQLRKLQELSIQGDSENQVLVLVERRRTLYIQGERRLDFMAWLGVIQKAAASLGDTLSEQQLGDSDIPVIVYRCVDYITQCGLTSEGIYRKCGQTSKTQRLLDSLRQDARSVHLKEGEQHVDDVSSALKRFLRDLPDGLFTRAQRLAWLEASEIEDEEEKISRYRELLVHLPPVNRATVKALISHLYCVQCFSDTNQMNTHNLAIVFGPTLFQTDGQDYKAGKVVEDLINHYVVVFSVDEEELRKQREEVTAIVKMRVAGTASGTQHAGDFICTVYLEEKKVETEQHVKIPASMTAEELTLEILDRRNVSIREKDYWTCFEVNEKEEAERPLHFAEKVLPIVHGLGIDSHLVVKKYQSMEAMLLYLASRVGDTKHGMMKFREDRSLLGLGLPSGGFHDRYFILNSSCLRLYKEVRSQRPWSGAPETSHRPEKEWPVKSLKVYLGVKKKLRPPTCWGFTVVHETEKHEKQQWYLCCDTQMELREWFATFLSVQHDGLVWPSEPSRVSRAVPEVRMGSVSLIPLRGSENEMRRSVAAFTADPLSLLRHV

SEQ ID NO: 1995 - DNA, 2254 bp, Mus musculus
aggggggcggggaaggggtaagagaggcggagagcaggaagcaaagaccagagctggatacacacatacacacatactcacacaatctctctctctctccctcccctccctgacatatttatgattatattcagatacatacacatttacacacattcagagacactacccataggtgtgcatagacatacctggggctcacatatacaagggaacaggattcagacacagacgacaatagggcttctggccacaagaacagccagagcccacacaggcttctagggacagacaaacagcttggggactcggacatcccagtgattgtgtaccgctgtgtggactacatcacgcagtgtggcttgacctcagagggtatctatcgaaagtgtggtcagacctccaagactcagagactgctagacagcctccggcaggacgcacgctctgtgcacctaaaggagggagaacagcacgtggacgacgtctcctctgcactcaaacgcttcctcagggacctgcccgatgggctcttcacgcgtgcgcagcgcctggcctggctggaggcctctgagatcgaggatgaggaagaaaagatctccaggtatcgagagctcttggtgcatctgccccctgtcaaccgggccactgtgaaggcccttatcagccatctgtactgtgtacagtgcttctcagacacaaaccaaatgaacacacacaacctggctatcgtgtttgggcctacactcttccagacagacgggcaggactacaaggccggcaaggtggtggaagacctcatcaaccactacgtggtggtgttcagtgtggacgaggaggagctgaggaagcagagggaggaagtcacggccatcgtgaagatgcgagtggctggcactgccagtgggacccagcatgctggcgacttcatctgcacagtctacctggaggagaagaaggtggagactgaacagcatgttaagatcccagcatccatgactgcagaggagcttactctggagattctggaccgccgcaatgtgagcatcagggagaaggactactggacttgctttgaggtcaacgagaaggaggaggcagagcgcccgctgcactttgcagagaaggtgctgcccattgtccatgggctgggcatagacagccatctggtggtgaagaagtaccagtccatggaggccatgctgttgtacttggccagccgtgtgggtgacaccaagcatggtatgatgaagttccgtgaagaccgcagcctcctgggtctggggctaccttcgggtggcttccacgatcgctacttcattctcaacagcagctgcctacggctctacaaggaggtccggagccagaggccgtggagcggggcccctgagaccagtcaccggcctgagaaggagtggcctgtcaagagcctcaaagtctacctgggtgtaaagaagaaactgcggccacctacttgctggggcttcacggtggtgcacgagacagaaaagcacgagaagcagcagtggtacctctgctgtgacacgcagatggaacttcgagagtggtttgccaccttcctctctgtgcagcacgatggcctggtgtggccctccgagccatctcgagtgtcccgggcagtgcctgaggtccggatgggcagtgtatcgctgatccctctacgaggcagtgaaaatgaaatgcgccggagtgtggcagccttcactgctgaccccctttcccttctccgccatgtctgagcacaggagtcgttctgactctgggacaccatcactgccaccaggaagctttcctgttcagacgccctcgtgctctgcgtgtttggtgtgggccaacagaacacacggggaagccatacccacatcccatatcctgactgcagcacaggctccttggctgggcaggaatgggctggcaatggggatttcccaggagggacccttccttttcctgcaggcaagcaatgctcttgacctggcttgcttacctagggtcatgctctttgaatccgtggaattggaaagatggacagaaatcaggagctgtgcaggagaagggtttggggccccgctgggagggagcccacccccttcccacaggctcccaaatggaaagggtgacactctgaacgtactcccgggggtctacaagggagctcgtgggaagcttctgcagggtgacatctggacttggggacatcagccctcttctggtgtgtgctggcagggaggcc

SEQ ID NO: 1996 - protein, 350 aa, Mus musculus
MNTHNLAIVFGPTLFQTDGQDYKAGKVVEDLINHYVVVFSVDEEELRKQREEVTAIVKMRVAGTASGTQHAGDFICTVYLEEKKVETEQHVKIPASMTAEELTLEILDRRNVSIREKDYWTCFEVNEKEEAERPLHFAEKVLPIVHGLGIDSHLVVKKYQSMEAMLLYLASRVGDTKHGMMKFREDRSLLGLGLPSGGFHDRYFILNSSCLRLYKEVRSQRPWSGAPETSHRPEKEWPVKSLKVYLGVKKKLRPPTCWGFTVVHETEKHEKQQWYLCCDTQMELREWFATFLSVQHDGLVWPSEPSRVSRAVPEVRMGSVSLIPLRGSENEMRRSVAAFTADPLSLLRHV

SEQ ID NO: 1997 - DNA, 4553 bp, Mus musculus
gacagacggtaccgggaccccgagtcccacctcgtggagttctcttcgctcaaaacagctcccacctcagagcatcatgaggagcccttgggactaggaacaacctccttggaggaccaggtgtccttggtggcaggtctgagcctagccctgggcctctgctgacagaagccatggcagagggttacgatgccgcactgtctgtagctgagtggctgcgggcacttcacctggagcagtacacggcactctttgagcagcacggactggtgtgggccaccgagtgccaaggcctcagcgatgctggcctgctagacatgggcatgcacctccccggccaccgccgccgcatcctggctggtcttcaccgcgcccatgcaccccccgtccctctgcctcgccccgccccacggcccgtgccgatgaagcgacacatcttccgttcaccacctgtgcccgtcactccaccagagccgccgcccacagctggagaggatgagggtctgcctgccgctccacctatcccaccccgcaggagctgcctcccacctgcctgcttcactccgacatccacagccgccccagatcctgtgctgcccccactgcctgccaagagacacttggtagaacccagcgttcctcctgtccctcctcgaaccggacccccctacccacaggccagccttcttgctaaggaggagttactgctgccatcagtgtcaccccggtcccaaccagagcctgcagagactccgtccaccctcctgcctgcctttccccaggggcccctgcagcctccgtctcctcctccctgtcctcctgtgatccctcccaagcctcctcgcctgctccctgagtttgacgactctgactatgatgatgtcccggaggaggggccaggggccccagccagtgtgatgaccaaggaattccatctgggcattggtatcacctttatcgacatgaatgtgggcaatgtcaaggaagtggatcggcgcagctttgacctcactaccccctaccgcatcttcagcttctcggctgattcagagttagagaaggaacagtggctggaggccatgcagggagccatcgcagaggccctatctacctcagaggtggctgagcgcatctgggccgcagcccccaacaggttctgtgccgactgtggggccgcccagcctgactgggcctccatcaacctctgcgttgtcatctgcaagcgctgtgcaggggagcaccgcggcctgggtgcaggagtgtccaaggtgcggagtttgaagatggacaggaaggtgtggacagaagcactcatccagctcttcttacatctgggcaatggccccgggaaccacttctgggctgctaatgtgcctcctagtgaggccctggagcccagcagcagccctggtgcccggcggtatcacctggaggccaagtacagagagggcaagtaccgccgctaccatccgctctttggcaaccaagaggaactggacaaggccctgtgtgctgcagttactaccactgacctggctgagacccaggcactcctgggctgtggggctggggtcagctgcttctcaggggacccagcagctcccacacccctggctcttgctgagcaggccggacagactctgcagatggagtttctacggaataatcagagtacagaggtccctcggttggactcagtgaagcccttggaaaagcactactccgttaccctgccaactgtgagccacagcggcttcctgtacaaaactgcttctgccggcaaacctctgcaggaccgccgtgcccgggaagagttcagccggcgctggtgtgtcctgagtgatggggtcctgagctactatgaaaacgaacgggcagtgacacccaatggggagattcgggccagcgagatagtatgcctagcagtttcccctctggacacccatggctttgagcacacctttgaggtgtacacagagggagaacggctgtacctgtttgggctggagaatgcagagctggctcatgagtgggtcaagtgcattgccaaggcgttcgtgcctcccctggctgaggacctgctagcccgggactttgaacgtcttgggcgcctaccctgtaaagctggcctgagccttcagcaggctcaggaaggctggtttgccttgactggctctgagctccgggctgtcttcccagaggggccctgggaagagccgctgcagctccggaaactgcaagagctttctatccaaggagacagcgagaaccaagtgctggtgctggtggagcggaggaggacactgtacatccagggtgagcggcggctggacttcatggcttggctaggggtcatccagaaagcagcagccagcttgggagacacactatcagaacaacagcttggggactcggacatcccagtgattgtgtaccgctgtgtggactacatcacgcagtgtggcttgacctcagagggtatctatcgaaagtgtggtcagacctccaagactcagagactgctagacagcctccggcaggacgcacgctctgtgcacctaaaggagggagaacagcacgtggacgacgtctcctctgcactcaaacgcttcctcagggacctgcccgatgggctcttcacgcgtgcgcagcgcctggcctggctggaggcctctgagatcgaggatgaggaagaaaagatctccaggtatcgagagctcttggtgcatctgccccctgtcaaccgggccactgtgaaggcccttatcagccatctgtactgtgtacagtgcttctcagacacaaaccaaatgaacacacacaacctggctatcgtgtttgggcctacactcttccagacagacgggcaggactacaaggccggcaaggtggtggaagacctcatcaaccactacgtggtggtgttcagtgtggacgaggaggagctgaggaagcagagggaggaagtcacggccatcgtgaagatgcgagtggctggcactgccagtgggacccagcatgctggcgacttcatctgcacagtctacctggaggagaagaaggtggagactgaacagcatgttaagatcccagcatccatgactgcagaggagcttactctggagattctggaccgccgcaatgtgagcatcagggagaaggactactggacttgctttgaggtcaacgagaaggaggaggcagagcgcccgctgcactttgcagagaaggtgctgcccattgtccatgggctgggcatagacagccatctggtggtgaagaagtaccagtccatggaggccatgctgttgtacttggccagccgtgtgggtgacaccaagcatggtatgatgaagttccgtgaagaccgcagcctcctgggtctggggctaccttcgggtggcttccacgatcgctacttcattctcaacagcagctgcctacggctctacaaggaggtccggagtcaccggcctgagaaggagtggcctgtcaagagcctcaaagtctacctgggtgtaaagaagaaactgcggccacctacttgctggggcttcacggtggtgcacgagacagaaaagcacgagaagcagcagtggtacctctgctgtgacacgcagatggaacttcgagagtggtttgccaccttcctctctgtgcagcacgatggcctggtgtggccctccgagccatctcgagtgtcccgggcagtgcctgaggtccggatgggcagtgtatcgctgatccctctacgaggcagtgaaaatgaaatgcgccggagtgtggcagccttcactgctatcccttccccactttggatactttttgataatataaatatatctgtatattttaccctatggtgctgaggcctgtgatggtttgtgggcactggtgtcctaggctaagggtacagttggctgtgaagcccagaggtgaatgctggggctttgaagccaggagcctgagtctaccctctgcatgtttactgagctatttaccctccactgtcctggcagaggcctggcctggccctgtacctactgtgccactgtacagccaggctatggaatttctgattcaggacaaggcagaccccagctagtctgagtcccggtccctgcaaccatctgagctggggcctagatctgtgttagtgaccccggcacagctactcagagcctcgtgctggagacacgaggccacagtgcataccacaagctttggaagactgtgaagggggctttaccctgggcactatgcgtgtgcttccagagtggagtctgcctctcacatcacagggcatcgccttcagagggaagtgctgacctacagaggtcaccagctactcaaagacagactggagacttctgggaaagtgctaagcattctgccttctctggagtctcattgccaccctatctcaaaggcttagtgagcagacttgctggtgtcctgtccttagcctcgaaaggggcagagcagagctggataaggctggggtacctgtgccatctgtgacccccccatcccctataaagctctgaaccccg

SEQ ID NO: 1998 - protein, 1229 aa, Mus musculus
MAEGYDAALSVAEWLRALHLEQYTALFEQHGLVWATECQGLSDAGLLDMGMHLPGHRRRILAGLHRAHAPPVPLPRPAPRPVPMKRHIFRSPPVPVTPPEPPPTAGEDEGLPAAPPIPPRRSCLPPACFTPTSTAAPDPVLPPLPAKRHLVEPSVPPVPPRTGPPYPQASLLAKEELLLPSVSPRSQPEPAETPSTLLPAFPQGPLQPPSPPPCPPVIPPKPPRLLPEFDDSDYDDVPEEGPGAPASVMTKEFHLGIGITFIDMNVGNVKEVDRRSFDLTTPYRIFSFSADSELEKEQWLEAMQGAIAEALSTSEVAERIWAAAPNRFCADCGAAQPDWASINLCVVICKRCAGEHRGLGAGVSKVRSLKMDRKVWTEALIQLFLHLGNGPGNHFWAANVPPSEALEPSSSPGARRYHLEAKYREGKYRRYHPLFGNQEELDKALCAAVTTTDLAETQALLGCGAGVSCFSGDPAAPTPLAEQAGQTLQMEFLRNNQSTEVPRLDSVKPLEKHYSVTLPTVSHSGFLYKTASAGKPLQDRRAREEFSRRWCVLSDGVLSYYENERAVTPNGEIRASEIVCLAVSPLDTHGFEHTFEVYTEGERLYLFGLENAELAHEWVKCIAKAFVPPLAEDLLARDFERLGRLPCKAGLSLQQAQEGWFALTGSELRAVFPEGPWEEPLQLRKLQELSIQGDSENQVLVLVERRRTLYIQGERRLDFMAWLGVIQKAAASLGDTLSEQQLGDSDIPVIVYRCVDYITQCGLTSEGIYRKCGQTSKTQRLLDSLRQDARSVHLKEGEQHVDDVSSALKRFLRDLPDGLFTRAQRLAWLEASEIEDEEEKISRYRELLVHLPPVNRATVKALISHLYCVQCFSDTNQMNTHNLAIVFGPTLFQTDGQDYKAGKVVEDLINHYVVVFSVDEEELRKQREEVTAIVKMRVAGTASGTQHAGDFICTVYLEEKKVETEQHVKIPASMTAEELTLEILDRRNVSIREKDYWTCFEVNEKEEAERPLHFAEKVLPIVHGLGIDSHLVVKKYQSMEAMLLYLASRVGDTKHGMMKFREDRSLLGLGLPSGGFHDRYFILNSSCLRLYKEVRSHRPEKEWPVKSLKVYLGVKKKLRPPTCWGFTVVHETEKHEKQQWYLCCDTQMELREWFATFLSVQHDGLVWPSEPSRVSRAVPEVRMGSVSLIPLRGSENEMRRSVAAFTAIPSPLWILFDNINISVYFTLWC

SEQ ID NO: 1999 - DNA, 87337 bp, Homo sapiens
  misc_feature (1)...(87337): n = A, C, G or T/U
cttgaaccttgtttttcttaatcctataatggggccaatatcccagagcgctgctgtaagaataaaataatgtgtataaagcacttagtgtaatacctggcacatggtgggtgcacctgtcagtattgctgggggacctttccaaattgttttcattatttcagaattagtactatacatgttagataataagaaatatagacaagtggccgggcacagtggctcacacctgtaatccaagcactttgggaggccgaggcgggaggatcacctgaggtcaggagtttgagaccagcctggccaacatggtgaaaccccgtctctattaaaaatacaaaaattagccaggcatgatggtgggtgcctataatcccagctactcaggaggctgaggcagaagaatcacttgaacccgggaggcgtaggttgcggtgagccaagatcgtgtcattgcactccagcctaggcaacaaaagcgaaactccatctcaaaaaaaaaaaaaaaaaaaaaaaaagaaaagaaaagaaaaagaaatacagacaagcaaaatgaaaccatcacattcctatctatcatttagagatctccactgttaacaccttagcaattgtgcttcctgagcttcctctatgcgtatattttttttcccccaattgaggttatgctgctttttttttgtttgttttttaagatggagtcttgctctgtcacccaggctggagcacacagcatgatctcggctcacggaaacctccacctcccagattcaggcgattctcctgcctcagcttcctgagtagctgggattacagttatgtgccactacgcccagataatttttgtatttttggtagagatggttggccaggctggtctcgaactcctgaccccaagtgatctgcccgtctcagcctccaaaagtgctgggatgacaggtatgagccaccgcgcccaacctattttgtaacctttttttaggcagcagtttccaccattttgtttctgtaaattttcagtgcatttgatactctgatcatgttcacttttctccagttgtcccaaaaatcccctttatagatggtgtgtccaaatcagtttgcaatgcagagacacactttacatgtggttgttatgtcctgccagtcagtcccacccagcccctttgtttacgttgaccagtagaagagcctgggccaggagtcccgtggaatgattcactgtctggctctgtctggttgcattctcatgtggtgtcacttagctcattcctctgtcctctgtattttctgtaaactgaagttatatccaaggcgtgatgggtttcttggtgcctagaatagctagcaggtgtcggtgtgtccttcctgcggcatcccaccaccattagtggggccaaggcctattctgggatgagggggaagacagtgtgacctctccctcatatggttgcttatctcctcttgtgagtggaaaagtattatgtgagggttcccttggcactgtctaaatgccagttctgggagatctttttaaactacacaagaaaacttgtccatttgctgagaggaacttgatcttggggatagggcacttgggtaaaaaaaaaaaaaaatcacagaacaaggatattgagtttcatctcactgagtgcaaacctagggaaacctcgttctgattttacttgctttccagacatgtgatctgggttaaatcctggctctgctacttaccagctgagtgacattgggcgagttacttaacctctttgagcctcaagttcctccttggatttcttatctgacagagttgttggtgagggggttaaataaaacaaggtgtccttggccgtcttctacccagatggaaagctctttgagggcaaggctaatacacagtaagaaatccaggctgggcgcggcggcttatgcctgtaatcccagcacttttggaggcagaggcaggtggatcacaaggtcaggagttagagaccagcctggccaacatggtgaaaccccgtctctactaaaaatacaaaaaattagccgggagtggtggcaggtgcctgtaatcccatctactcaggaggctgaggcaggagaatcctttgaaaccggaaggcagagcttgcagtgagccgagatcacgccactgtactccagcctgggcaacaagagcaaaactccgtctcaataaatgaatgaatgaatgaatgaaaaaaagaaagaaatccaggccgggtgtggtggctgacacctgtaatcccagcactttgggaggccgaggtgggtggatcacaaggtcaagagattgagaccattctggtcaacatggtgaaaccccatctctactaaaaatacaaaaattagctgggcacgtgcctgtaatcccagctattctggaggctgaggtaggagaatcacttgaacccgggaggcagaggttgcagtgagccaagatcgcgccactgcactccagcctgggtgacaagagcgaaactccatctcaaaaaaagaaaaaaaaaatccaaagatgtttgttgaaggaaaaacaaacaaacaaaccacaaataagaggacaggtggtatggccgcgtgataagtaccagggaggaaataaatcatccactttggcattcgactttcatttatgctttcatttcatttaacatgtagctattccaggctccaggctgaagcaaccatgagcctctgcccacgaggagctcacaggggtctgggagggcacagacatagagatgcattgtgtgggagcccagaaggtctggctgggaaggcttcctggaggaggagactgggctgagtcgggggagatggtctctggatacagaggctgtctgtctcctggcacaggtggctttttggggagctggacagggcttgtggcaagaaggaagtccatgctggtttcagaggcccctgttctttgctgtcctctttctcttcctccccctctgcctgtctgccttctggtcccctggccaaggctctgagccccatatgatcctgacaacccatatatcttgtctgcagtgccggatggagtgctgtgatgtgccagccgagacactctacgacgtcctacacgacattgagtaccgcaagaaatgggacagcaacgtcattgagacttttgacatcgcccgcttgacagtcaacgctgacgtgggctattactcctgtgagcaggcgtagcacgctgatcccagtccccttggcctccatccaggcctcccaccaagcctcctcttcccccctccctcctgtggttactcacatgaccaagctgctcggagacttgagtgctgagagatagagctgccctccctgtccactcctagacccttaggcacacacccatacacttacaaatacatatgcactcacatgttcacgtatatacatacacacataggcatacactcaatcaggcacacagcccccacccacatgccacatagtcccaggcacacattttcatgcacactcatactgtttttctcttgtacactcacgttcacgtagacaaaccagccaggccaacaatgtaagggctatgtgaggctgtaaggagcagggctggctggagacagtagggacaggtcttgccctgtctcttttctggctccagctgtgggactgtggtctgggagggaggtgtatctttgcactggagagctggcagttaattaggcatccctgcatctctggcctctgccacaccctcccttgtaggcaggtggaccagtggtctggctgaactgtcccttgccccccacagggaggtgtcccaagcccctgaagaaccgtgatgtcatcaccctccgctcctggctccccatgggcgctgattacatcattatgaactactcagtcaaacatcccgtgagtcaacctgccttccctgcggtggagcaggggagagggtcaggcagcgcaaggctgaggctgccaccatgacttcaatatgacttcgggcaggcatgggcccactggccctcagtttccttcctgtacagtgaggataatggctcctctctccctgctgggtctcttgagcagatcaggagagggcagtgtggccacctctgtggcaagtgggtgggatgggctgacttcgattggttgggctctgggacagggaaatgaggaacaagaggtgagaggcagggtcctctggtcctccctgaggctaagccaccttgatctccctgggcaaggacaggcaggtatagctggcctgggcaagggtgagtgtgtgtgtctgtgagtgcccatatgtgctcatgagccctgaccccagactgggggcttttctgaggggaacaggaaaagcttcaagaggggctaggatgacctactctggttcttccctttctctgcacccagaatcaggactgatctgtaacagatgtcacggcatgtgaattaactgtatgtgtgtgtgcgcgtgcgcgtttgtgtatactcacaaaaacatcttctttgcccccaccccgagtctcacctccctgtgccttccatccccagaaatacccacctcggaaagacttggtccgagctgtgtccatccagacgggctacctcatccagagcacagggcccaagagctgcgtcatcacctacctggcccaggtggaccccaaaggtgagggcttggccctggcagcctatcatgggatccttccctataccacaggggtggggcctgatctactagggatccagaagggcatctgttaggagctgttttgcattttggggcatttccatccaaagccttccttgaaccaaggcttgggactttacagtggtttgaaaagagtgggccagggaggtgccactgccccactgatgaagctgggagcacttttcctgggctctgccgtccccatgctctgccttgttccctgctcactggctgttccctctgcctgtcctggatgcctgggttttctaggccttagtcttctctccctggggatggctcagccacccctgtggcttctgtcacaagtggccatgtctctctcagctgagattcagattcctgtggccatcggccacctggacatctcccttcggatgtcttccaggcacctaagcctcgttgtgtccagtggggaactcgccatctttcctcctaacttgccccttgccctaagtctccacttttcagtcacccatgcccagaacctgccatcatttggggtcactccctcttcctcagccaaatccagccattgattttttttttttttttttttttgagacagagtttcactcttgtttcccaggctggagtgcaatggtgcaatctcggctcactgcaacctctgcctcccgggttcaaatgattctcctgccccagcctcccgagtaactgggattacaggcatctgtcaccacccccagctaactttttgtatttttagtagagatggggtttcaccatgttggccagcctggtctcgaactcctgaccttgtgatccacccaccttggcctcccaaagtgctgggattacaggcgtgagccaccgcgcttagcccccgtcactgattcttattgattctgcctcctcctcggcagttcctgagtctggcatttctctccataccaactaccttgtctgtgtataacagcggccagaggaatttctctaaaacacttatctcctcatgactctcatctgcttgaagttactctgtggctctccattgccctccaagaaaagcctaagccctgtcccaggtctcctggtgtctctcacacctcacccatccccacttctgtgcccaggcagcccttccccgaagcctcccctcctcgcccctccaggggtgctgtgggtgtcacctcctgatccctgacactcaggggagtcactggctccctgttctgtagtccattcccctctagtagaacagtcggctcctgttgggcccccagtgagttcctctctgggtccccagggctggcccagggtgggtgtcacagtgaacatggagtgagtgagtgagtgagtgagtgaatgactagaggatggggaagccttgagcatccttgcctggaaatgcttcaagccccagagcgcacagtggtccaggcctagcactcccccggcacctcattgtgttgggtgtcagaggtggagtggacacttgggaatgagatagggtggagagctgggcagtggattccaggtcaggccaggctggggtgctcagccagaggcctgtgtggtcaggggaggacttggaaggacaggcaggggaggggctgagcgtcaggggcattcctgggagggaggttaggttgagaagggatgtcagtgtgattgagtgaggcagcaggtgcagcagggtgggtcagagtttccacccatgtatagcctgtgcttacctaggaccctgtggttttcttccacgtaatctttgaggctgggcagagggaaagtgggggacagagctaagcctgaggacttcggtctgaggtggaagggagtgagggtaaaggcttgtaggacttgcctcacacacctcctcctcatggggaagacagtggcctccctggaagctctgggcagagggtggggcttttgtcaggggcggaggggctgggtccctgaggctgcttcctcccttccctgccctcacaggctccttacccaagtgggtggtgaataaatcttctcagttcctggctcccaaggtgagtggccttgggattttggggaggggtgttgaagactggaaagaggactatggaatgaggtgggtggagtcaagcctggagcctgagggccaggcgtggtggctcatgcctgtaatcccagcactttgggaggccttggcaggtggattacctgaggtcgggagttcaagaccagcctggccaacatggtgaaaccctgtctctactaaaaatacaaaaattagctgagtgtgatggtgggtgcctgtaatcccagctactcgggaggctaaggcaggagaatcacttgaacctggaaggcagaggttgcagtgagccgatatcatgccactgcactccagcctgggccacacagtgagattccgtctcaaaaaaaaaaaaaaaaaaaaaagaatggagaatggagcctagggcccagggagggcaagtagggctgaggagtgaagttttgaaagggagccagtcaggatgctgggggctgagccgctggaggggggtgtggagaagacctgccccctagccaccccctgacccggcggggcggcgggcccacaggccatgaagaagatgtacaaggcgtgcctcaagtaccccgagtggaaacagaagcacctgcctcacttcaagccgtggctgcacccggagcagagcccgttgccgagcctggcgctgtcggagctgtcggtgcagcatgcggactcactggagaacatcgacgagagcgcggtggccgagagcagagaggagcggatgggcggcgcgggcggcgagggcagcgacgacgacacctcgctcacctgagcgccgcaccgcttcagggacggagacaggaccgggcgagccctggggcggcggccgctcctgcactttctcccctcccccacccggcacctggtggcaccgggccaggcccaggcgggtgctgcagcctggctggacagagccccaataaacgatcccacagcctcagccggctcatcactgtgcctgcttcccacctgcctcatggccgctgccgcggtcccctgcgtctgcccttaattttgttaaggttgttgatcatccggccgttgatccttccagcatctcctcatttcccattgtgtagcggggaggagacggggtttatcactgccccccttctgtccatactctgttccattctctgcccgtatctatccagctgtccttgttgagcggtcattttggcattcacgccaggctatttgctttctttttcactgctttaaggcagcggtccccaacctttttggcaccagggactggttttgtgcaagacaaattttccatggatcaggattggggaaggattggttttgggatgattcaagtgcatcacatttatcattagattttgataaggagcgcacaacctagatccctcgcatgcgcagttcacaatagggttctccctcctatgagaatccaatgctgctgcagatctgacaggaggcggtaatgctagctcagcctctgctcacttcctgctgtgcagcctggttcctaacaggttcctgacaggaccagtaccagtctgtggcccaggggttggggacctctgctctaagggaaggagcaggccttgacagagaccctgggtcaggagtcagagggtgaggttctactctgtgtccttcggcccaaggccctttgggtccaacctatggactggggtctgacactcctgtcatcccagaagggaggtggaggggtccgtgggtctcaagccacagggctgtgggtctcagagctgaggctggggcagcataccctggagggaggtcaagggtgcaggtgaggggcctcagattccagtgcagttggtggggaccaggcttggtgattcacgccctccctaggtcattttgaagacctcaggactgtgttaacagaaatggtagggtccccagaccccctatccccttgccagtggtcagatgccagccttctcaccctgtgctgcacctcgctggtctgaagtctagagggacgcctgggcctcccctgtgatctgtggcccccaggtgccctctgctgcccaagggacacccctgctgccaggaccagaggaggggcctatgctctgctcctctgcagtgtttttgaccccatatgaacttggggcccggaagttctccgcaaggtctggccctgttctcccctcccggaaagctcctttgccttagccctaccaccagaagacacggtctactcagtcaactctttcccagagggacagggtgaatggccagtggggggcaggcaggagattctagaactcataaaaatgggttgcttcccagctttgcccaacactggctttgtaactttgggcaagccctcagacttcttggagccttatttcctaacccataacctgggatgataatttttgccatcaagcagaatgtaaggattgagataaaaggaataaattgcccagcactgggactagcatgcagtaggtgctccaattaatgacactttcctcttctcagggggtaaaccctcatcccccgcaatgtgagatctgttcttccaaatataccctttgtgcatataaagaaattgaagcccagggaaggtctctggcgtggctggccccggaggtgttctggacacaggacccagaaatgtctgccaagcttggtaccctcatctgtgtatgtgctgggaggatgggtgggaatctcctgttctctaggtgtgggtgctggaacctcaggctgcagccttccgctgagggatccttgggaggtgtggctgggtgggtagcttccccacaaccctgcctgtgggcacccagggagggaagtgagatacccttgaagaatgtggtggaggaaggatttcctagaggaggtggtcaggcnnnnnnnnnnnnnnnnnnnnnnnnnnnnnnnnnnnnnnnnnnnnnnnnnnnnnnnnnnnnnnnnnnnnnnnnnnnnnnnnnnnnnnnnnnnnnnnnnnnnnnnnnnnnnnnnnnnnnnnnnnnnnnnnnnnnnnnnnnnnnnnnnnnnnnnnnnnnnnnnnnnnnnnnnnnnnnnnnnnnnnnnnnnnnnnnnnnnnnnnnnnnnnnnnnnnnnnnnnnnnnnnnnnnnnnnnnnnnnnnnnnnnnnnnnnnnnnnnnnnnnnnnnnnnnnnnnnnnnnnnnnnnnnnnnnnnnnnnnnnnnnnnnnnnnnnnnnnnnnnnnnnnnnnnnnnnnnnncgggggggtgggcgcgcccggccccttgctgcaatttggcggtggcggtgtaagtcggtggcggcgccggtacgcctggtccccgcgtggagtctttactcaaaacaggtcagtgcggctgccggagcctcccccgtctgcaggcccctcgccacattggcctgcagtttccccattctgcagaaaggaacgccgaggccgcgcgctgcttctgcttccccgggtcatcttgtctgtttacctttttgggcgtgatgggggggtcgcctcttgaggataagccagcgggccagagacggtagggaaggggggtgaaccagcgggacccggggcttccagcccgtagccctttggcgtgaagggtctctggagtcagccgccctcgggcgccttggggttcccatctgtgaagtgaaggctcccacctcgttggccgctgagacctttacatttctggagatctgtacgaccctatgccctgggcctggggctccagtgaccttgggcaggctacttccggtctctgcatctcaattccccaccagtaaatggggcatggcttccccagagcccctacctggcccagttgctggtgaaagaaagtatgtgctcagggaatggggtcacgctgggagtggggtggttgggcctggagagagcaggcttagggtgcagcctgggggcaggggatgggtgtttggtgcagggccggcggggagggggggaatctggccagaagccatcacgctgtggtttctgctatataccgtcccttcccccacatcccatatcctggggagccttccctgatcccagataggtgggaggggggtgcttcagggccagatacctgggggtactcggaaggatttgactctttggtgggtcccagggtcccagactgaggcactcatgatacctgttcgcggagagtccccagaggccaggctgggagagactgcccagcaagatcatcacagggtagaaggagcccagcagagccttgaagacaggtgtggacaggtgcaggccccaggggaggggatgactggaatgggcttggcagttaagtggcaatttacaaggataaggaccctccaaaggcgagggcgtagcttgtgcaaagtcaggaatttggatggtgtgtctgaggaatggcagaaagatgggtgtggctggcagaggtgtagagagaactcatcctgtgtcccattcctggctggggattgtcaggaccgggcctggggaccttgcctccccattggctacttgcatattggagtagtttaggaagggggtgtcccaggcagagtaccggtgactgatgaggtggagggggcagaggccaccagagccctgatggcccccaggttttgttttgcattcaagcctcctactcaaccccagctttatacccccaccacctgggctccagccatgcttcacacatccagcctcagctttttgtacagattgttaatcctcctcccaaccctctagaagcttcctccccattcaaatccccaggtcctttgggacttcaggtttcagagatgggctgctgttgcccctccttcctgcccagccttcagtcttgtgtaatggcacagcttaggaagggtctccttggagctctgtggggatggggcctgcagagccatggggatcatgggacctggggccccgagtccttgtgcagccaccaatcactatgtgactctacaagtccccaaattcctcagagcctccatttccccatctgcaggatggagtgatcagccctggcctcatgccccaaagagagacggtgctggggcaatagtcaggcctatctgctaagatgctggggcaataggcctatctgctaagtcctgtctccagcattgagagtttgaatgaaagaaagagagaacccaggggaaggggtcagtttagaggggttgggggggtgtctgagagtatcgggggctagtggtggaccaggcctagggcatcggctggaggtggggagtcccttccattttccggagccctctctccttcccacccaactctcccttggctgagctcaaagccacccgccactgcccaaacaagtggcctctgttcccagggtagggggaggggaggcaggccctgggctccaggcccgcctgtccagcgctgaccctggccccccgcccctcactctaggtcttaacccttgggggcctggaccgggccctgggctccttgagggctggtgattcttgttcaccagctgtcccctctaccccgcttcaggctcccaagggttctgtcacatcaggaggggatgcagtaggaaatggggaaggaaggagggaacaagggtgggggacaggctggagcagatatggccatggacacttagagaccatttggcctaaaagcttctttcacagatggggaaactgaggccaagagctagagatgagggtaggatcacacagagacccctggtgggggtcaggacaggttctgtctcctagtctggcctctctgggggaaaggggagagagggagagggaactttttttttttttttgagacggagtcttgctctgttgcccaggctggagtgcagtggcacaatcttggctccaccttctgggttcatgccattctcctgcctcagcctcctgagtagctgggactacaggcgcccgccaccacacctggctaatttttgtatttttagtagagacggggtttcaccttgttagccaggatggtctcaatctcctgacctcgtgatctgcccgcctcagcctcccaaactgctggggttacaggtgtgagccaccactcccggctgggagagggaacattctttgttgagtacctgctgtgtgctggacactgcacatttgtcatctaatgatttacataattgcataagagcataagacgaccatcaccctccaatatcatagtggaagtaacagccttagagaaagctgagtaataacatcagtgagaatgaggtcagcaaacatgcctatagcactgttgtaaagttttatccatattaaccaattccaccctgccaataacccaagaaattaggtgacattctacagataaggaaactgaggcacagagaggctaagtaacttgtgtaagaatacattgggagggtggtagagagacagggtcaggacccaggtgttcattgcctcctttgtctgacttcactttgatcttactctttgagcacctcccagggctgagtgaggtgctttccccgggtggtgaccgaggcagccttgaacagtgtgtgaccccagctaagctgacccagtccccgctctggagcagagtccagtccctcgggcagctcttctcatttctttctctggtcttgggcaggttagagtcagcaccctccacagccctgtgcagagaggtgttatgttttagaaaggagttctgtgctaagggtggccactccagggttctgaacagcatgaggatttggtgggtggggagacatccccatccaatgtgcatgccccacaaaactcagaggctgccgctgaatcaaccccagtgtccccagctctgatcagagataacattttttccaccttcccctacccctggccaggcccccagactgtatgtgcattccaaccagggatctgaggaggacagtcccacctggaggcagatgaccccagatgtgaaagatggtggggggcaatgcatggattgtgttccacatggtcttcctgtggaatgtctctttttctcatccttgggccgtagtacagaggggaagagcctgtcccatagttaggttatctgtcctaggccactgggacagtcaaagagtggctgggaggggacgtggagttaagtgaccagttcaataacaaatcattttttttttttttgagatggagtcttgctctgtagcccaggctcaagtgcggtggcatgatctcggctcactgcaacctccgcctcccgggttcaagcgattctcctgcctcagcctcccgagtagctgggattacaggcacgcgccaccatacccagctaatttttgtatttttagtagagacggggtttcaccatgttggccaggatgatcttgaactcctgacctcgtgatccgcccgccttggcctcccaaagtgctgggattacaggtgtgagccactgggcccagtcaacaaatcattatttaatagtagtaataatagtagcagtagctattgtttcttggaagctgactatgtgccaggcagtgtgctaagcactttatatactgaattcatttaatcctcaaaatagtcttctgaggtaggcaccattcccattttccacatgaggaaactgaggtcccaagaagttaagtgatttgtccaagatcatccattacatagaatagctgggaatctacatttccattgcttcacagtgaaaaccacaagcactgggaggcattgcagacagaggagatctaaacccagtcctaccctgggaatgcctagtcagtgataggcagagactagagggccacctggtcaggtgacattgctggtgaccaactgtggatctggggtgccctcaagggtacaggggtatcctgcttgcagacgggactaattgccgtcaaatcctgagcccccgtggccctggccctgggataagcgtcttgtggaggtttggtttctgctattgtcctatccaccttggctcttgttcatacagtggttctcccagaccccattttgctgatgagactaaggccagtagaaggtggtgacttgcctgcagtctctcagccaaggaaagcaagagcaggccctggaaccccggcagggcgctctgaggcctgcattctacctctctgcttgaggcctggttggggcttcctgaagtgttgagcttccttcagaccctgcccacactgccttgttacaaggtccaagtcttttctccctgaccaaaccaggaacctgatcctgttgggatgctggggctttgctacagcagggtgtcagtaactgaacaaccctggaaacatggttctagagcccagagacagggaccacctatggtccagtgtgtggggctcagggtcagaggggcctagaggaagattaaggcatcagagagtcctccctgaggggatgtgttaaaatctccctcctgtccttatcctcactgttgtgagggcaacggtaaaggcaagagggtgggagaagatcaggagggccacttctctatccccattctcagggcagaaccaggggtcacacctggaatcttggctgtcagtggccctgggggagcttgggctggccctgcctccttctggccaggccagtgctggggtggcttaacccccgggacagaagaccaggagcaaggctgagctgccactgcatttcggctttccaggtgccagggtctcccctgccagctttcctactggcccagcgagcactgccccaccctgggcatccccctctctcctccccaacccataatgcatagggcaggggtctgcctgtagtcaggtgcagagtcaggaacccagggtctgcctcaggcctctagctcagtgagagacctttggctgggcatttatctttactgtactcaacttccctggagcttcagggaggggcagtaaggagcgactctggggatcccccaggcttaccagcccccagttgtgaacaggtcaggacagaaaccaaccaaattgggcaggtgagagggggagggggttggggggagggggctgttccactcctctccactcccttctcttcacactgagcagctagaattttaagattctgagtctgagattctaggctggtgagattcgaggattttagggttttatgtgcctgtgagtcccagcttctgaatttccgaaattctaggttccgagagcctaaaaagcctcgagttgggctgggtcacccccaagttgaggctggggcatgtgccgtgcttcagcctggttggtgcagacggctgaggcctggagagtttctcagtgctggctggtgggtcagaggcacagctggtctccaggtgccgggtgctccctgcatctaccacccccagcacacacccggctgtctccccttcaagaaatctgggaaccctgcagactaggtggtagcagaggggcactcagttatcttggcagtggggagagatgggccaggccccctctgcattcacgggttgtagtggggctgttcccgtggacactagggcggggttggggagggctggtggctggctaattcaaagagcaaggtcagggtcacactgctggccatcagggccagtatgggatgtggctcagcagaccaaggttaagccttgaagggtcagagccaggctcaggagcctctgcagaaggtggtggacagagatcaagagcctgaggggacgtattgctctgccttagggtatagaaggctgggcttgactgagggacttaggagctaccatccctagctgtttcccgtgctgtctgggcctgtgggcacagcagctgcactcaagaggctgcgggtcaggagcagctctgcccctcagagaagcacaacccagccaggagcccagccaggcagtcgtccaggagaagggcactgacagccaagattccaggtgtggcccctggtcctctccacctttgagacatgacacaggtgccctttgggacacaggagtgtctcctggaagattgcctggccaggctcctggcggggtcgtgcttcccagccccagcctgcagcacatccctccagtgggtactccatgcgggtatggtcagcattcctcatgggttggggtaggaggggcccagttctgcaccccttgatgtgtgagctgggcaaggctttcacccacttgaaacttggtctctcgggtggccaggcatggtggctcatgcctgtaatcccagcactttgggaggccgacgcgggcggatcacaaggtcaggagatcaagaccatcctggctaacacggtgaaaccccgtctctactaaaaatacaaaaaaaaaaaaaaaaaaaaaattagccggacgtggtggcaggcgcctgtagtcccagctactcaggaggctgaggcaggagaatggcgtgaacccgtgaggcggagcttgcagtgagccgagatcgagccactgcactccagcctgggcgacagagcgagactccgtctcaaaaaaaaaaaaaaaaaaaaaaaaagaaagaaacttgggctgctgtgtgggtttgcagcttaaatgcaagtttgttcccagtggccacagtgtgcctggtagggagaatgggccacccctttccactccaggagcagagttggagactgacacttttccagatgataacaggaaagctctggggtagcggctcccgtgcttggtgaaggggcaccagagccttggctaaaggcttccctcccctgctctgcctggggctgctctcttccttctgtctctttctcggctctaaagatggacatgctaagcctagggagtctgaagatccagggggtgtctagtggttctgttccagtttctgttccacggacatgaaccaggacactcatttgcctctactgcctgtggcctgaaaacccacatttctcagtgcagaactggcttagcccacttggagatatgtgggggacgggggagggaggttgctccagtatctctaatgttgcctgaggccccctccccagttcttccaaggaacaggctgctggagatatctgagctcaggctcgggggccaaggtctgagtcatggtcctgacttgcccgtgcggccctggctaggttcttgccccttctgggactgggacttactttcatttctagaaatgtggaaggttgatttggtggttcctaagtgcctaaggagcaggtggttgggttgtgtggtactggtcgagaaggcagggctgggtagtagaactatagtagaactataactgggtgggactgggtggaatgggaggcacctcgtattgggaggctggaggctgggttctggccacactttggccactgatttgcagtggcaagttgtcatttgcctggctctccatgtgtaaaattgggaaatgttcgttcagtcaacagatattcactgtgtgccacctttgggacacaggtatccctggtcttgcctgagaaagcacccagccagggttgggggtaagagagtatgtatgtgacagacacagtcacagatggtgacacacacagtcacagatggtgacatctggtgtgatcagggctgtgactgtgggagtcggagactgcttcctcaagcaggtggcacttgagcttgcagggtgaggtagagaaagatgttctaggcaaagggaaccgggtaagcaaaggcttggtggtgaagccctggtgttggagcgtgagagtggaggaaatgagaccagaggggaggggcaggtggcaggagccagtgggtggaagccccttgagccccactgggtaatggggggtcaggcaaggggtaggcaggcaggagaggtagcccctgcctgagggctgggggttggtctcagagactcctagaagtctggggtggttctgccctggtctggggaatggttgagggggactgagagtcacacttcccctgtgtgggtgagggcatccccagcagtgtttaaggggccggtccagcaggaagtgctggggcagcctcagaggtcaaaagaagggacaggccttgccatggagggtgccggggagcctcagagtcaatctccaactcctagacctccaggctgaaccttgacacctgcctcctccaactctccctcactctgcccatctctccaggcagcccctgtcccaagcctcctgagcagggtgagctggggtcaggccctgaccaaaggcctcccagtccaaccctctgcagaccctgcccctggccaccctcttcttgcctccgtgtgtgtgtccagccacagccgctgtggctcaggaggctccctggggagggatttgaggtgggggttgggggtgggggcacttcagaagggtgggcagcaaaggctgaaaacactggaaggtgccacatattgagtgcctgctcaatatgcctgcaagccaggcctttgtagatttccattcatacatttcacaaatattatcgattgagcattttcttgacgttgtcctagccatggaagatacaactgtgaataagacaaagtctgtgcctctcagttaaagagtctgactttaacaaatatccatataaggcagtgtccggtagtgataagtgggatgctgaaaaaggaaacagagtaaggagatagaggctaatggggtgctttttaggatagagtggtcagggaagaaaggccttgcatttgaggaggtgcccgaatgggtatgaggagtcatggagatgcctgggcaagaacattccagccagaaggagctcgggacccagcagttgagtgggggcacacagggacaggttgcacaggcctggcaggccggctgctagctttggcttttactctgagggaggtggcaagtcactggggagtgagaactgatcagatttgagatctgcttcatccctccctcacaagcctgcaaggtggagctatcctaattccattacacagatgaggaaactgaggctcagagaagttagttgaattcccaaatcccacagcaggaggaatccctgcctgctgcctgtctgtcacagtgtgctccatcaccagagcaccctgctgtcctccatgacttcctgttgtctggacagtaaggatcggggtcttagcatggccttcaaggcccttctcagtctgcactcagcctccctctccctctatcacttaacctccccttctcctccctgggccttacctgtcttcacgctgtccccttgagaggacccttgatacagattctggctcctgagtgactgagccagttacttaacctctctgaggctgtttcctaatctgtaacatggcctgaagccacctgcttgctaggttgttggaaggattttatgaggcaatccatgtgatatgtttagtgtggtgctgggtagacggtaagcactgcataaacacgaccttttgttgctgcaagcaggggtggccggatcaggtgagcaagttccagggctccctgtgggcctgctggagaatcgagagggagactgagtcagggagtcttccctagctgttgtctgattatagtcaggagactgaggtcacacatcaaattggaggccaaagcctgtggggctggtccccctgtctccctctttcccttctgaccctagtcccggccccacccatgtggtcaccctctccagccaacacaggcagcttcccctttcacgtgccagcagtaagggacccccttattttctgtcttctgcattccaggggccatctagagagtaggcaggtctgggtccctgttcccctgcacccctagttctggggtacagaggagcccaccaagtccctcctccttggtgggcaggagctttaggtttccagtgagctcacagaggagtcagttggcggcctccccttccctcttggggcagggtgggtgctggccctcggcccccagggcacgtggtgagggtctgtatcttgagtgctggtgtcactgggtctgtccactcccgctgcctgtgattctgtggtcagccctgtgcactcccaccctgctgcggtcagccctgtctcttcctgtttctgcctcatttatggtgttcggagtccccctcctgctcccgctgggggcagtggtcacaggaggatcttcctggagtcatcctgtggctcctcaggctgccccttgccctctgtgggaggagttgccacaggaagtccccagcccctgtagagtgtgtctgtgcctgagggccagggagccaggccagagccctgtcttgctggtggtgggagcgccccaggtctctgtaggtgtggggctggttgagtcacctttctaagtgggaagggcctgagctaggccgagggtgaggactgggagagtggggagggtcctggggtgaggctgtggagggttggggtcaggagctatgccatgtattagatgagcccggtgggctagagtatgtcctggttgcagggggcagaggcaggaggcagcggtgagggcccagaagtccaggcaagctgaggggcctgggttgaatgggggcagtgtggatgcagggcaggggtgtgcccaaaacatggtaaacaggaaggagttgggggaagcggcaggggtccccagacccattaggggtcgggggtatgtggtggggccagaggggcatagtatgtgataggctttttgacaaagcctaaaaccaaaccatttaactttcagcttcatttatttgcaagtgaggtatgttagacattcctgagtcatcccacacctccttccctacctgaccctcttttgggttggggcttggacatgaggggcccctgggtgaggcttaaggtgtggtaggtgagagtcagggccagggtggggtctgatggtgtcttgaggacaaacctcggggaccctggcgtctcgagtttattaatgagcctcagtccatttcccatgtgaaagtctgagggctgcgctctgtgctgctggccaccagtgcctgggagggagaccttatttgattagctttgtcttagacccttgggagggtaagtcgggggcagggagggggctttgagtgtcagtctcttattttccatccagatggcctaggaaattagcagtttctcttataatagttctgttagtaatctatgcatgttatacttaaatgataaagctaccttataatgatggttttggggagcaaactggaacaaactcaattgtaatgacttaaaacatgtttatcatttttttctaattataaaagtgataattgtgaaaacttgaaacagtgcagacatgaaggttgtagaaagtgaaagtctttcaagattggggttggagttagcgtgaggcctgaaagtggggtcagcaatgcctactgtcccttggtctttcatgtcccttagtcattaataaaactgtggtttagcattttattagggtgatgctggtagggttgctgcaggaaggttgttaaaaggtcctgcctcccaccaggtccactgtgtgtgggtgtgcgtgttgtgcactgctcaaaggtgcctggcaggtgtagggaagtgagggccagaagaaggaggactgaaacccagcctgtcctcttcttgctcagctgcttcccttggtgtggggctcctggaagaagaggaatctttttcttatttgcctaaaggccccacctgggttggagacagctcttctccccctgctccccacagtccccaaggggagctggtgagttcattgtatgatgggagtgtgccatgccagggcattccaggggaggtccagaatgccgtgaagtcaggtctggtctggagctctgcagggggacatggctggaggtaggctgtggtagtcattggtgtctggggtaaccgagaacctcaggatgtggagggagtctagcccagagcctggctacaagcctagcacccagggtcaggactagccaagaccttagggctagggacaggaagtgactgcctgacggcagaggagtgagcagaagagcacgctggcctccagtacacatgcggtggcgtgtcatggtcatctgggtgccaggctctaggaggcagggagtgacagctctactttgtggaggggaaactgaggctcagaatgtgatgtgacttgccccaggcttcagacaagaaatggtggagccaggactggaaccagacttgccttgcatactgggtggggagggggcccaggcctggagccgagggacattgctgatagacccccaactccccaccagcaagctgaggcagctcttcattcccccggctctggggtcccactcagtcctcactgccctgaggggctgctccccatcagccaccagcactccggagaccccagaagacaggccacaccacacatgggccaggacaggaatctcctggtgccagggagagttatagggcagagatgcggcctggggtaggacaggagaccccagtgtgccttcctgagactgttatgtggtggccaccagtccccgagagatggaaaataggctgcttggcccagagatcggtcagctgcccactcgaaggctgtacctgctgcctttcctggcagggctggagggaggtggcttctgcagaggcgtgggggccacttctgcaccctctgggctgggaacccagcccccactagttcctcatatctgcggaagtgcctctaacactcttgcctgagtgagcggagcctggagaaggcccaggagggcagcagaccgaagaggccctatgcagaggtatcacctggtgactgggccggggagggggccaagggtggggtattgggctgtggggttgttgcacacagttgaattgctggtaggagctgtgtgtggtgggaaagggcagatctgaggtgtggccattgggtggggtggtaggtgtgtgtggccctgggagatgtgtggcccttgaggtagtgtgaggtgtgcatttgtggtaccagtggggtgtggtttgtagacccaggcctggccagagctggctgtgtatgttcttggttcctgttggggagctccgaggagtttcctgaggtctggatgctggggtcgctgccctgcctgcctgtgctgggacagctgggcccagggtaggggatgaggctgtataagggaggtggtggtggacaagctgaggcctcagttaggacccctagcctgccttcctcccctccttgctccccatagggctaggtctttccttgaacccagggcagaggcctgtgcggaggggagctgaggatgcaatcaggggaggcggcctggccaagaggactccagagctgggtgtggaaagggttaggacctttaaggctgccctgatccagggctgactcatgcaaatcagaatgcaaaacaggctcagggaggcctcaagagagagccacacccacacggtcagcagactatgcaggtgacggagggccagccattgagcctttctctctaaacatcttctgttcccaccccactgacatctcctgtcaccaaattcaccaggtccttttctgtccctgggctttgcacacccagtcccctttgcctggaatggcctccacctggccacctcctacttatccttcaaggcccaagtcaggggttccttctagaagcctcccttacttcaccagacagaagcagtcacgtcctctgaaggccccgtgagctccagcaggtgacctggtgagtttctacctcacacagcttccatgacattgacatagagaagaatcacaggccttagggttgttataagaacaaatgagggactgggtgcggtggctcacgcctgtactcccagcactttgggaggccaagaggggaagctcgcatgaactcaggagttcgagaccagcctgggcaacgtggcaaaaccccatctctacaaaaagtacaaatattagccaggcatggtgcatgcccctgtagtcccagctactctggagaggctgaggtaggaggatcacttgagcccaggaggctgaggttgcagtgagctgagatcacaccactgcactccagcctgggtgacagagtgaccctgtttcaaaaaaaaaaaaaagaacaaatgagatgaaggagaaaatctagcaggggctgggcacatggttgccaaatggtgtgcatttagggaaagaaggaagctggagggtgcctgtctttggctaaggctctgggtcatcttcttgctgggccggtgaaacaggtcactagtcagtagtgggtagagatattaccatggagttgctgggctgggacagagaaggggtgatgagatttgaactctgaccttggggttgaaatggtaggtagaggacagaagggcaaaagttttggttccagcaagaagtactcaagccagacgtgaagaaggactggctgacaaggattagagattccaggcgacccttacctctggactgggactgagtgcacctgtgagcccagccaggtcctgggcaccactgtggacagcagaggagataagaaggggtatggactctcaggatactccaggatacatgggggattgggtggaggtggacccccacaaaacaagcaaccaaagagagagcagaagcagtgccgagatatggggctcagcctcagaggactaggagcttgagggggcagtcagggcagactttttggaggagctggcctggagccacctgaagatgggaggatgtggtttactcactcattgtcagcagacaactttgggggctccctgtttgccaggccagtgcctactgtgagaagtgacatggaggaagtcatggacagggccagcccagcctggctgggggttggggtatgtcactgacaacttgagcaagtcacttcctccctgtgggtgtttgtttcttcgtctgtaaacgtcagagctggatgaagttgaatgacagaccaaggagtgctcgaaggcactgggaaccatggaaaggctttgagtgggggtgggactgtagttggcacagtggagagacgctggagggacatgagagagaaggagaggcaggatgggggtgtgggggtgctgaagtctgattgggccattagggtggagaggagggaaacccctcagctcttggctgtgctgtcgcaacaggatgacactcccttctgccaggtccctgccttcctgaggatgaggactcagtgatgtgtcatagcagctgaggggcttaaacctccaaactagggcttggattagggtagagcaagtgaggcacttgcctctgttgcagaatttgagggggtaccaaaaagctcagtaattagctgggtttggtcatgagatcctgtggtccccgctactggggagggggaggtgggaggatcacttgagcccaggaggttgaggctgcagtgagccatgatcatgccactgcactccagcctgggcaacaaagcgagaccttccctgtctcaaaaaaaaaaaaaaaaaggtaactaaaatgtaaaagcaataactatttattttaaaaaggtcagtattcaaggtatataatatttaatgccatttaaaaaataaaaattaatgccaaaaatccatgatgagcaaaatataaaacattaacattttaaattaagagaggaacagtactgatgattctgtctttgcctcaggctgcagtgtggcttagcagggcactgctctgaacttcttttttcaatttgctgctttctccgggaagccttcccttacctcagcctggttgagggccccctgggctgttttcactggttgatggtatctgatcccttccagcctgaggttcctggagggccagtccaggtctgaggtctggttcatgcttccagtgccttgaacatggctgttccaaagaggtgtcagtgccgagtcaccgtgtctttgatgttagccagatgcccttagtgcaggaataggaacttgagagaggcccagtagggagccaggcttttctcagggagataagtagtttcctgtttcccagacctggtcattccagtggggttgctgggaccgtcatctatcaatctgtgttaaacgcttagtacagtgcctggcctgtatatagcaggtgctcagtttttgcttttgtttttgagctggagtctcactctgtcgcccaggctggagtgcaatggcacgatctcagctcactgcaacctctgcgtttcaggttcaagcaattctcctgcctcagcctcccgagtagctgggattacaggcacccaccaccatgcccagctaattttttgtatttttagtagagacagtcgggctggtctcgaactcctgacctcaagtgatctacccgccttggcctcccaaagtgctggggttacagtcatgagccactgcgcccggccctcagtttgtgttttgagaggccgtgaagagtggttaaaagtggatggccaaaggctggtggctcacgcctgtaatcccagcactttgggaggcagaggcaggtagatcacttgagcccaggagctcaagaccagcctgggcaacatggcaaaaccccatctctacaaaaaaatggaaaaattagccgggcgtggtggtgcaagcctgtagtcccaggtacttgggaggctgacgtgggataattgcttgggcccaagaggcagaggttgcggtgagcagagattgtgccactgcactccagcctgggtgacagagcgagaccctgtctaaaaaaaaaagttgagagctacagtctccagtatgaatagagtgtaagccacaatgcaatttaaacagtccaagtgaaattaatgttaataatatatttcatcatgtaaacaatagggaaaattattgagatattttgcattctttttttttttttttgtgctcagtcttcaaaatccactgtgttcaaaatctagcacatcatattccagggaccacatttcaaatgtccaacagccacgtgtggctactgctggctgctattggacagcacagggctagactatattcatactgcctccttcttaggtgtgtggctttggaaagttgtttaacctccctttatctcagtttcttcaccttaaaacagggatagcaatcatatgtatctcctggggctgctgtgaggctttaatgagttaatataaagtacttggatacctggcatgcagtaagcactgtttatgtggtctctttttcttgtttcaaattgtcgtttgagtagcactgccatttttgccaatgctttcatctgaagtgctagctacttaaaggttgttttttaagtattgacttttgggctgggtgcagtggcttatgcctataatcttaagcactttgggaggtcaaagtgggaggattgcttgaggccaagagtttgagaccagcctgggcaacataacgagaccctgtctttacaaaaaataacaaaattagctgggcacagtggcatgcacttgtagttccagctactcaggaggctgaggcaggaagattgcttgagcctgggagttggaagttgcagtaagctatgattgcactactacactccagcctgggcaacagagcaagaccctgtctcaaaaataaaataaggcaaggtgtggtggctcacacctgtacttctagcaactgggggggctgaggtgggtggatcacttgaggtcaggagttcgagaccagcctggccaacatggcaaaaccacgtctctactaaaaatacaaaaattagctgggcatggtgatacgcacctgtagtcccagctactcgggaggctgagacaagagaatcgtgcttgaacttgggaggtggaggctgcagtgagccaagattgcgctactgcactccagctggggcaacggagttagactctgtctcaaaataaataaactaaaataaaatatttaaaaaatgtatacctgttttagccctatcctaggcagtgataatcatggagtttgcttaagataaatacctgtttatgtgtttgtaagatgtaaaatgttcatgaatacctactgaagccattatgcagagcacagcagttttgaagttaaccctagtgttggcagacctgactgttccaggtcctggggagggagacctgtccatgccactccactggtccctagccccacagagctccggctgtctgcatagcaagggtggtggcctgtcaggaatatcctattctttctcctcctgcctggaagcatccccttttggtctgttttcctcaacctcccctacatatttaggggcagggccctggggtctcatgcccctgactcagttaccctacttgtgccctcaggccacttcatggtccccaggcttagtggagagggtcctgtgtccctgggtcctctaaggtcccccacctctcctgacaggctctgtgtcagggagacctctttagtcgcagggctgcattgtcccttcctcacccttcctggggctgtcccttccacagtctgcccctacacacatcccagcactggtcttgcagggccagagagtggggaagtcctgactcctctttaccacctgtgcagcccccacatctggacaggcctgtctgtctgccttctccctccaggaaggccttcctctggtctgacttctgttgccagtttccatgagcatgaggttccccgaatcctttcctcttccctcttccttctcttcctcttcttccacctcttccccatctcttcttttttcttttcttttttttgagacagggtctggctctgtttcccaggctggagtgtagtggctcaatcacagctcactgcagcctccacctcctgggctcaagtgattctcccacctcagcctcctgagttcctgggactacaggcacacactaccacacctggataatttttgtatttttgttgtacagatggggtcttcttatgttgcccaggctggttttgaactcctggactcgaatccacctgcctcccaaagtgctgggattacaggcgtgagctactgtgcctggcccccatttcttctttccttttccctgtccctctccctcttcccctctccttctctggcatctcatagtggccttgcctcacgggctttctcctccatccctgtccttgcagctcccgcctcaggccgagatgaggagcccttcagaatagctgctgtctctgggaggacccgggcgtccttggcagcccagctggtgagtcaggaggtggagcggtgggaacagggctggctgtggcacgctaggccttaacattgaggtcggggaaggcttgatggaggctgacacctgatagcccattttccattttgagaactgagcttgagaggcagagggtgaggcccagagagcttgctacgagcctcccagcaggccttggaaccttggaacagggtgggggtacgagacagagggacaaggcaggggccagcaggctgaattgcaggtctgtgtttatgtatctcctcactggattcccctccctgcctggcaagttttgttccctttctcattctcaggctctattcatggttatcacattcccttttaatttttatttactttttggaaaatgatacaaaatttaaaagatacagaagggtatagtgtctcctgtcttcccagctgtcaattcccctccccaaactcagttttatatatatccgtccagttttctgtgtttatatttgcatatatatataacatatgtatatttttttctttttctttaaccgagatgtttacataacactgttctgcatcttgcttttccacttaacacatctctaatatcattttatatgaactttagaatctgctggtctcaacaaattccagctggtaattttagttgggatggtgttaaagttttagcttaaccctggaggaactgacatctttatatgttgaagtgaaaagtctccctctcctcagaggtggatttccagggaagctggagtttgaggtgcagggctccttccaggatctaaagagggtcctgaacagtgtgtgcatgtggtcatgtgtttttgtgaattttgcaaaagtgagatactcttaaggagaatgtgttagtctgttttgtattgcaatcaaggaataccctgagtaatttataaagaaaagaggtgtatttggctcagggctctgcaggctgtataagcatggcaccagcatctgctcagcttctggtgaggcctcaggaagcttttagtcagggcagaaggcaaagcgggagcaggcatgtcacatggtgagggaggaagcaagagagaagccgggctcttttaaccagctagctcttacatgaacaaatagagtgataactcacttgttaccatggggagggcaccaagctattcatgagggatctgtccccgtgaccccagacacctcccactaggtccacctccaacattgggggtcacatttcaacatgaaatttggaggggacaaacatccaaaccatatcagagggcacttaaattgtgtaagcttcaggtcccatgaacttcaggccctgtgaactctgcatcttccactgttccctcctgtcccttcaggccttagttttcgtcctaggaggaagctgataactgttgtcaccttgccctcatgtgtcttttcagagatactttgttcatttaccagtagctgcacactactccatgctcccccttgtttttttcacagagagagaatgttacacaaactgttctgcacttttctttactcctttaacagtgtatcttatagatcatcccatgtcaatatgtgaggagtttcctcattcttatggccgctcagtattctattgcacaactacaacataatttagttaactattctcccattgatggccattttggttatttccattcttttgctattaaacacaggcactgtagctagtaaccttctatatatgtcaattctggcaggtgccagtaaaaatgcaggctaagtgcctatgggtggctgggtcagccatctgcatctctgtttttgggggaggcgggaggacaaagtgtcccccaggctggaatgcaatggtgtgatctcggctcactgcaacctccacatcctgggttcaagcgattctcctgcacctcagactcctgagtagctgggattacaggtgtctgccactgtgcctggctaactttttgtatttttagtagagacgggattttaccatgttgaccagactggtctcgaattcctgacctcaagtgttgggattacaggtgtgagccaccgcgcccagcccagacatctgcatctcttagggctttcatgcctagaggcattccacagccagggaggggatgccctaccacatcaccaatgcctgtattttccaactttattgctctttgacaatctgataggtagaaagcagtatttcaaaatattttacattcatatttcctagtgtgggggaggttaagttccttttcagatatttaagagccatttatattttcctttttgtaaattttttcattcatactctttgcccatttttctgttagattattgatccgtttcttatttctgcatgcttttcaacttttaggaaaatgagccctttgtgtggaatatgagtggcagatatcccctagtttgttgtttagctcttggctttgcttatggtgctttttaccatgcaagagtgcttgatttttgtagagttgaatatttcagtcttttctgtgtgccttctggacttgtttcatttccagaaggcttttgcctctctgaaatgattttttttttttttttttagagacagtctcactctgttgcccagggtggagtgcagtggtgtgcagtggtgtgatcatagctcactgcagccttgaactcctaggctcaagcaattctcccacctcatcctcacaagtagctgagactacaagtgtgcagctgcctaatttttaggttttttttttagtagagacagagtcttgctgtgttgcccaggctggtcttaaactcctggcctcaagcagtcctcttgctttagcctcccaaagtgttgggattacaggcgtgagccaccatacccagccctaggatgatttcgtaaatcctttcattttttattttttatttttttttctgaagtggagtctctctctgttgcccaggctggagtgcagtgatctcggctcactgtaatctccacctcctgggttcaagcaattctgccttagcctcctgagtagctgagattacaggtgcttgccaccatgcccggctaattttttgtatttttagtagagacaagggtttgccgtgttggccaagctggtctcaaactcctgacctcaggggatctgcctgcctcagcatccctaagtgctgggattataggtgtgagccaccttgcccagccatggttttttaaaatactgaagtctttgatacagctgtaatgtttcttgttgtaaagtgtgagatagggatccacattagttttttttgagagcactccacagctgtcccaacaacttaagaatcccttgtttccccacaagtttgagaggctacttttagtgtatcctaaatttgtatatgtatttgggtctacttttgaactttctgttctgtttaattgatctgtctgttcatgcactgttaccatatactgttttaatcattgtggctttataatatgttttaacatgtggtgaggttgactcctactctttaccctccccgccctccacccctgcttccagaattttcctcactcttcctgcttatttttccacatgaaatttcaaatcagcttcaaaaaaaattctgtacatatttaattggattgtgtacatttataaagtaacttagacatcattaatctctttatgttgtcttctatccagaacttactgtgctctgccatttgtccaggtcttctttttgtccctcagtaacactcccaatttttcttcctatcgctgttgtttatctcttaggaagtttattggtgttttctattttgtgatgcttttgtaaatggggtctttcatcctggtttctacctgtttgttgcttataaatgttgatttctgttatattaattttcgtttgtttcttttgtttttgtttttgtttttgttttgagacggagcctcactctgttgcccaggctggggtgcagtggcatgatctcggctcatggcaacctctgcctcctgggttcaagcaattctcctgcctcagcctcctgagtagctgggactacaggcgcatgccaccatgcctggctaattttttgtattctagtaaagatggggtttcactgtattgcccaggctggtctgaaactcttgagctcaggcaatccacccgcctcggcctcctaaagtgctaggattatagttgtgcccggccagtctgttatattaattttgaacccaactgtcttactaaagtctttactggttgttatagtttctcagttgaccttcttgggctttcaaactcaacactcatattattggcaacaaatggatagtttatctcttcctttctgattttaagacctcttgtttatttttgttgtccagagctttcagagcaatgtgaggaataataataacaacagtaaaatggatattcttttctcatttaagaaagtatcaatttatttctgttttagtaagatttttgtttgtgtaagtaagctggatattgggttttatcatatgcctctttagtgtctgtggagataatcagatgacttttccctttgatctgctaatcacctcttttggtcacctcttcatatcacctcttgactcccaccaggccaggagctcttgattacagggtgcaggggtagagcctgagtccccattgcctagtgccaggctattttgaaagaacaaatggatgaatggccttagtgatgggagggtttacccaattccagggccaggcccccagaggccatgtgatgctgggtttactcacgtcccacagcatttcacttcctccaggggcatggaggtagggggaggctagtctcggctcccagactgggcttgcaggagggaccagcagtggtatccttcaatgctcgctaagcccttggcctggccctcactgggaactggtgcctcagagggaattagccctgccgtgggtcttgcagagggcagtggggaggaggtataagacacagcaccaatcatgccactggccattctcacggcagtggccaaggctgtgtgttggggtgtggggtggtaccaaccccagagatcatggagggtttcctagagaagaaaacatgagctggatgctgggatagcacaagggaaggggtgagggggttcaggcggagagaagagcctgtgtgttcagagacctggcagtacctggccttgcttagcacatggagcacaggggaggaagctccaggacagaacttgaacctatggcttgagagagccatgcaggctgctggtgaggggaccaatcctcggcagccctgcctctgacctgtgcctgtctgtctattctagctctggacaaagccctgccagtcaggcctccgctggcaggaaccatggcagaggctggggatgctgcgctatcggtggccgagtggctgcgggcattgcacctggagcagtacacggggctctttgagcagcatggcctggtgtgggccactgagtgccaaggcctcagcgacacccgcctgatggacatgggcatgctactccctggtcaccgccgccgcatcctggctggcctgctccgtgcccatacctcaccggcccctgcaccccgccccaccccacggcctgtgcccatgaagcgccacatcttccgctcaccacctgtgcctgccactccacccgagccgctgcccaccactacagaggatgaggggctccccgctgccccacccatcccgccccggaggagctgccttccgcccacctgcttcaccaccccatccacagctgccccagaccctgtgctgcccccgctgcctgctaagcggcatttggcagagctgagcgttccacccgtgccgccccgcaccggacccccccgcctgctggtgaggtgagtggatgccacccagggtgggaggcgcacaggcagaggatcccagagggtagatggggagtttgtggcctttggtgctggggtaagaaaggcacttcggaagtgcagggggaacagcgtgtgcaaagctcggaggacaggattgctgtctggtgactcaggaggaggggagagctgtgcaggtactcagcgcagtgcctgggctgctgggcgtgtgccagtgaggcctccaggtttctgtcttgggtggctgggtggacagttgtgccatcactgatccagagacccaaggacagaagtgactttgggaggaagtcgagttcagcttgggacctggcaactgtgagatactgcagggtatcggggtccatgccggcatcaagaggcaacatgtgtaggaaacggaaagctgcggggtagggttgggggtgaggggactgcccaggtcctggtggtgtgctctttcacaccctgtccccttctcccactgccaaatgtcagcaaatcctgggacacttctcaggcctcatctggcatgccctccctcctcagaactgtttcccctctggggcttctggtaccctgtgttttcttgagtttcctctggctcctgtggatattccatgttaatctccttcacagacgccctcccttcctgccatctgctgggatgcccggctgtcagggagcatccccagacagggtagatatgtgtttggggtgagggagatttggtggagcacttgggcgaagtgaggctaatcttggaaggcttcttggaggaggaaggggtgtgcggagagaggtctcctggtccctgtttgtttattgctgggcactctgctgggctctgtgtttctatggtctccatgatccctgcagcagaccttctgggagatttgtgtactggctttacgagcaggacatgaacaaatcagagggagagcagggagggggccctggctggatccatgccaaggacatactcagggggccttgtggggagggtctgggagattctttccacccagggaggagcattaagtcagggggccttgaagaccaagctagtgctgtggtgttttgagggttgattggtagaagcacaaaaagggtacatgctcttcctgggttcacacaactcgtaacaggtatagggtctctccaggaacctggagggaagctcagattgaaggttcctggtgcccttgcgccctctagtgaccattcttctgcatgcaggagcgttttctatttcaaccccatcagcttgtgggggggagagagagagagaaaaagagagagagagagagagagagaggttagaagagagaagaggatagagaagagaaagtctgtctgtctgtctctggggttggaagtgggtgaacaaagggaagaagcagggccctggccaggtcccctctcaggcccttcctgtgactcccggacgggcagtggaggcctgggttcctgcttgggaggcaggatgcctgggtcgggcccagctagctttgtgactctgatgaggacctgcttctctgggcctgtttccccatcaggtgccctctgtggtcctccatagacttctgggccctcctggcactgacatctgagttcaggaggcttgctgggtaggaggaagtcctgtccacaccccagggctccagggtaccaatgcctactctcagagcctgtctgaacatagccatttaggcaacatgaggaggaggccaggcgccatggtcgggaaaaggtctagccccttgtagtttgagtacccaaaatctgttctgtgctaagagaattggaagaaaagtatttcctgcaatttgggactattccttacggcagagtatggtagtgggtaagctaccaagcctggcttcctgtgtcctggggtctttggcagttggagtcatgggcatatgcagtcttcagctttgtacacactcaactcagagagtgtatggtcttcaaagccctgtggtaggaaaaactcacagcagatggagcctcatgtgtgtataccaggccaagactgagtgctgtagtgatcagggtgggggccaacatggaccctgactggccaccttgtccgctctcagtcccttcctgtgatccccaggctccatggcatgtagagaggaacactgctcctgcccacccccgccttgtgggagtcccatcacagtgtctcatgacatggccttcctacccctgcttgcaacccctcatgatggggaactcactctctcaaccttagggcctttcacacaaggtcatgtggtggctgaggccggtcatctccaggctccccagtggagcttgggggtggatgcgtgtgcatgtgtgtactctcagtgtctcgagtcagtgtgaggcatgtctgggccagtctgtgtgtgcacccatacagatgggtgtgggtggtagtacaagctgtcagggtagtagaatgtctgtgcatttacacattcagacaggttctgagagtgtgtgctactaagatgtagaagcatgtagggatttgtgcagtttcagtggtgacatggagtggtgtgtatgtgagtttatcaggacctttgtgctcaattactgctgtggtggagaccccaacagtgtgtgagtacatccgcgagtgtgcacgtgctgtttgagcagaacatgacatttgtgttatttgtgcactgtcaggcttgagccagtgtgtgcacgtgtgtgtacatgtgctgccaagagggagagcccattaggatggcagctccactggggccaggatcctagtcgattttgtttgctgcagaatccccaacatctagaacagtgctggatgcctaataggcccttgggaagtatatcgtgtgggtgagtaaatgattgccaacgtgagcttgtgtactggcacgtgctgagcttggggtgcatgtgggtaaacacgcatgtgactcagcacccagtgagtgccctcagcacagctgggccatagggccctgagctcaccgccccagctccctgtcccccatcctactacccaacctacgtcatcccagatattttaggaagggagaggtcttcagaggagacaggtgggaagaacgaggctgtgataggattgtaggccacagaccaaggtttaggcaaatcagaaaacaagcaaggatggagttccctcctcctggccttggcatggcccaggactctcagaaccaggctcatgattctgcctggcctagggggactctacatcacccccagagtctgcaccccctgctattattattattattatcatcattattattaatagagactaagtctctctctgttgcccaggctggagtgcagtggtgccatgatagctcactgtagcctcgaactcctgggctcaagcaatcctcccacctcagcctcccaagtagctgggactacaagtgtgtgctaccacacctggctaatttttaaatcttttgtaaagacgaggtattcctttgttgcccatgctggtcttgaactcctgggctcaagcaatgctcctgcctcgacctcccaaagcactgggattacaggtgtgagccactgcactcggcaccctaccattaatttaaactcgtggtggggtgcttgctgaggagcccagagatgctgagaaacttgcccagagtcacccagccctgcagaagggaagccggtgcccagaccctgcctcctggcttcaggtcaggtctactcagctcttaaatgccgcagacatgagccctgtgaactggcttccctgagggtggcagaggggtcgtttctgatgtgaggttccagggtcatgccgcagatcccctcccagcttgctctggcctttggtgtccccctctgatacctggatgcctggaggcacctcaggaagaaggagtgtgtgcccagaaggcagctgcccagctggagccacactgccaaggcttccctcctgtgcccttgactgccctgcagtccagccaatccctggtcttcctggaggctgatcacttgttgccagggcagaacttgcgcccttcagagagcctctttcctagcctctctgtctccttatgcgggtggagtggtggagaggccaccgccagggcttgtcagtcaggacttcctgggcatccaccctgtgagggcctgcaagatcagtggacactgttggttgtctcttcccagcttgggtgggggtgcagcctgggggcggggaggaagtgtctgccccgggggattctgggtgacttttcgctttctcagtgttttcaggaagtgtgtgtgttggccacggctgcaggaggtgggggagacacaaagcaggaagcctccgggagaccagagctgggtgcagacatacacacacacatacacacagacacacagagtcacacacactcacacacactctctctctctctccctctgtctttctctctctctctctctctctgtcctttcctcctggacagatccacagttatacacagaaacaaacacacacgcacgtagagaagtgattcacaaacacttaaagacataaatcacaggtgcaaagccatacctgggctcaaaaacctccaagagaacgcagcctcagacccacccaggggccaggggccaggctgtttgcgagaccagcccaggcgggacccaggcttgcacgggcaggtacacgacattcttgggcatacgcagcccgcctggccggagctgtgggagtcctcagccccaagacccagcaggcgtctgagggtaagcgaggtgccgccgttgctgttgttgctgttgggcacgtaggagggaggccctgggagggctgaagtccctgtctgtcacctctggcctggttttctgtgctgctctcctcccccttctctttttttctcttagagttttgtcttatttcactttccccacttcttctctttttcccctgccttttccttttctccccttgtctcatccctccctcttccctgggctttctaggtctccacctccccatacgcctctcctgggtccaccaggagcccacggtgcctgttttctgggcctttctcagactctgccccacagaatactcctctttggggttcttgccccttgggggcctggtgctgatcaccttacttctctgctcccacctccctacacccctctggggattcgttggggaggcttagtttggcttatttcactgtcaagttcaagggtgctgtgattctgaacctctcacccccagaccagggtgatggggagatggtgtgctgcttacccctcctccccaggactggtgctgtggtgggtgcttatggagtgtgggggctggtctcccctttcctgagttaccgtggatccctaatgaattcaacaatcctgtgcttggcttattggggacatagacctctaaccaagtcctgtccacccacccggcactcttcagccctgccctgtgcccttggctcatcttttccatagggcccagcggataactgcacctgctctttctgccaggccaggccaggcctgggctggacccaggaagagctcagtacttctgtgagctccctgaggatgaacttcctcctgctgctgccctcaggagccagcacagggccaggcctgggaagcgcttagagctgccatgggaaaggggcctctgccacctcctgcccagacagcagggctggcctgtgggaaagctgagtgtaggtctggtggtggaaggtcaaacaggttgtgtgggcttagaggagggagggagcggtttgatggacttcctggaggaggaggcatgccctgagcacaatggagttaataatcccaggtcattatatgaaaaaaagcccctagcagaatgtttggcacatagtgagcgcttagcaagtggtagctgttgtcccagggagaagtgctgagagctgggtgaaggcgcggttgtgaggatgggctccaggttaactgggcactgctgtatggagagtttggggagctgcagaccttctccagtgatgaggatgcgagtagggtggtggtcattcagtacccacttactaaagccccttctgtgctgggaactgctggcggcatggagaggactggccctaggggctcccggcttgtgcagaagttgagagaagcagaccgtggacatcccattctagcaagtgagaccctaggaagggctgtctatgctgggggctaggcagaagtgaacagagcagaaccaggagagtgctggaggggatgacctttgggtctcatgatggaggaggaaggaagaagccacagaggaagcaggaggcataggactgaggcccgggcccctgagagtccagagcatgattgaggaagcgggcagctgggacagtttacccctgtggaatggagacatcagggtgggacacagatgtccacagatcactgggccggcagccctgatggtgagagtccaggggctgggattgggccaggtccctccaagacctgtgtgacatcttgtggggaggtggtgactctaggatggggttaggtctgggtcctcagtcctctgaggcagttcagtgaagcacacattgatatgaccatattgagtgatcagaattgtggggagccccagggaggccccagatcagcctgagatgtgaggggaggcctgcgatagtggggaggatggatgtatgatttgggctttttataggaggactaggagttggccaggcaggggagggtgttccaggtggaaggaacagagtattaaaggcctgtaagtatgcactgatagactgcagctcagtcagggagggctggagtgtgagtagtggggtgagtccagggtcagcctgagatatgcagactgctccactctgtggccttccttctctcacagtgacacctggttctttcggccagagattggtatagacagaaagataggaacgggtaggggtgaaggagaaggaggtggcattagaggccgctaaggctatgaagctggttcctggctcagcctgtagggcctgggtctccttcaaggtgaagaggttctgttgatgccatgtgcaagtggccctcctttactgaattatcagtaagcctggagactgaggctcggagaggaagggacctgctcaaggtcccaaaccaatgagttgagctgagttcaagcccaggtctgcctggctccaagccctgtctctagttaattgagtaaccacacatctcatttgacgtgggacaggccctgtttatgcctgctgccctgacatagttattaatagtgcctcttttaactcttagaagtgtttgtggtttatacaatgaattatgtggtcatgggtaagaggagggtgaccttgggcagggcagtgatgtgttccctctcagatgagtcctgagacctggtggcccatgggaggagactggcctcagagaagccctgggaccctggcatggccttgtttgctcggctgtggtgctgggctgccagggttcaaataccagctgtggcatcaagaacaaataatccaacatccctgtgcctcggtttcctcctctgtaaagtggaatcatcacgagccttaccttacagagcactgtgagtagatgaatgaagaatccatgtcaagtgctcagaaaatgcctgggaacacatacacgtagacacgcacacacagagttaatgaatccaggtgtttgtaagtccctgctgagtgctggagataccccaatgaggatgggatgtccatggtctgcctctcaacttctgcacaagctgcaccctcctcttacccattctgcattttgcctacccaccatgtcacctaacccccaggcatgaggtctgctgcatgtattttctctgattctataaaatagatttaggctgagggcccaggctggggtgaaccaaccccttagctgcccggggtgcctagtctctcgggaatagtgggtaagcaggtgggttcacatgccccttgggtagaggggagagggagctgcagtgcggggtgagtggggagcagctctgtgggagaatcttggaggttgcctagaggaggaggccggctgagctgcattttgaggtggaggtgggcttctgtgggctacgggagggagagggcagaggaggatgaaactgtgtgaaggcttggaggtggcgccattgaggacgtggtccagtgggtgacaagtcagtgggtgacatccaagccgggcctcagctggacctcgggattggagcggggcctactcttaggggtgcaagcagtgagaggctgggacttgggctatggcgggggcattctgtgggccctgttctcggtagggggtcactgccttttccctggggttttcccacatgttgtgccttcctgaaagcacttctcctttcctgggctccgtcctgactcagcagtgccctgataccctgtggtaagcaggcaggcagggagcagccaggagacttcctggagaaggtggctagaatttcccagatgcttccgagaggcccctgtgttccaccttcgtgagacacggtcccttccctgtggaagctctgctgggagaggagccctttgcatctgtttccctctcccttcttgccgtgggcagggcagtgatgtgttccctctcagatgggtcctgagacctggctgcccatgggaggaggctggcctcagaggagccctgggaccctggcatggcctcatttgctcagctgtggtactgggctgccagggttcacatcccagctgtggcaccaagaacaaataacctagcatccctgtgcctcggttttctcctctgtaaagtggaatcatgacaagccttacagagcgctgtgagtagatgaatgaagaatccatgtcaagtgctcagaaaatggctgggaacacacacatgtagacacgcatacacacaattaatgaatccaggtgtttgtaagtccctgctgagtgctggagttaccccaatgaggaaggagggtgtggagcttgcttcagggaacgtgcctgctgcccaagatgcacagacccgtcgcagttgatcaggacagtgatgggagatgcactgtggtgccagaggaggggggctgatgctgccggaccccagggatgcggacgagcaggtgggcagtttttatttatggttaccaccttcccctcagctctggccctcagacctgggggagctttgggagccaggctccctcaatcctgcttggcattggagagatggcacctgtccccacctccctggactgaggtctgactggccctggcctgacagcttggaattctgctctctgctgatcccaggccgggtttccaaggcgccttcctcttgggctctgggaggcagcagtgatggattgatttgcccatcaagaagtctctaagggaatcgcaggtgaccagctggggccagcaccccagctcatgctcttgggccttcaggcactccctcagttgcttggtcatcgttcaccccttccgttgccttcccttccacctgcccacctgtccacccaccttgtccacatgctattgctactgactgggctgcgggggtaccaagtcagatgctgcccctgccccaaagggactcaggtcatgtaggggagacggcctggtgcagtgcccaccagggggtcttcataggtccagctgtgagagtacgttccgactcaagactcccacaggcccaccccttggccccagattcccagagaggcccgttgggtagggagcagcttgccgccagggcagtggcaggccttcgtctgccatggggtctttgaagcgatccgagccacagcccatgcagctgtccaggagccattctctgtggccctccaagtgacagctcaggagtgaaggactgggtctcacagtggatagtgactcatagggagccatcctggctttgaaagctcttacctaaggggccagtagttttctaacatccccacaggtgtggcttcaactccctgtgtgcgatgtgcccagtttgcaagtcaccacactgagcgaagctcaaagctccggtttctctaccagatatagaatctgcttatagtttctctccgtccagatgctgttcctccacaggccatgctgccaaaggcagtggttgcctggtaacagggctgacacgccaccgtttgcaggtttctaggggaacagagctggaaacctagccgaaggccagctcttcacacagaagaggaaagggtttggttaacttttatctacacctggagaagagacaagtatagtagaaggtgatgtggaagtagccaagtgtcctaagaagctcataaactttggagtcagggttcagatcttggcacaaaggagatactttgaaaaatgtcatttagaataatttgtatgaagatctttttttttttttttttttttttgagacggagtcttgctctgtcccccaggctggagtgcagtggcgcgatctcggctcactgcaagctccacctcccgggttcatgctgttctcctgcctcagtctcctgagtagctgggactacaggcgcctgccaccacgtccggctaatttttttgtatttttagtagagatggtgtttcactgtgttagccaggatggtctcgatctcctgacctcgtgatccgcgcgccttggcctcccaaagtgctgggattacaggtgtgaaccactgcacccagccatttgtatgaaggtcttaatggagagcagcataaaggagggtcaaggaagactttcagagaagggaaatgtggttttagagttaaaggattgctttgggaagccgaggtgggaggattgcttgatgccaggagttcaaaaccagcctgggcaacataacaagacccagtctctacaccttgagacccacctactcgggaggctgaagtcagaggatcacttgaactcgggagtttgaggctgcagtgagctgtgattgtgccattgcactccagtctgccacagagtgagacccagtctcttaaaaaaaaaaaaaaaaaagaagttaaaaaactagtggatattcccaggcagagaacagggagaagggtgttactggtggaggcaacagcaggaggaaaggcctggcatcatgaccacaccccaggcagaccctgtcactgcctcccagcccttccttgctttcacggtagccccacaccatcagccaggaacaccagggcaacagacaaggccaaaaataagccatccaccctgattctcctccttggcccctgcagggcactggcagagacagctggtggggccaggcctccagggctcaggcaccttgttccagcctgtagtccccgtgcatcctgtgcactggcacatgacacatcctgtcttggttaatccttctagcaccctgccaggtcagtgatatagcccccgtttcacagaagaggaaactgaggctcagaggggctaggtgctcaccccaggacacacaagaactaagaaactaaggcaggattcaaattcatgtccttgatgccacagcccttcagaagacagcctgccagaagcaatgtgatctgtactgagacagatgggaacactgtggggccgtgagagcccaggaggccctgaacttggccttggagaatcaggggagggttccctggggagtggtagcagaggtgagtgagtggggtgaggtagcagaggtgtgggagatgggtctggtgggatcaggtgagtttgaggagtctgagggcaccaggaggtagtgaatatccaaatctgggcaagagcaaggtgatcttgagacagagacccacaattcagggccttaggaattggtttctgaggctctggtctgtgcctcgggccttgcagctcatttcaatcctgtcccttctctttgccgtcaatgccttcttatccttaaaagctcaggtcaagcatcaccttctccacgaatccttccctgactccccattctggtctttatccctccttcagtgtggagacccagtagatatatgtgactaaaagctagagcactggggataggtgaacacctcattcaggccaaagagggtgcctgcttcctttaggcttcggggaaccaggaggggttttggtctgggagatgagttgaggaggactgtgtgcaggagggctcctgtctgtgtgagtttgtgtagtgcctgagttttgctgcagttcaggtgagctgggggctcagtatgtttcagtcttggctctgttgcttagtgatgcccaacttttgttgtgttcccagcctgcccactaaggaggaggagtcattgctgccatcattatcatcccctccccagccacagtctgaggagcccctgtccaccctcccccaggggcctccccagcctccctctccacctccctgccccccggagatacctccaaagccggtacgcctgttcccagagttcggtgagtgctgcagccaggagatggggctctgggtggatggcctgggatccctggaatcaggcctctggaaggtatgcaaggatcacactcctttctgtgcaagcctgccaccagcccactgtgtggccccgggcaggtcacagcctccctgagcgctattctcttcatcctcacaatggagacagcacccacctctctggcctcctgaccgttaagtgtggggccatggccggctttgccagttacccatggtctgattttccatggtgttgggtggtttgcttttcttttttttttttttttttgagatggagtctcgctctgtcgcccaggctggagtgcagtggtgcaatctccgcccactgcaagctctgcctcctgggttcacgcccttctcctgcctcagcctcccgagtagctgggactacaggcgcccgccaccatacctggctaattttttgtatttttagtagagacggggtttcaccgtgttagccaggatggtctcgatctcctgagttcgtgatctgcccacctcagcctcccaaagtgctgggattacaggcatgagccaccgcgcctggccagaggtggtttgcttttcctggggttggccacatttgttgattcttgttgcctttgacagtccttaccccaacccccaagctcaccactggctcggacctccttgtggtgtcccagcttctcctctgccaccctttagtactgtcctatgaggcctgggggtataaatcgcacttcctgtcccctgtgcctttttttgaaagccagggggaggtggggatgggggtcttggcatgggggaggctttgtgaagcccagtgtggtgccccaggagaggaggccaggccccttgccctgaggccccccaacccctctctcaccagatgactctgactacgatgaggtcccagaggaggggccgggggccccagccagagtgatgaccaagaaggtggggccaggcatgggactgtctgcctgtcagggtgttgtgggggtgcccagctgcctgtcagaccctgaggactaccagacagagagtgggcagccatttcccgggaggcttccccttcccccacctcactctcttgccatacgggggtcaggagtcacgtgtagccacagcgctctgggccaggggtcggggctctggtgtggctcccccaggccctggctgtatgtgggtgggcatgtggcctccccccaccctgtgtgttaggaactcgtgtcctgtcccggagtgtctgtctctgtttcacttcttgtgttcccgtgtctgtctgtcttgcatccctagcccgcagtctttttctctgtccctttatctttctgtttttgtctgtgtcctaggtcggtttctgccactggctctcctgtccctgtgatctgggtctctgtgtggtctccgctggcagggggaggggagtgtgaggaaacagaactaaaagtgctgggctgtgtgggtcggggctgtgtggacagagggggcgtggcagccccgggtgggtgtgatctgtggcttgaagggaaggatgacgctgagtgggtctcgggggcaggaggagcccccaccgagccgagtcccacgggccgtgcgcgtggccagtctgctgagcgagggagaggaactgtctggggacgaccaaggggatgaggaagaggatgaccacgcctatgagggcgtccccaagtgagtgtccggccaccctccttcccactgagcccaacctcagcccgccccctccttgcctcctcagcccggccccccatcccctcatctctcgctagtggcggatggcataccagcagcctgagcttgtccttgcccagcacaatagctgcgccacaccccatggacgggccgcctgggggctccacccccgtcacaccagtcatcaaggctggctggctggacaagaacccaccgcaggggtgagtgaggcctcttgggtcctgctgtgctctgcatgggggggtggggggcagtgtccaggaccccaggacactggtatcactcactgatctgaaaaccagaagggcctgcgatgatttgcacaggtctccctccaggcacactgtgaccactgatgattccctccagacccattttattgccctgaaaattgggagatcgctgggcatagtggctcactcctgtaatctctgcacttgagatactgagatgggaggtttgcttgaggccaggagtttgagaccactctgggcaacatggcgagacctcgtctctacaaataaatttaaaaactagccaggtgcagtggctcatgcctgtagttttggctacttgggagactgaggtgggagaagcacttgagcccaggcatctgaggctgtagtgagctaggcctgtactactgccttccagcctgtgtggcagagtgagaccctgtctcaaaaaaaaaaaaaaaaaaagagatgtgctactttgagtctgacttcagtcactcttgctgtaaagtccatcttcttgccagtggccatttgggattcttcctccctagaacctggctgatcctcactctgagtgtggcttctgagggctggggtggtcctggaacctgtcctcctacccccggtcatttgcttgttgtccctctccctctccagatcttacatctatcagaaacgatgggtgagactggatactgatcacctgcgatactttgacagtaacaaggtgaggcctgcatcagtcctgacgcgacccctgctccagcctaggctggccccaacactggagcgaggtggcgtccctccccagaggagtcctcgccagagttctaagtctgaccccttaacccatgtcctcctggccctctgcctgctgagggctgcagtcagggtcagcacagggtcttgtctctaaccagctgcaggagacagggctgcagacttcattttggctgaggctgggggagtcagcgaggtgctgggtcccaaaatatagttcctgtctctcccccaggacgcttactctaagcgctttatctctgtggcctgcatctcccacgtggctgccatcggggaccagaagtttgaagtgatcacaaacaaccgaacctttgccttccgggcagagagtgatggtggggagtgtggggtgttgtgtgtgtgtgtagaagagggtagagaagactggaagtttgggcagaggagggggaagagagtcatggtgcatctgccctctcacatcacatccggggaggcatgctgcctttgtgaggtgggcagaggaagggggcaccctctgtgaccggctctgtgcttggcacggtcactgactcctcagaaccacacaatcagcgggagcaggcttggaggggtgaggtcacttgcccagcatcagtggcatagctgggattggagcctgagctcgttcaagtcagagaagtcaagcaaaatgatgggggcatctgagtgggctttctggaggaggtgttgcatgaggagcctagggccaggagacccctgaggggctccctgcaaccttgggcttactcctctacccttctcctgcagtggagcggaaggagtggatgcaggccctgcagcaggccatggctgagcagcgtgcccgggcccggctctctagcgcttatctgctgggagttccaggctcagagcagcctgaccgcgctggcagcctggagcttcgtggcttcaagaataagctgtacgtggccgtggtcggggacaaagtgcagctctacaagaatctagaggtgctaaggggtcatggaacctctcccctgcccatgtccacctaccctgccccaggctgacctagggccttagccctgccttttctgttccctcttttcctgcactgggcccagccctttgcctggatatgtcctcgctcccccaagttctgaccacttcccccaggctctgagcactgccctccagtccctgccctggcccttgctcccccgcacctctgttcattgctgtgtgggccctgaacctgcagccccttaccctgcccagcctcccatgtcccctgctgtctccctcctgggcaccccccccagtccctgagttgcaccaccttcccttcctctccctgtcccaagcctcacgccctgcccccaaagccttgccctcatcccgtcccatctgccctccaggagtaccacctgggcattggcatcaccttcatcgacatgagcgtgggcaacgtgaaggaagtggaccggcgcagcttcgacctcaccacgccctaccgcatcttcaggtgaccctccatcttcttggctcaccggcatcctcactccttcctaatgttttccttttgcgcgacgtgggaagctgccccttcctatgggatgggttccctcaccctgccccgccctgccccacctgtggagcccctctcccgtcacttgctaaccctctctgatctccttccctcctgagaggtcttactctcccctgtgctgcttggcaactgctgtcctcccctgcccgccatgctgctcaggggttgcccatctggcctcctgctcccactgcccctgccccactatccctgcgcctacgccacccctggagagtgctcttgtctctcatgaggctgctcctcagtccttgtctctgggccaccaagcctctgccatcttggtttcctctgacctcagctgttcattggtgtctttctctgtcctctgccctctccctgggcagccttgcccactcccaggccttcagccgctacctctgaggtactgaactatgcctgggttcgaatcctgggtccaccactgactagctgtgtgacctgggaaatcacttggcctctgtgtgcctcagtttcctggggaagtgtttgtaatactgggtagtaactgctcaataaacactagcatcactcccaacccttccacttctctgctcttagtccaggtgtctgtctccagcgggatctttctgctgagctctggcctgcatatctgacagctgtgggcatctccccttttcagctccctgttcttcccagaggcctgtctctccaaccaagaaggaaggactcgtgcctttcctttttttttttttttttttgctttttgagacagagtcttaggctctgtctcccaggctggtgtgcagtggcacgatctcggctcactgcaacctctgcctccaggttcaagtgattctcctgcttcagcctccccaagtagctgggattacaggtgcacgctaccacgcccggctaatttttgtatatttagtagagacagggttttgccgtgttggtcaggctggtctcgaactcctgacctcaggtgatccacccacctcggcctcccaaagtgccgggattacaggggtgagccaccacacctggcctgtgccattcctttttaccccatctggccccatccctctgctgtcacccttctagcccaggcctggtgggcctttggccccagcgcctgcctcctcactcttgggccgcccgtgcctgtccagcctctttactccaactgctttgacttctgcgggagccttatatttgagagctaagtttttatttgctcatttcttgcatttgaagttctctttgatgacatccttgccctgagattctttgccatagtccttaactaccacacagctgcagccccgcctgacgggcgttctctgattgtcagtctgagaggcctgtccgttcctgggtttcttgttgtcatcaaccctaaagaggtagacttagtgttctacacaaagggcctcccccagctggcatgagtggctcgttgcatttgggtgcaagcacaggaaggtgagcttggtgcttggctccacctttggcagttttgcgaattccacgtgctaggttgtggaggaggaggtctccagcacctccataaagtggcattaatggccatcacacctccagcagcgatgccttccttggttgtggcaatgggtcatgggtggagtagactcatggtcacatgtgtgactcggtggtggcagggaaagagccagaggggtctttttaaaactaaattttttcagggacagtcatcatttattgttcaaccagggcctcccaccctgaagagcagggcatgctatagcggccacaggtgtctcggtatgttgggccagtggagttctttgtggagtggggttatggagcatgtcacatttggggctgggacaggaatgaggatagggatggcggaggagtcttttaaagacatctctgtaccctcccctccttcctacttaaaccctctgtgggttctccattgtcctcagggtacactttgacttcctcttcctgatgcaggcctgtccctgtccatctcccacccttttctctgccagtctgcccttctgtctcctggaatgccccctgtgcaatcctgcccctttgcacatgctgttccctctgtctagactgtcctttcacctcttcacctggctcagcccttctgatctgtcgaatcttagctcaggcatcattttcttcccagcagccttcattctgcgggctgggcagagccccccactgggctcccctgcccccatacgctcttgtgttcctgttgtccttgcctttgtccacacctaccttccctaccagagtgggatgcctcactcttttgcctaagcgctcccaacaccttgtcccccacttcattctgtgcatcctcatgctgcccccaaatccctctgagtccatccccactaatctccccacccctatgtccccagcttctctgctgactcagagctagagaaggagcagtggttggaggccatgcagggagccatcgctgaggccctgtctacctcggaggtggccgagcgcatctgggctgcagcccccaacaggttctgtgctgactgcggggctcctcagcctgactgggcctccatcaacctctgtgttgttatctgcaagcgctgtgcaggtgtgtgcatgggggtcggggcaccaggcagaggcatggcggggttggccagttgggatggcaggtatcctatctggaggagggcctggagcggagacagcactcagagagctgctgttgatgaggcttctcctgcacacctgtgattagctttgagtccttacattgccaggcaggggttcaacttctcccatcacgggtggggacacggaggcacagggagaggaaatggcttgttcagggtcacctggcaagtaagtgagcccagatttgagcccaggcttgttggggtctggtgttcctctcatgtcagaagaatagggaaggccaggcaagaggagttggcaggggccaggcagggctttgcatgcagagggaggagctggtttttgtctggagggcgatgggaggcggggacatggtcagatttgtgggtcagactctggctggtgggtgaaagctgagttagaggggcaagactggagaccagtgaggaggctgccataggatccaggagagggaggaggaggaagcctggcctggggaagccgtgagcatttgagggctgttcaggatctatggtggaaaactctctgactgactggatgaggaagatgaaatgcgagagggttgagcccaaggttcattcatctgctcaatcgaggccactcattctggccactgtgtgccagatgctggggattctgtcctcttgggagctgacgtagcccaggtggtggctgtgggctgctggaggtggggatccaggtggaggagcaagtctagggaagtgtgctggggaggccctctctgaggaggtgacatgccagctgagatctgaatggcaggaaggagtggccatgaggacatgggtgatgacagtctgggtagaaagatgaaggaggggaagcaggtaaggagttgtgatctaattctgggagccactggagggtgaaagcagggattagaagtcagggatttacattttaaagagatcacctctggcagggctttgttaagagtggcctgcaagaggccaagcatggttccagggggccagttgcagagggctggtgcaggagcccaggcaaggattacggggctcagtcctgccctgtggggagcaagagtacacggctggattccagagctgccagcaggcctaccccctggggcctgcctgtggcctctcatccctgcctgtcccagtagacactgggggtgggtaagtgctcccgtgaagggggggcccaggtgattctgggtctggccctgtgtctacaggggagcaccgtggcctgggcgctggcgtctccaaggtgcggagcctgaagatggacaggaaggtgtggacagaaacacttatcgaggtggggatgcccctgcttgccaccgatacttggggtctgccccattcaacagctgtctgggtctcccagccccctccctatctcagtgaccacagcaccttggagctggaagagaccctttgtgataatctagtgggtggggatttcggaaaagcaatttttggcaaagtcagcaaactggccagtgagctaagaatgtttttatagttgtaaagtgttatttttttttaaagaaaaaaaaaggaagaaaatgcagcagagactgtatgtgttctgtaaagccgaaaataattactatttcgccctttagagaaagaatttgctaacttctgatctaatttcactgtcatccattgaatagatgtgtaaactgaggtcctgggcagggctgtaatctgcctgagattaccctgtaaatgcatattgaccaccatccctgcctctttccatcccacttctggctgacccagggccttctcccctaccttgcacagcccctcagaggccctcagcctccatttcatgtgaactcacatgtaccagtgggtatatatatgtgtgctgtgtgtgcacacacgtgtacatttatgcccctgtactggaaactcccaggtacccatatgtggtagatataggggagaacctgcaatgggagggtagacccaggctgcagactccagacacttggagtgtcacatccgtttctcacctccccacggtgtgtttggcacataagtgctaaggactttgcatatgttaattaactgactttcagaacaagccaggagttaggattagaataaccagtttacagccttgaagcccagggagagaaaataacttgctggaagacacagagtgaatcagtagtggcaaggacttttctgctttgttctgtgctgtgactccagcaccccatacaggacctgacaaggaggcaaggtggggggcctaggaaatggctgtggaatgaggagccgaatgaaggaactgattaccaaatgctggatccctgcactcacccagaatccacccccatccctcttgcccagagaggaatgtcagggataggagaggtttccaaaatccctgcccaccccattggctgacaggttaggcacccatccccagctgtcacagcctcaggaatgcagagctccagatgtggaactgggtggggcagcagcaaggcccctgggaccaggtgcaaggcctgaggcatccacctgtcagtctgctgactccctgtcctgtcactgagcctgagacctaggctcagagcccagtgctggtggcaggagcatccccagccaccagcaggccaggctgtcctcaccttccccattgggaaagtgggcagatggcctggctctcccagcccctttcctaacaacctcagaaaccaagtttctgcccggcacggcccctggctgtcagctggcccgtctgacctcctgcacacccccacagctcttcttacagctggggaatggcgctgggaaccgcttctgggcagccaacgtgccccccagtgaggccctgcagcccagcagcagccccagcacccggcggtgccacctggaggccaagtaccgtgagggcaagtaccgccgctaccacccgctctttggcaaccaggaggagctggacaaggtcagggcactgcagctctggggccccttgggaccacccccgtctttctgctgccctgttcctcatgctgtcttaacccatctcatctaccagctcagggagatgtcttggcatatggggaaactgatgtttggagggcagaagggccctgcctaagccatgtgaaaagttctggccatgcagggaggagccaggcctgacccttgggccaagggcacatccccagcatctgtctgtctctctcccaattcctcagtctcctgcaccccgtccggttgcttctgaatcctgccaaaaagagtgaacttgatggggatgctatttcctgtcaggctcatgaaaaacagctgggctgctctgacccatccccatccacaccccactcaagatgaggccccgcatgggccccaggccctgacaggctgggagccaagtcttaggccctgatctggctctgcctgagtgggaggcagccagctccgaggcaggggtatgccatttgtgacctctggttggccttcagcccctcccccaaaccgcccctcccaggcagactcagtccagctagaagcccggtgggagtcaggcctccacctcccagggacccaggcgtcctgctcccagcccaacccagtctagcctgcaagccaggagggcggcaactcccattggttgggagggctgggcaggcggtgaggaattcaaatgtgggaggaattagctacaaagcacaccccccccccggctcctccacaaggcagaaggagcttgagatcctctggaggctctggctgactgggcagctgtgtccaggcagccagcaggggtgaggccccgggcagctgggatcccctggcctctgctaggcagcccctgctcacccctcctccccttggcctctctcttccctctccttctctctttcttccttcctattctctctttcagtctgaggatggactgctccaggcctgggtgactccttccttttctttcctctcctcccccgtagcccctttccttgtgggccccctactccttcttgggctgaccctcccctgcctcttcctaggccctgtgtgctgcagtcaccaccacagacctggctgagacccaggcgctcctgggctgtggggctgggatcaactgcttctcgggggaccctgaggcccccacgcccctggctcttgcagagcaggcggggcagacgctgcagatggaattccttcggaacaaccggaccacaggtgagcgtggcagagggtgggggtccaccaggctgtgcagtgcctggtggggtttgatttacctgctgctctcaggccgtgatcgcagctcctcaagggcctgtgataaatcatgtgtgagctggggtgtgcttgggtttgcatgtcagtgtgtatttgtactacgtatgcatgttcctctgtgtctgtgtctctgtgactgttgatgacttccctgacttgcagtgtgggcccctcaggatggctggcagctgtgctggtgtttgtgcgcctctgagccccccggatttgtgtttctggggatgctgagagctttggagtacatgcgtgtgcagagtgtgtctgtgttgctgcgtgaggggtgctgagttacatttctccatgggtgggtcacccacctaggcagccctgtctactgccctgcttgggtggagctcaatcctgaacttggtttgggtaccattggctccctcttggggtgggtgaggaggggtcagtgggctgagcagcacagctcgtggcccaggcctggactctggggccacatcccaggactgagggtggagctcaatggctggggctctgggctcagggccatgggtgggcggggcacactgggctggagagagcccaggtgtccagggagacacaggagaccacccaactggcttgggcttggggacagatcaccgcccccccacggcgctgaccgtggggaacagggctgtagtcaggctgccaccttgagcttcccgctgtctgggacaatcctctttccagggattattattgagtttgcccaatgcccccctcatgccagtgtgcctggcctatgcctccaacctggagagtggggtggggcaggaatcagggaggcttcctggaaggggaggtgctggaactgggccttgggagtggagtgaatttccacaagtggggagaggtggagaaacagcctggacaagaccctgcaggtaggagggggagcttgaggctgccagttagggagctggggctgatgattcgaaagtgagcctgaatgcccaggccaggtgggagtgaggtggggacaccctcttgggtggccagcatgacctgccatcctttccccgcctacaaagaggtgcctcggctggactcgatgaagcccctggaaaagcactactcagttgtcctgccgaccgtgagccacagtggcttcctctacaagactgcctctgccggcaagctgctacaggaccgccgggcccgggaaggtgggtgccaccccagactctgctttagcccatggcatctggtcacggctgcagggctagggaagccagggctggccagactggtggactctggcagagtcaccctagagggcttcctggatatagtctgtggtacacagtaggtacttcctaaatgatcctggtgggagtgggggtagtgcatgacactgcagagcaggtcagtgccagagtttctttggactaaatgagcctttattgagcccctactggatatgggctctgctgagcatctggtagtaagagcctgtggctggtagggagtttgaggactgaacgaaagccctatccatctgatctcagccttccattcactccccaactcagaagaaaatccacaagagcccgcacagttggccaccacccccattacctctctgaaccacccccctaatcactctgccggtctcctcactgtttctcagacacgtcgtcacctaccaggatctttgcctgtgctgttccctctgcctgaaatgcattcccccaggtatctgcatggccagtccctcacttccgtcaggtctctgtttcagtatcactcctgcagagatgtcatctctgactaccttatgcaaaatagcaccccccatctctccctttacccttttgagatggagtttcgctcttgttgcccaggctggagtgcaatggcgcgatcttggctcaccgcaacctctgcctcccgggttcaagcaattctcctgcctcagcctcccgagtagctgggattacaggcatgcgccatcatgcctggctaatttagttagtagagatggggtttcaccatgttggtcaggttggtctcaaactcccgacctcaggtgatctgcccgccttggcctcccaaagtactgggattacaggcgtgagtcaccacgcctggctaccctgcattttcttcacaccacttacctggtactcatttgtccattaatgtacttatctatagattctctgtaccccactgggacataaactccttttggccaccactgcctgtagcccccagatcctagaacagtggctagcacacagtgggcacttggcaaatacctgcagaatgaaggatgactcaggcagagctggtgctcctggagggagcccacctgcggggacaggcctgaggacacattgctctcaaagagcacatgtcaggccctcacagacaggatgagagacagagtctgctgtgggaacattgtgaggtcattgctgacaacatccctcagcacctcctgcatgctttcctacggggacaaagccctccaactcccaaagagatttctttggaactccatgctgttcacaacctcattgccccaggtctgcctccctctgcctgacaatgtcatttatgtaacaactgcctgagtcatcctttttgccctggatgccaggaagctctgagccactgtaaagctcagtgctgtgaacggtacaagcctgcatggccatgacagcctatcctttccattacctttcctggtccagattcccatttctgtttcttttatgggaccttgccagtccttcagagccattgtagcaggaggcagagtacagagtgatagatgcttctggaaaaggaggttggggcatagaaggcttcctgtgacattcaggtggtgggtagaggggacaaggtttgcaaaagctgggagtgctgggtagggatgtgtgtgtccaggagtgacagagaggcagctggagagacgggcaggggtagacctggcagggccttgaatggcaggctgaggggcacagagtctgtcctgaggaccatggaatggttttggttagaggaaggatggggtctgattttagctagatcactctgggattttggaaggggctgctgcagaggcctgggggagcggatgacttgtgggctggctagcgtggtggggatgcagagaggtggatggatttagggaaaacttgagagaatgaagagctcatgggtcagatgggagcaggagccccgggaggatgcagaggtggttttcaggtggtggggggctccctgatggctcccctgcccaaattctccccagagttcagccggcgctggtgtgtccttggtgacggggtcctgagctactttgagaatgagcgggcagtgacccccaatggagagattcgggccagcgagattgtgtgcctggcagtgccccctcctgacacccatgggtgagtactcctgggcaaatcagactgtggttgctataaggtacaatcccccactggggagacagggaaatagacccagagaaggggaggacctccgcagagtcacacagcaaacggaggctgcacaagggccgactccagtctcttgaggccccagcccaagacttttccaccacctcttaggggaccagaataaggacaagcgccaaggcagtgcggagggggcagaggatggcggttgatggtgcgggttgggggtgggcccgtgctggatgaggtgggcctgagtcctggcctgtgtatttgcagctttgagcacacctttgaggtgtacacggagggagaacggctgtacctgtttgggctggagagtgcggagcaggctcatgagtgggtcaagtgtattgctaaggtgagcctggggtagcagggtgggtgtaagggtgtctgactggggaaggtggggcctcctggccaatcccatgtatcccagctcccccgtctagagagcagaagctagatgcagggcagcagacatggagcgggcctgtcccaccaagagcctactgtaatctgcagccctctgcggagttggtcagacctatcctagctctgcagaagaagggctgtgggccttgcactccataggtgctcaataagtgtttaacagtgaatgacagtcagagccatcttaggatggacagtgcggcctccagagggggtgtgctcctcgttcctggaggcgagcaagcagaggctggagggaagaggcagggaggccaccgggagagctctgcctcggggactagagccaggtgcctgtggggtcccctgtgctgtgagagcctgtgactttttatcattcacttctccgttgatcagttgtcttgtgcgcctcctgagagtcagccctcggagacctgggacccagatgaaccaggcttagtcctagctcttcagtagcacccatgtgggtgggggagacagctcccctgcgggtgtagttcaggcggcagcagcagtgtaaccagtgccacaacagagggcaagaatgctttggtgctgtgggggcccagagaagggccctccagaaggtgtctgggaaggctttccagaggcgggcacatctgagtgggtatgaagtggggcatggtacccaagttccatcactgggcttggttctgccttggggaagagaagagaaggcagctgggtgggaagagggcatgtgcctgtaagccaaggagctggggcattggggcaggcagtgccgttggctgatgctgtctcccccggcgcctctctgccaggcattcgtgcctcccctagccgaggatctgctggcccgggattttgagcggctgggacgcctaccctacaaagctggcctgagcctacagcgggcccaggagggctggttctctctcagtggctcggagctccgtgctgtcttcccggaggggccctgcgaagagccgctgcaactacggaaactgcaggagctttgtgcgtggaccagacctgggcccccagcctccagggcaccctatcctgggctcccaggcccccagcccttgcctggaaatctgaactctgcctggcctggccagagccgccatcctgccctctcatgtccttggggtgcatctcagccaccccatacattggtgggcgggtctcaagggtgtgtgtgtgctcacagagggagggagcaggttggggatcaggagcaagacctgggcctcaccttgactaacccctccacagccatccagggggacagtgagaaccaggtgctggtgctggtggagcgaaggaggtgagccacggcctccctgaggggctctgagaaggctggagcagtctgatgggcctggggacagggtgggataggtgtaggcccctcagtgactgactgtccctggcccaggacactgtacatacagggcgagcggcggctggacttcatgggttggctgggggccatccagaaagcagccgccagcatgggggacacgctgtcggagcagcagcttggggactcggatatcccggtgatcgtgtaccgctgtgtggactacatcacgcagtgcggtgagccctgcccctagggtgccagccccgcccctcccggagagccgcctcccgccccagagctgcgcggccccgccccatgactctatgcctcaggccccgaacgcttggccccgcccctccctaggcctgacctccgagggcatctaccgcaagtgtgggcagacatcgaagacacagcggctgctggagagcctgcggcaggatgcgcgctctgtgcacctcaaggagggcgagcagcacgtggatgatgtttcctcggcgctcaagcgcttcctgcgcgacctgcctgatgggctcttcactcgcgcccagcgcctaacctggctggaggcctcaggtgggccctgcagcccgtgcccagcctcctcctcctccacccatccctcctgactcctgcgcccttcccttgtggcacttgcactaggcttaccctaacccacaggctccagttgcctgcctctgcttctcattcccatcgccgctccatacagagccaggggccctggaagaccgagagttccttaccctggttgaatgcctggcctgcattgacttggagggcacagggactgctgtcacccaccatgagaggcacagcagcccaggcggggtggggggaagatagttacagggggtttctgacttgatttatctttcccacccagagattgaggacgaggaggagaaggtctccaggtaccgagagctgctggtgcggctgccccctgtcaaccgggccacagtgaaggcccttatcagccacctgtactggtgagggacgataccattgtgagattctggggggatgggatgaaggttcttctacccccaccctggctgactaccctcctctgggagccagctgggcttttgcaccaagtgctgactgtgatctgccctaacattggatatttgtagagcagggttccccagtccccaggccacagaccagtacaggttcgtggcctgttaggaaccaggctgcacagcaggaggtgagtggtgggtgaacaagtgttactgcctgagctctgcctcctgtcagatcagccgcggcattagattctcaaaggatcggaactctattgtgaaccgtgcatgggaggtggcgcgctccttatgagaatctaatgcctctgaaaccatcccctgccccccgaccctgtccttggaaaaattgtcttccatgaaaccaatcccttctgccagaactgttggggaccactgttgtagaggatttttccaactggggccagggtaccttgtctggatctcccagcttcccagtcctgctcctaccaggacccaagatatggccagaaaaactgttcctaccctgttaaacagtggtcccctctgaccagaccagtcttggacctgtcagaaattaatagggtgagatgggaagctctggcctgactcctcactcaaagccctcctcctcccctctccagtgttcagtgcttctcagacacgaaccagatgaacgtgcacaacctggcaattgtgtttgggcccacgctcttccagacagatgggcaggactacaaggctggccgtgtggtggaagacctcattaaccactatgtggtggtgtttagtgtgcgtccctggccagtgggcagtggagggcaggggtgatccttgcagatgacggtgaccacctgtccctgcctctcgccccttcccaggtggatgaggaagagctcaggaagcagcgggaggagatcactgccattgtgaagatgcgcgtggctggcactgccagtgggacccaggtgaaggctggagcctgggtggggggcttggacctgccacctgcacccatttcctaggcccccagctgagccctgtctccctgcagcatgccggtgacttcatctgcacagtgtatctggaagagaagaaggcagagactgagcagcatatcaaggtaggtgctgggacctagaagccaaggggctagagaatcaggctgggccaggtacaggctcagatggccaggggagcagtgcttctaccccgaggagaggaccagtttgggacctgtatctggctggtgctggggtctgctcctaaggaccactcagaaatacccctctctatcccaggactccagaagggcctgagaaggatgggctcaggctctgagtcacatagcaaggttgtggcagagcaggggctaggcacaggcaggctaatctcctccttggtccttgcaggtcccagcatccatgactgctgaggagctcaccctggagatcctggatcgccggaacgtgggcatcagggagaaggactattggacctgctttgaggtcaacgagagggaggaggcaggtgggtgacgctgggcttgtgcagggtgtggtatggcttgtcttgtctcagctgtagccccagtctgtcctcccctaccctgcacatgaggatgggtggtgaaaagggctttgatgacatgttgctgtcacactgatctctgtgatggtggtgatagggtgctggcagggattgaggttatggctgtcatgtggctgatagaagatgtcagtgacagtggtgatggttgaggtgagaaatgtattttatggtaaaggtggtcttgatggcagtggaggatgaggctgtatctgttcatttgttttactatatttgttgagtgccaggcactgggctagggagccacacacacagtccctatcctcgtgggggttagtctggtgtgggacggaggcattagtctaatgatcataccaataaatgttcaactacagatgcattaactgctgtggaggaaagacccttggcattgccaggtcttccctgagccaggatgggaaggaagagtaggggttacttggtgaagaaggcaaaagccctgtggtgggcagaggcacagccctttcaaggagacgagggcagtgagggggtggtgacatgggtggggctggagatcgaggcagaggcagccatgcagggcctagcagcaatgcaagaccatcggagggctagtgaatggcagtttaagaagattgctactcgctgatgggtggggagagggaaattagagcacactttgaaggccatggtttcgtccaaggagaaggcggtaatgtgggctggggtggcagcagtggagatagacagagcagagagattcgacgtgtggattgggagagggaggaggggtttgtttctgagttgagcagcctggcgggtggtggtggtgtttccctgatgggggccacagggagggtgggatgggaggcagggggtggagatcatgggcatggttttgcacatgttgaatttgagcagctttggtcacagccaggtgtgtcaagcctgaagcttggtcatgggaagggtggtcatgatggtggtgttttgtgtcgtggcacttgcatatggttggagtggacaggggatgtgtaggtgatatgtgcccatctgccagcctttggtggtatcgggccatgtggtcccagtgacggtaggtgtgacctctccccagagcgccccctgcactttgcggagaaggtgctgcccatcctgcacgggctgggcacggacagccacctggtggtgaagaagcaccaggccatggaggccatgctgctgtacctgggtaggtggtgcctgcagggtggccaggctccgggtggtcctctcttccagagccagggtgggacctggtggtgccaggtaggaacagctcagacagagggcgccaagtgggtgggcctctatggagaggctggggcaggatggggcagcttccttcatcctgggacccagccccgggtaggggttggtgcagcctgtgcccactccagtcccaccccccagccagccgtgtcggtgacaccaagcatggcatgatgaagttccgtgaggaccgcagcctcctgggcctgggcctgccctcaggtggcttccacgatcgctacttcatcctcaacagcagctgcttgcggctctacaaggaggtccgggtaagtggccccgctgggttctgccccagggtgggcacctgtacacctgaatgtgctcagagattccccttggtctgcaagtggaaatattcccgttacaggctctcaggatggcacagcagtgggggagaactgtagactctcaagacccctcctgctgtggccctggacggccactctagtgtgccctgtagccccactaagccctggcacccggatgccatcacaccactccatgcccatgctctgtctcactgtgcctgtgccttatcactgcatccacaggaacctgttacttgatgacagccccaagttgtgcatgcatgccttgtcatatcgtatgtcatatgcctcccgggccaccctcctccctcattctgtccacatgcaggtgttctcccaacccagactccatttgacaccctccaccttctgcacatacatgccatacacacaccccaaccccacacatcactgcacatgctgtcctggctctagacctgggacttcttccataaccctgatcctctatcaaacagagccagaggccgtggagcggggcccctgagaccgtgagtagctgtgggctgactgccagctgccttacaccacctgggggccaaatgagctgggtgggagcatggggagacagccagggctcctggccatctccaggcatggatccctgcccccttgcccgttggcactggcccctatcctggggcctaagctcctcccctttatccctaatcctgtcccagggtcctttccccaatatagggttccttatcagtgcaatgctctagaattttccaaaggacttagtgtagaagttaaagagccagtaatgatggcacctaggtttgaattagagccctgatcttcatctcctgtcatccctggagccaccttatttccaaccctggacagtgttccaggactgtcagaatgttcttgctactgccctgatcctaacatgccggggtgggacgagagaggcttgtgggatacccccacctggggtagcagtctctctgaggcttcctggctggctatttccactctgcacactcctaggagagagagctcatccctccgcccttggggctgccctgttcctagggggatacttctgtctggaaaaggtccttgctcaggttctgctgagaatctgcatctcatgatgcccccatgggtcccagctatgccttgggggctacagagcatagatgccctgcagcaggggtccccaactgttgggaacagggccgtgcaacaggaggtgaacatcgggcgagtgagcattactgcctgagctctgcctcctgttaggtcagcagcggcgttagattctcgtaagagtgcgaaccctactgtgaactgtgcaagcgagggatctaggttgtgcgcttcttatgagaatctgatgtctgaacatctgaggttttacagttttatcccgaaaccatccccccacccatggaaaaattgttgtccacagaactggtccctggtaccaaaaagactggggactgctgccctgcaggatgggcaacagagacatggttccaagcctggtggtctagcctgagctcccacagctacccaccaccccatccccagtgtcttcagcctcttcctgccccttgcatttcctgaggtcatctgaacaggcttggctgccatggcaggagcagagcagatagagcaggacctcatctccttctctttgcattttgtgcctcctctaatgcatcctgggctcctgctaaccctgtgggaaacaccgtctcttctctcctttgccctcttctgtgatcacatcctcacttctgagcctatctgcccatccagtcaatcccccttggttctgggatgctatttccctggccgcctccctctaggagtgtttagaaccctcactgtgggcagaagggagggaagatggctgaggtacctggaaagggacgtgtggatccctgggcatggaaggaaggaggcaggagagctagaaaaagggatgagatctaatgttccctaaggaacctggcttagtgctggcccttcacatactgagacatggaatccttactactgttctctgaggaagagggctgtccccacttccaggtgagaaaacaggctttgtgtgacttgcccaaggccatctataagtgtagactgggacttgcacccaggtttcttagtgtggaaacgcaagcttgtattcctggaagtctcagacttgaggactcagcagggaggggtgctcagcacagggtaggtggtgctcttcacaccccagagacagccaacacctctggcctggcagaggccctgagcagatgtgagctggttaccacggggttatcaactctggcatttgttggtttatgcggcagtaggacagaatatttgaaattgggacaatctcaggtgattcagtaggatatatgtccacttgtgccttatcctgggggtctcctcttgttaaagaccctgaggcacctggaaaaggcacatgctagaaagatcttggttccagcagagatccttaagcatcaagagtaaacgtcattgtctgcccatggccccatgccttggagatgctggaaacatgagccgtctgattagaaatgtccttgggccaggtgcagtggctcatgcctgtaatcccagcactttgagaggtcaaggtgggaggatggcttgagtccaggagtttgagaccagcctgggcaacatggtgaaaccctgtctctataaaaattagccggatgtgatggtgcatgcttgtagtcccagctactcaggaggctgaagtgggaggatggcttgatcccatgagttggggttgcagtgagctgagattgcaccactacactccagcttgggggattcattctcaaaaggagattgcattgactgacatccttccctcccaagacccacttctgcagactttctgactcagccacccttacatcacacacatgtcatgcacatcagaccccaaggaatcggaggcctgagggttgtgttttcattcttggagccacagcctggtttgaatgccttgattcctgcagttgcctctgcgcctgactgggcctgtcccgtccaccctcaactcacttgactgcttgcttctagttctgttcccctcccacccacagcctgacttcttccaaacccacagcctgttttccatcccctcagccgattcctcctgtacctggagtccagtttcccccacatccttcctcatacccagaaccttgtgttttccatgcctgcagccgaatctcttttatagcctctgtctcagtctttccatttctgccatcagctgtcttccagtttgcaggccgattgctctagtgctcccagccttgcttcttctgtgtgtgcctacaggtttcttccttatattcccccacatcttgtttcttccatgtccgaagcctgatttcctcccgcctgcctaatttcctccctgtctgcagccctgattgttccatgcctgcagcccagttggttccaggccctcctgggcacatggccatcatcaggttaggtgctgtctgtagaagacatgaggctttccaatcagcaggtatcggggtaaaagcagagtgaaaagtccttactaaggccctcctaagccacaccccctgtgagagcacagaggtcttctccagtccctaagcagcccatccttttgtgatatcacaggaagtccaccagttcccaaaacttccccttcccctggccgtcctttctctggcccctgctgaggagccatgcctggtggtggctgggagcaatggtggggaacaggggggaggtggctcagtctttgacccccagtttcggttgtaagtgaatccccctcccctgccattcactctggtgcccctgtggactccaggggtgcctggtaggggtagggcttcaagcaagtggctcctagagcaggaggaagcctcattagcttgacctccaaccagcctcttccttgggggtcattgcccccatccctctgcctccgagccagcctgctccttccaagcccagacccatatgcagaggcgggggccagaggtgaacattttggcaatctggtgtccctccccagtacattggtctctcgcttcctgacctagaccattgggaagttcttcctgtggtctgttgaacagctgttctgcttcagcttgagtcattagcctccttgtggaaccaaagagctagtaactgctggtccctcaagccttctgttcacacggtcaaccctggagcctccatggggcagagagggctgagaaatgaataatctgagatgaacatagacacaggcagccaaccgaggctctctgatcacacccgctcgttccagtttggtgctgggggaggatgtacagttctccctccacatacaatctgattcagggtgatacttcaagtcctccagtttgcagggcatcagggtggtgctgggattcgctgttacagatgtcccagttgggacggctgcctcggagactgagggttgactgtctgatactgctgcagggagacaggccttgggggcctagggctgggaggttggttgggctagattgtgaacagggagggctttatcaggaaggcttcttggaggaggcgccctgtgctgggatgcaaagagggctggggagttggaagagggagctgcccagtcgggagagcggccccagtgccctttctgcagactaaagtgccctcttctccttgccctacctcagagtcaccggcctgagaaggagtggcctattaagagtctcaaagtctacctgggagtgaagaagaaactcaggccacccacctggtaagctgggactgggcagataggcctgctactggggcttatgggggctcagaactgatgggggaggcacagctggggtttttaatttgacagagataggtgcaggggctctgatggtgtggtctccagaccagcagcatcacctggacacaccttcaacacaaattctctgccaagtgcagtggctcatatctgtaatctcagtacttggggaagccaagtcaggtggattgcttgagcccaggagttcgaaaccagcctgggcaacatggcgagaccttgtctctacaaaaaaatacaaaaattaactgggtttggtggcgcgctactcaggaggctgaggcgggaggatcgcttgagtcccgaagtttgggctgcagtgatccgtagtcacgacactgcattccagcctgggcgacagagtgagagcctatctcaaaaaaaaaacaacaacaaaaaaacacaaattctcaggtgtcaccccattcctactgaatcacagattctgagggtagggctggggcttaggggtgtcaagggcctgggaggctggttggggctgagacaggaagaggccaggatgtgccactcttgtgagaaggctctgaactctggctctggctctggctgtggcttctgggctctgtcctgggaactggggtgttgagcctctatggcctgtcaaacacccaactctctcccttcttcctctgtagctggggcttcacagtggtgcatgagacagagaaacatgagaagcagcagtggtgagtgagcgcctcatcctgagatcccaggctgaggaaagatggtggcacgtcccccttcattgtgtccctcatcactgcccagatctgtgaccactagcagaccctgggctgggaaggcagacacggtgttccctgctcagtcaggcctttggcatcatgtgggtccgcgtccaaccctgcaggtacctctgctgtgacacacagatggagctccgggagtggttcgctacctttctgtttgtgcaggtaccaggtgcagagtgtggggtgtggggtgggtccctggaggcttccattatggagaatggggacattggcttctgtgctattcaacccaccccttgcttcaaggagattttgagttgcttttaattcatttgctagtttattcaataaacccttcctagcacctactgttagtccagccccaagccagggatgctagggacagacaggacacagaccctgcccttggggcacccctcatgtggacaggaaaacagactcagaagtggccagttatagcccagtgtgatcagtgctgtggtggcagtgaagagcccaggggatctgagtcttaggaaatgtgggagaattcaccaagcatagaggagggggatgacttctaggcagagggaacggtttaggcaaaggtccagagatatgcaagagaagcacagattgttacagtggaatgtgaggggagaagccaggagtgctggaagtcagcacaggaaagggagtgagaagcagaatctcagaagaggcttgtaggtcacgccagggaaactgacctcgacacagaggtcagtggggaaccactggcgggggtgggggtggcatttaggcagagtgtggtgcaggcttgagtcttcgagggctcactctgggtgcagcgtcgggcagtgggaccgagggtagaacccagaggtgagcaggccagtgaggcagtggctgtggtagcccaggcagggacatggtggggatgactcctgagccagagcagggccagaggctgggttagacttaaaacagatgaattaagacacagagtttttaaagtgagagctcatatgtgtttagggaaagggagacaaaacaaccagggtgctaggctgagttctttcttggagctgtgttcttttagccctgagcttcctggtaagcaaagcctaaagggaaacggtggattttgtagttcccgattcctaagatggggtgcagacgtgttcctctaagagaaatgttttcttggttcttggaggggtttgtggatctggagattggagttgttgagtaacagaactggccgtgttttgccagagatgcagtcatgttctccccacagctgcttctcatatcggcggggatcaaagctgagggtgtcatctcagaccacagctggaggcatttctgggaagggtgggcagatctgaggctgagtgtctgggtgaactgaagctgagcccagccccttcctctctgctccccagcatgacggcctggtgtggccctcagagccctcacgcgtgtcccgggcagtgcctgaggtccggctgggtagtgtgtcactgatcccccttcgaggtagtgaaaatgaaatgcgccggagtgtggctgccttcaccgcggaccctctgtctgtgagtggctctccatgcctttgggcagggggctgggggcctggctgggtgcctgccttctactccacagtagatgattgccctgattgccctccctgattgccctccggccccctccctccagccttggtgggggccctcataggcctctttggttcacaccattcaaaggagccccttctgcctggccctggaagctgggagtcccctctgcctggccctgggagctgggagcctggctgattggagtgctccccggctggcagtggagagtggctgcagcagccgcagcagcttcagcggggcgccagcccctctgggccttcacaaaatacctgtgggtctcttgccttcctgcagcttctgcgcaacgtctgagcacaggagcccatccttggctctaggattccgccgctggaagccttctgttcagacaccccttatgctccaaggcctgatgtgagccagcggggggtgcatgggaaactgcaccccacaacccacatcctccatcctgactgcagcatggggttccccggcaggggtgggaggcagcaggggtcagcctgggcaggaacctctcccaactctgtccaggtgttcagacctcttggcccaacctgctcaccccaccgggttcactgtccttgtggggctggagagatgggcataagtcaggaacttgggaggaccaccaccctttcagaggcgtgaggccctggggccctgccggaagggagccccctgctcctcccaacaaactccagaacagcagaaagcgggtgctgtagaggagcactcagctcacggggagggagctcttggctgagcttctacagggctgagagctgcgctttggggacttcagccttccttccagtctgggctgagtggggggtccagactacctgatgccccttccccaatttggggactttttgataatataaatatatctgtatattttaccctatggtgctgaggcctgtgattggctaaggggattgggcgtcctggggtaggaggggacaggaggtcgggaagcccaggggtgagtgcctagtgcctgaagctgagaacctaggccttgctttctccaggccctgagctattcagacgacccccttccccaagcagagccctggcttgactccatgccttccccattgtactatcctgcagccaggctgggaatgccggtcctttcctggccagcactgaccctggctggacacaagcccctgtcctgctgcagtccgagtctgagtcccagctggggcctgggtgtggtgtgtcagtgactcaggcctggcagccctgcagcagccccctgctggagacacaaggtcagagccacaggagcctgaggaaattgagaagaagcacctttgggtcacctgtggccccagtgcctacccctccagaggtggggcctgccatgcaccagggggctgccctcactgggcactgcctggccatctccactaagaagatgaggccctggcctgcagaggaaataatgagttgctcagagatgggtttgggactccccggggaggtgccagacaccacattcccgcctctgcctagagcctcattaccacccgctcttcgggggctcagtgggcggacaggctgacctccatccttagcctcagccagtggggctgggcagagtgggtggggatgggccatgtgacctccgactcaggcatccagctcagtggggagcctgggtccagcggaagacttggggagctggactccaggttccctctcgctgtctcaggaaggggaggtatatggcaggagactggaaccggttccctgagtcctactgacctatttcacaggctggggctaagccccttgagtctcccacctcctgtgggtcgctctggccagatccacaggtcgaatgtctgacccttctgcctccagccaggacaggttggacccccttatccaagtgctgaggggctggaatccgctcctggatctgaccttgcactgcccagccagccctgaggcccacctgagtgggtgagactggaggcgccccctgctctgctaaggccactgccccagctcagcgtgctggctgcagtcctgcactaggccacaaggcggcagccatggaccactcatcattgctggaatcaaagcagggtctggaggatgcctgagtggtggtcctggcccagacctttctctgctggggtgtgaagcgggacccagttctgcctttggcctgcaggctggtgacattctggaaggcagcaccatacaggaatgtgcattggagtcctgggctctgggaaccaggaagaggagggaacagccttctaccaagtacctgctgtgaatcggcccctgtgccccctgcactgtctgctcttggcaagggggagctaggcccagagaagggaggcaactttcccaaggtcacaccatgctcgtgaagcaggcctgaggtccatttcccctgccctactttggtggggtctccctctttgactcccctcctgattccaacccttttctcctcttagaaatggcctgaggcagggggtctgaactgtcaggagttagtgatggcttaaagtgatttccctctggtaaggggtaggggtgacatccaaacaggagcctcagggcctcagccggaatgaaatatgcctgtgacaacagtgttggatgggttaggggcaggaggctctgctggtccttgtcgcaaggattcctaaaaatggggcctgttgggaccctggatggtttgctcattcacatattatttgaagttgggttgccatggatgagttgaagaccccagacctggacctgcagaggggccaggagcagctcttggaaagggaggggcttcctggacaaggaagtgctcctgagccagctttgaagaccggaggccttgccaggtgtggttggggtagaggttgaaatactgaaatattgggggaggaggacagggcttcaaggaccaacccaaatccaggcctagcccctggggaatacggggagccctgggaaagaaggccgaggcacgtcagagcctggatggtgagggcactgcaggtgaaggggaggctggggggcagaggggagaggggcagggaggtggggtaggatgtctgcctctctcctgcctccttccagcacaaccttcctaccctgcagagttctgaggagtcctggggcttctggagaaggaaatcagtgggacagggaagggcaagagctggggcttctttcctggcctcatgctctggtggcctccaagccacctgcccacagcccgctgtcttggaaagcacgcgtgtgggtgccagtgctcctgtttacaagctgtgtgactttgcctgagttacttaggtctctgatcctcaatgttgtcatctgtactttgcgggtattaatagtagctacctcctagtggtttgggcaattaaatgagctagtaagtgtgaagtgcctagcattgccccttgctaatccccttcccactgcactgtctgcagtttctgagaaggtatcatggcatattctagtcccaatatatttgcactcaacaagcacttattgaacaccaactgtatgcagagcgttactgaacactgagggggagcagatgagtgagtggtgtggaggaaggtagagacctcctggtaggggatattatcaggaaagactggaggaggtgagtctgaaaggagaggcagttctccacaggtggaggagaggaagtggtctgagcacaagacaaggggatgtgaccctgctgtggtcactacctgctgtggctgggacacagtgccctacagcaccctagggcctatcccccttgcgcctgcctctgagatatgaccacatcccagtccagtgggctccttgggatcatcccccatcagaataaggaacagttcctattctcttagccagctctgtgacctaagtgaccctgaccctgctctggggactgtctctcacataagtgcagtggcctgaacctcccagcccttcctccactacgacacctccttcaggaagctcttctgggttgctctcccatcccactgtgcctacttagggtatgcgtatgtgcccaggtcaccacacctagtcagggactcacctagggaagagcagtcggggacagtttccctggccagccagggttggcccagccctagcatgtcccttctcctacaccacttccagcctgtggaaatttccatactttctctgccctggttacagctcctactgctgtatttatcaccctggagacacagtggcacaggcgcacacatgccacacacactcaggcctgcacacacgtgcctgcacacctcagcctgcttctccagatctgcgagtgcatgctgcgcgcacacacacacactcggcacgtggatgagcacacacacacggcacgtggatgaacacccacccacacacagctctctaggaaaattgctccccttccctcctgctcctcctccaccctgtcctcccaccaccacccacttccaaatgctgagaccaaagagatgggctggacggtgcctctcaccacttgtcagcctgggacgccctcctccctttgtgactagcatgccctcctccccctgcccgtctgcctccccagctctctctgcctccctgtcgccctgccacctccctgcgttcctgtgtatctgccctccacacaagtcactctgaggcctctctttgttactcttgactctgaagtggaaactgctcctcccagctctcctgagaggctcaggatggggacctgacctcatagggctgatggaggcatagggacaagtgaaagggaccccaggtcccgaatctcctcagctcctgtcaccttcagtccctcctattgggttaggggagggctgtgtgcctggcaccatggagaccagtgtcatggcaacacagttcgggtgggcacagcttcctcctcctggggtgtggggtccataagaggaggtgccgaggaggtgggccttgtgctggtgcccaccatggctgcctccagctcaccattcccaggacagcccacccccatccccccagccaactttgcttgccactgcagcttccagtgccacaagtcactgatcccatttgggaaatcctctctcaaacaccagctccagagctgggcgccagagagggcaggggcttgcccagggtcacacagcaagtctggccaagctcctgactctcagacctgttttctcctccggtctcccaccttccacccagaaaggggactgggggcagaggggtcagtccaacctcagttcccaccacgatcttcagccagcccttagagttggcagtgggagtgaagatgcaagtgatagtgccgagaaaccatcatggggcgcccaccacctgctgtgccaaggctttgcatgtgtcatcccattttattccaagacccaggaggaagatgactggtaagtggagtagctgggacaggaacacaggtccctctcagatggggcaggtgagtcaaggctcgtgtgtattgctgtctccatcaggcgctcttttaaaagaatggcaaagcttttaatcccatctttattaccggtaagagtgtagggggaggatctggggcatagcctgggtctggccttagggtttctagaaaccaggggatatttttctaagaagatagagaatagagctttcctagtgtggttagacctagggaagacctttcttgcagtgcagcaatgcagaccgacttccaatccctaggtcaagctggagtctagggacagaggggaggagacccctgcctcctgtgcccagcctcaacttgtctcctgaccttcatggagtcacgttgcagctgcctccctcctggcttatgtaataattcaaatatagcagctgcctttatcccactgagtcacaccccctgcatcccccctcaggtgcggggagttatgggggaagaggtggttcagggctgagtgggaggttcggggcctcctggcaaggaagatccctagtgtgctggattggagggtggtggtggtgagggggctggtgctgaggccccaagaagagcagagccttcgccagaatatgaagccacaggggccacttctgccctgacccatccctgctggaattccacattcctgggggccctccccagagtcacaagctatatgtacagccttctcttgtgggctgctgtctcagttggaggaggaaggagaggtggaagagtatgaagagggggaagtagtccggtggggcaatggccaccgtctttggtcctaggctcagcctcgcccttcactcactgggttacctgggcacccctctgacctcagttttcccatctgcacagtgaaggattagattaactggctctagcgtctcattctctctgatttataaccctggagatgatctcaacctgaggctgaaggcacttccgagtgtctggcccagccgcgttccaggctgacttccctccctcttttctctgccatccctcctagaccaatgcagccacccccacccacaagacaaaagaggcaggagagggccctggactcagctggggctgggcggcttctcccttccctgaactcgccatctgttccagccccccagccccctgcctagcagccatgggtaggtcactgccctcacctggggtcaccccttcctccccggagagctctgacagatatcctggaacctgaagtggatccttcatgccccatcctgaatcccaaagccaccttcctgaggtgttgaagaagctgctccaccttggaactactataggggctgtggtggcctttcattcctttatcagcaaaagcttttgtcacttgtgtggtgggggacatgcttagtgtgagaatgcagagacccatgccaggccctacccaaggacatggtgctccttcagccattgtcatcagagccacagaggggagcttcctggcagaggaggagtggggagaagctgtggaatggctccttgagctccccactccaccccttccccatgcctgggctcccattgcaaagacccagatgtgggcttatcctgtcccccagccagagggagtcacccaggggtgttcaggccaaccctttgtgaaatccatgttccaccagttaccagcctttctccggagagctgagggctgtctcacactgggtagtctcagcctgccctggggttgggggggtgctcacagagcagtaagcgtcactgcctgcatccccacacacctgcattatcttgtctgcaagacacgtgtgcccctgagctgagctctgttgtgcaccacccgatttccgtcggcctcctttctgacttttctccatcaacatttcctgcttgggcctgttgcgggctacccaaaggctgtggactggggccgaggtacataggactttggcttgtcttttgagctaacaggatcctgtagaagaaatgagatgagcctgagagggggtcggggggtgagacattagggaagggagaggccaccaagggtctctagcccagaatccaatgccccttcctgcctacctgtccttgtgggtgggaggcagggtgtgtgctgactggcccagcaatggtgggctaggatttgggataggcagagaaaaggaagaggagggggaagtcggcctgggaggagaaacactgtacaaagtcgaggaggagagaaccagagtgtgcttagggaccagacctggccccacctggagcagaggatggtgaggtcagtcagggctggatcacaagggacctcaaatgccaggctgaggagcttggcctttatcctgagggcactggggagccctgcaaaggttttgagagggaattccattaccagatagatgtctttggaagccgcctctaggtgcaaggaggaggtggagtagagaggttgacctggggtaagggttggagcatgaccaggggagggggaaggaagcagggggtggggatggagggagtggatggatctaagagaatctactgtcctttggaacaaacgatacaggaagtgtaggagagggatggggcaaggcgactttgaagtgtccagctcagagattggaagtttgctgatgcctttgggaggccaaggcaggcagatcacgaggtcaggagttgaagaccagcctggccaatatggtgaaaccccgtctctactaaaaatacaaaaattagccgggcgtggtgcgggtgcctgtagtcccagctacttaggaggctgaggcaggagaattgcttgaacccgggaggcagaggttgcagtgagcccagatcgcaccactgcactccccactccaccccttccccatgcctgggtgacagagcgagactccgtctcaaaaacaaaacaaaaacccaaaaaacaaaaaactaagaagtttgctgatgcctttaatagtaacaaaaggtgtattggatgttcaatatttgagggacctacgggttgttcccagaggagatgtccaagagacagcctggacacctggagctccagggagagggatgggcagcaggggacacccggagttgttggtatgctgggagaaggctgcatgctccgtgggagtagggtggagaatgaggagagacagggccgccgtcctgcaaggagcatccatattgagggggcgaagatagggtgcaccagtgagggagacagaggaggggccgtctggaaggtgggagggaaacagccgcgcaggacggggcgggggcgggcgctgagaagaagccgccttcttcggcaaagaggtagctgaagcctgtggagcctgcagtcctctcaaggctatgggggcagcgcggaggccggattccagaactgaatcttcccatcgctttgggcagccaccctacctcccaggagcatccttcctgccatcccacctccagttccccagctaacaaaaaacggtgtttcttgactcccggcagggcggcggggcgggcaggtcttgtgaacacggctcgcagggttcagcaccctggagagaggcctgtggccggggcggggcctgcggcgggggtaggggcgcgcagtcagagcagtcgggcctttggctccgtctgggagcggtcttgcaggcaggcaattggtggaggagggaaaaacaatcttggattttctccagctctctcccctttatgcacctcccccatcccggcactggcctacaggagcccctatcccagcatttggggctattactctcctgacgacttcaggaaatgagatgggaggagaggggcaactatttactgggaacttttcagacattcccaaaacctcacaaccttttgagcttggaattcgtgaccccatatttcagatgaggaaactaaattgaagttcaggaaggtgaaataccttgcctaggcacttggcagagctgggatttgaattccacctgccgggctctaagtcctgagtgcccattagcccttctgagtcctgaatcttgcagtttgttcctgcagactctccacttctgggtggctgtggagtctggtgtggcagtgggatggggaggagaccttcccttccacctgcttgcttgagtgtattcccaggagatttctgaagatgaggccaccaccattgtttctgaagtgggagggcagaaaggaggctgagggccaggtgagacctcgtcacacctgcacccatgcatgcccaggaggaaccctcctttgaactcttctgactcagcttcttgctgccaggttcctccgaccagtgagcaggttcccaggacatgaaggggagctgtgagggagcaggacgccatggtccagggctgcagcttcctgagcccagagaatgccttcctagctgtcaggaatggagcagcgaggccccagtgataggtgaggtggagaagcaagacatgagttctgggctggctcagctgctttacaaccagcctgggcctcgttccctttgagaaaatggtttgcccagagttcagagatctaaaattctatgatgccttctggggccacagtgggaagcaaagactcctcatattttctttcctgacacttcccaggccacaagacaactgctttctgcagcacccagcctgggcaggccatctacacaagctcagtcatttctgaccttgccccctccaccgtgcacccccatgttcttcaacatgggtcaggtttctattcagcctcagggacttctctgcttgaagcctgttgtgtggcggggaggtattctccccacagctcagagagatggggttgctgtggagggtttgctgtagctcctctaccctggaatataccctcttctgccttaaaagacccagcttggaccctctcttccagaaatgcttgctaaccgcccccccaccacccaaactaggtcaggggtccctctgggcttcacagaccctgtgcttctttctgtcacagcctgcaagtctcccctccccactccccagcccgagtgcttctctgagacaagggatagtgtgagccatgagctcagccactggtaggccaatgaataagtaagttaatggtgaagccaggatccaaatccccatttcctgcctcaaggtgtggagctgtttctcctgcatacaatagtagctctgctgtgacaactctctatctgtcctagggcctaaaatgcctctatttcactaggttatagctttatcctagggagtcctctttggaagcagggtgggggtgcaacaggccttcccccatgcctgtagtctgtgagcagcgaaggccatgtggggcaggctgtggcctaggtctccacagatcctggtagaagtccatgctcacgcatcagctccaagtcccagctaaaccaagccaccaagaggtgggccctgtgacaaggctctgagtccaaaggcca

SEQ ID NO: 2000 - DNA, 5542 bp, Homo sapiens
accagcactccggagaccccagaagacaggccacaccacacatgggccaggacaggaatctcctggtgccagggagagttatagggcagagatgcggcctggggtaggacaggagaccccagtgtgccttcctgagactgttatgtggtggccaccagtccccgagagatggaaaataggctgcttggcccagagatcggtcagctgcccactcgaaggctgtacctgctgcctttcctggcagggctggagggaggtggcttctgcagaggcgtgggggccacttctgcaccctctgggctgggaacccagcccccactagttcctcatatctgcggaagtgcctctaacactcttgcctgagtgagcggagcctggagaaggcccaggagggcagcagaccgaagaggccctatgcagagctcccgcctcaggccgagatgaggagcccttcagaatagctgctgtctctgggaggacccgggcgtccttggcagcccagctgctctggacaaagccctgccagtcaggcctccgctggcaggaaccatggcagaggctggggatgctgcgctatcggtggccgagtggctgcgggcattgcacctggagcagtacacggggctctttgagcagcatggcctggtgtgggccactgagtgccaaggcctcagcgacacccgcctgatggacatgggcatgctactccctggtcaccgccgccgcatcctggctggcctgctccgtgcccatacctcaccggcccctgcaccccgccccaccccacggcctgtgcccatgaagcgccacatcttccgctcaccacctgtgcctgccactccacccgagccgctgcccaccactacagaggatgaggggctccccgctgccccacccatcccgccccggaggagctgccttccgcccacctgcttcaccaccccatccacagctgccccagaccctgtgctgcccccgctgcctgctaagcggcatttggcagagctgagcgttccacccgtgccgccccgcaccggacccccccgcctgctggtgagcctgcccactaaggaggaggagtcattgctgccatcattatcatcccctccccagccacagtctgaggagcccctgtccaccctcccccaggggcctccccagcctccctctccacctccctgccccccggagatacctccaaagccggtacgcctgttcccagagttcgatgactctgactacgatgaggtcccagaggaggggccgggggccccagccagagtgatgaccaagaaggaggagcccccaccgagccgagtcccacgggccgtgcgcgtggccagtctgctgagcgagggagaggaactgtctggggacgaccaaggggatgaggaagaggatgaccacgcctatgagggcgtccccaatggcggatggcataccagcagcctgagcttgtccttgcccagcacaatagctgcgccacaccccatggacgggccgcctgggggctccacccccgtcacaccagtcatcaaggctggctggctggacaagaacccaccgcagggatcttacatctatcagaaacgatgggtgagactggatactgatcacctgcgatactttgacagtaacaaggacgcttactctaagcgctttatctctgtggcctgcatctcccacgtggctgccatcggggaccagaagtttgaagtgatcacaaacaaccgaacctttgccttccgggcagagagtgatgtggagcggaaggagtggatgcaggccctgcagcaggccatggctgagcagcgtgcccgggcccggctctctagcgcttatctgctgggagttccaggctcagagcagcctgaccgcgctggcagcctggagcttcgtggcttcaagaataagctgtacgtggccgtggtcggggacaaagtgcagctctacaagaatctagaggagtaccacctgggcattggcatcaccttcatcgacatgagcgtgggcaacgtgaaggaagtggaccggcgcagcttcgacctcaccacgccctaccgcatcttcagcttctctgctgactcagagctagagaaggagcagtggttggaggccatgcagggagccatcgctgaggccctgtctacctcggaggtggccgagcgcatctgggctgcagcccccaacaggttctgtgctgactgcggggctcctcagcctgactgggcctccatcaacctctgtgttgttatctgcaagcgctgtgcaggggagcaccgtggcctgggcgctggcgtctccaaggtgcggagcctgaagatggacaggaaggtgtggacagaaacacttatcgagctcttcttacagctggggaatggcgctgggaaccgcttctgggcagccaacgtgccccccagtgaggccctgcagcccagcagcagccccagcacccggcggtgccacctggaggccaagtaccgtgagggcaagtaccgccgctaccacccgctctttggcaaccaggaggagctggacaaggccctgtgtgctgcagtcaccaccacagacctggctgagacccaggcgctcctgggctgtggggctgggatcaactgcttctcgggggaccctgaggcccccacgcccctggctcttgcagagcaggcggggcagacgctgcagatggaattccttcggaacaaccggaccacagaggtgcctcggctggactcgatgaagcccctggaaaagcactactcagttgtcctgccgaccgtgagccacagtggcttcctctacaagactgcctctgccggcaagctgctacaggaccgccgggcccgggaagagttcagccggcgctggtgtgtccttggtgacggggtcctgagctactttgagaatgagcgggcagtgacccccaatggagagattcgggccagcgagattgtgtgcctggcagtgccccctcctgacacccatggctttgagcacacctttgaggtgtacacggagggagaacggctgtacctgtttgggctggagagtgcggagcaggctcatgagtgggtcaagtgtattgctaaggcattcgtgcctcccctagccgaggatctgctggcccgggattttgagcggctgggacgcctaccctacaaagctggcctgagcctacagcgggcccaggagggctggttctctctcagtggctcggagctccgtgctgtcttcccggaggggccctgcgaagagccgctgcaactacggaaactgcaggagctttccatccagggggacagtgagaaccaggtgctggtgctggtggagcgaaggaggacactgtacatacagggcgagcggcggctggacttcatgggttggctgggggccatccagaaagcagccgccagcatgggggacacgctgtcggagcagcagcttggggactcggatatcccggtgatcgtgtaccgctgtgtggactacatcacgcagtgcggcctgacctccgagggcatctaccgcaagtgtgggcagacatcgaagacacagcggctgctggagagcctgcggcaggatgcgcgctctgtgcacctcaaggagggcgagcagcacgtggatgatgtttcctcggcgctcaagcgcttcctgcgcgacctgcctgatgggctcttcactcgcgcccagcgcctaacctggctggaggcctcagagattgaggacgaggaggagaaggtctccaggtaccgagagctgctggtgcggctgccccctgtcaaccgggccacagtgaaggcccttatcagccacctgtactgtgttcagtgcttctcagacacgaaccagatgaacgtgcacaacctggcaattgtgtttgggcccacgctcttccagacagatgggcaggactacaaggctggccgtgtggtggaagacctcattaaccactatgtggtggtgtttagtgtggatgaggaagagctcaggaagcagcgggaggagatcactgccattgtgaagatgcgcgtggctggcactgccagtgggacccagcatgccggtgacttcatctgcacagtgtatctggaagagaagaaggcagagactgagcagcatatcaaggtcccagcatccatgactgctgaggagctcaccctggagatcctggatcgccggaacgtgggcatcagggagaaggactattggacctgctttgaggtcaacgagagggaggaggcagagcgccccctgcactttgcggagaaggtgctgcccatcctgcacgggctgggcacggacagccacctggtggtgaagaagcaccaggccatggaggccatgctgctgtacctggccagccgtgtcggtgacaccaagcatggcatgatgaagttccgtgaggaccgcagcctcctgggcctgggcctgccctcaggtggcttccacgatcgctacttcatcctcaacagcagctgcttgcggctctacaaggaggtccggagccagaggccgtggagcggggcccctgagaccagtcaccggcctgagaaggagtggcctattaagagtctcaaagtctacctgggagtgaagaagaaactcaggccacccacctgctggggcttcacagtggtgcatgagacagagaaacatgagaagcagcagtgtcaggcctttggcatcatgtgggtccgcgtccaaccctgcaggtacctctgctgtgacacacagatggagctccgggagtggttcgctacctttctgtttgtgcagcatgacggcctggtgtggccctcagagccctcacgcgtgtcccgggcagtgcctgaggtccggctgggtagtgtgtcactgatcccccttcgaggtagtgaaaatgaaatgcgccggagtgtggctgccttcaccgcggaccctctgtctcttctgcgcaacgtctgagcacaggagcccatccttggctctaggattccgccgctggaagccttctgttcagacaccccttatgctccaaggcctgatgtgagccagcggggggtgcatgggaaactgcaccccacaacccacatcctccatcctgactgcagcatggggttccccggcaggggtgggaggcagcaggggtcagcctgggcaggaacctctcccaactctgtccaggtgttcagacctcttggcccaacctgctcaccccaccgggttcactgtccttgtggggctggagagatgggcataagtcaggaacttgggaggaccaccaccctttcagaggcgtgaggccctggggccctgccggaagggagccccctgctcctcccaacaaactccagaacagcagaaagcgggtgctgtagaggagcactcagctcacggggagggagctcttggctgagcttctacagggctgagagctgcgctttggggacttcagccttccttccagtctgggctgagtggggggtccagactacctgatgccccttccccaatttggggactttttgataatataaatatatctgtatattttaccctatgg

SEQ ID NO: 2001 - protein, 1462 aa, Homo sapiens
MAEAGDAALSVAEWLRALHLEQYTGLFEQHGLVWATECQGLSDTRLMDMGMLLPGHRRRILAGLLRAHTSPAPAPRPTPRPVPMKRHIFRSPPVPATPPEPLPTTTEDEGLPAAPPIPPRRSCLPPTCFTTPSTAAPDPVLPPLPAKRHLAELSVPPVPPRTGPPRLLVSLPTKEEESLLPSLSSPPQPQSEEPLSTLPQGPPQPPSPPPCPPEIPPKPVRLFPEFDDSDYDEVPEEGPGAPARVMTKKEEPPPSRVPRAVRVASLLSEGEELSGDDQGDEEEDDHAYEGVPNGGWHTSSLSLSLPSTIAAPHPMDGPPGGSTPVTPVIKAGWLDKNPPQGSYIYQKRWVRLDTDHLRYFDSNKDAYSKRFISVACISHVAAIGDQKFEVITNNRTFAFRAESDVERKEWMQALQQAMAEQRARARLSSAYLLGVPGSEQPDRAGSLELRGFKNKLYVAVVGDKVQLYKNLEEYHLGIGITFIDMSVGNVKEVDRRSFDLTTPYRIFSFSADSELEKEQWLEAMQGAIAEALSTSEVAERIWAAAPNRFCADCGAPQPDWASINLCVVICKRCAGEHRGLGAGVSKVRSLKMDRKVWTETLIELFLQLGNGAGNRFWAANVPPSEALQPSSSPSTRRCHLEAKYREGKYRRYHPLFGNQEELDKALCAAVTTTDLAETQALLGCGAGINCFSGDPEAPTPLAEQAGQTLQMEFLRNNRTTEVPRLDSMKPLEKHYSVVLPTVSHSGFLYKTASAGKLLQDRRAREEFSRRWCVLGDGVLSYFENERAVTPNGEIRASEIVCLAVPPPDTHGFEHTFEVYTEGERLYLFGLESAEQAHEWVKCIAKAFVPPLAEDLLARDFERLGRLPYKAGLSLQRAQEGWFSLSGSELRAVFPEGPCEEPLQLRKLQELSIQGDSENQVLVLVERRRTLYIQGERRLDFMGWLGAIQKAAASMGDTLSEQQLGDSDIPVIVYRCVDYITQCGLTSEGIYRKCGQTSKTQRLLESLRQDARSVHLKEGEQHVDDVSSALKRFLRDLPDGLFTRAQRLTWLEASEIEDEEEKVSRYRELLVRLPPVNRATVKALISHLYCVQCFSDTNQMNVHNLAIVFGPTLFQTDGQDYKAGRVVEDLINHYVVVFSVDEEELRKQREEITAIVKMRVAGTASGTQHAGDFICTVYLEEKKAETEQHIKVPASMTAEELTLEILDRRNVGIREKDYWTCFEVNEREEAERPLHFAEKVLPILHGLGTDSHLVVKKHQAMEAMLLYLASRVGDTKHGMMKFREDRSLLGLGLPSGGFHDRYFILNSSCLRLYKEVRSQRPWSGAPETSHRPEKEWPIKSLKVYLGVKKKLRPPTCWGFTVVHETEKHEKQQCQAFGIMWVRVQPCRYLCCDTQMELREWFATFLFVQHDGLVWPSEPSRVSRAVPEVRLGSVSLIPLRGSENEMRRSVAAFTADPLSLLRNV

SEQ ID NO: 2002 - DNA, 4849 bp, Homo sapiens
ttggcggtggcggtgtaagtcggtggcggcgccggtacgcctggtccccgcgtggagtctttactcaaaacagctcccgcctcaggccgagatgaggagcccttcagaatagctgctgtctctgggaggacccgggcgtccttggcagcccagctgctctggacaaagccctgccagtcaggcctccgctggcaggaaccatggcagaggctggggatgctgcgctatcggtggccgagtggctgcgggcattgcacctggagcagtacacggggctctttgagcagcatggcctggtgtgggccactgagtgccaaggcctcagcgacacccgcctgatggacatgggcatgctactccctggtcaccgccgccgcatcctggctggcctgctccgtgcccatacctcaccggcccctgcaccccgccccaccccacggcctgtgcccatgaagcgccacatcttccgctcaccacctgtgcctgccactccacccgagccgctgcccaccactacagaggatgaggggctccccgctgccccacccatcccgccccggaggagctgccttccgcccacctgcttcaccaccccatccacagctgccccagaccctgtgctgcccccgctgcctgctaagcggcatttggcagagctgagcgttccacccgtgccgccccgcaccggacccccccgcctgctggtgagcctgcccactaaggaggaggagtcattgctgccatcattatcatcccctccccagccacagtctgaggagcccctgtccaccctcccccaggggcctccccagcctccctctccacctccctgccccccggagatacctccaaagccggtacgcctgttcccagagttcgatgactctgactacgatgaggtcccagaggaggggccgggggccccagccagagtgatgaccaagaaggaggagcccccaccgagccgagtcccacgggccgtgcgcgtggccagtctgctgagcgagggagaggaactgtctggggacgaccaaggggatgaggaagaggatgaccacgcctatgagggcgtccccaatggcggatggcataccagcagcctgagcttgtccttgcccagcacaatagctgcgccacaccccatggacgggccgcctgggggctccacccccgtcacaccagtcatcaaggctggctggctggacaagaacccaccgcagggatcttacatctatcagaaacgatgggtgagactggatactgatcacctgcgatactttgacagtaacaaggacgcttactctaagcgctttatctctgtggcctgcatctcccacgtggctgccatcggggaccagaagtttgaagtgatcacaaacaaccgaacctttgccttccgggcagagagtgatgtggagcggaaggagtggatgcaggccctgcagcaggccatggctgagcagcgtgcccgggcccggctctctagcgcttatctgctgggagttccaggctcagagcagcctgaccgcgctggcagcctggagcttcgtggcttcaagaataagctgtacgtggccgtggtcggggacaaagtgcagctctacaagaatctagaggagtaccacctgggcattggcatcaccttcatcgacatgagcgtgggcaacgtgaaggaagtggaccggcgcagcttcgacctcaccacgccctaccgcatcttcagcttctctgctgactcagagctagagaaggagcagtggttggaggccatgcagggagccatcgctgaggccctgtctacctcggaggtggccgagcgcatctgggctgcagcccccaacaggttctgtgctgactgcggggctcctcagcctgactgggcctccatcaacctctgtgttgttatctgcaagcgctgtgcaggggagcaccgtggcctgggcgctggcgtctccaaggtgcggagcctgaagatggacaggaaggtgtggacagaaacacttatcgagctcttcttacagctggggaatggcgctgggaaccgcttctgggcagccaacgtgccccccagtgaggccctgcagcccagcagcagccccagcacccggcggtgccacctggaggccaagtaccgtgagggcaagtaccgccgctaccacccgctctttggcaaccaggaggagctggacaaggccctgtgtgctgcagtcaccaccacagacctggctgagacccaggcgctcctgggctgtggggctgggatcaactgcttctcgggggaccctgaggcccccacgcccctggctcttgcagagcaggcggggcagacgctgcagatggaattccttcggaacaaccggaccacagaggtgcctcggctggactcgatgaagcccctggaaaagcactactcagttgtcctgccgaccgtgagccacagtggcttcctctacaagactgcctctgccggcaagctgctacaggaccgccgggcccgggaagagttcagccggcgctggtgtgtccttggtgacggggtcctgagctactttgagaatgagcgggcagtgacccccaatggagagattcgggccagcgagattgtgtgcctggcagtgccccctcctgacacccatggctttgagcacacctttgaggtgtacacggagggagaacggctgtacctgtttgggctggagagtgcggagcaggctcatgagtgggtcaagtgtattgctaaggcattcgtgcctcccctagccgaggatctgctggcccgggattttgagcggctgggacgcctaccctacaaagctggcctgagcctacagcgggcccaggagggctggttctctctcagtggctcggagctccgtgctgtcttcccggaggggccctgcgaagagccgctgcaactacggaaactgcaggagctttccatccagggggacagtgagaaccaggtgctggtgctggtggagcgaaggaggacactgtacatacagggcgagcggcggctggacttcatgggttggctgggggccatccagaaagcagccgccagcatgggggacacgctgtcggagcagcagcttggggactcggatatcccggtgatcgtgtaccgctgtgtggactacatcacgcagtgcggcctgacctccgagggcatctaccgcaagtgtgggcagacatcgaagacacagcggctgctggagagcctgcggcaggatgcgcgctctgtgcacctcaaggagggcgagcagcacgtggatgatgtttcctcggcgctcaagcgcttcctgcgcgacctgcctgatgggctcttcactcgcgcccagcgcctaacctggctggaggcctcagagattgaggacgaggaggagaaggtctccaggtaccgagagctgctggtgcggctgccccctgtcaaccgggccacagtgaaggcccttatcagccacctgtactgtgttcagtgcttctcagacacgaaccagatgaacgtgcacaacctggcaattgtgtttgggcccacgctcttccagacagatgggcaggactacaaggctggccgtgtggtggaagacctcattaaccactatgtggtggtgtttagtgtggatgaggaagagctcaggaagcagcgggaggagatcactgccattgtgaagatgcgcgtggctggcactgccagtgggacccagcatgccggtgacttcatctgcacagtgtatctggaagagaagaaggcagagactgagcagcatatcaaggtcccagcatccatgactgctgaggagctcaccctggagatcctggatcgccggaacgtgggcatcagggagaaggactattggacctgctttgaggtcaacgagagggaggaggcagagcgccccctgcactttgcggagaaggtgctgcccatcctgcacgggctgggcacggacagccacctggtggtgaagaagcaccaggccatggaggccatgctgctgtacctggccagccgtgtcggtgacaccaagcatggcatgatgaagttccgtgaggaccgcagcctcctgggcctgggcctgccctcaggtggcttccacgatcgctacttcatcctcaacagcagctgcttgcggctctacaaggaggtccggagtcaccggcctgagaaggagtggcctattaagagtctcaaagtctacctgggagtgaagaagaaactcaggccacccacctgctggggcttcacagtggtgcatgagacagagaaacatgagaagcagcagtggtacctctgctgtgacacacagatggagctccgggagtggttcgctacctttctgtttgtgcagcatgacggcctggtgtggccctcagagccctcacgcgtgtcccgggcagtgcctgaggtccggctgggtagtgtgtcactgatcccccttcgaggtagtgaaaatgaaatgcgccggagtgtggctgccttcaccgcggaccctctgtctgtgagtggctctccatgcctttgggcagggggctgggggcctggctgggtgcctgccttctactccacagtagatgattgccctgattgccctccctgattgccctccggccccctccctccagccttggtgggggccctcataggcctctttggttcacaccattcaaaggagccccttctgcctggccctggaagctgggagtcccctctgcctggccctgggagctgggagcctggctgattggagtgctccccggctggcagtggagagtggctgcagcagccgcagcagcttcagcggggcgccagcccctctgggccttcacaaaatacctgtgggtctct

SEQ ID NO: 2003 - protein, 1464 aa, Homo sapiens
MAEAGDAALSVAEWLRALHLEQYTGLFEQHGLVWATECQGLSDTRLMDMGMLLPGHRRRILAGLLRAHTSPAPAPRPTPRPVPMKRHIFRSPPVPATPPEPLPTTTEDEGLPAAPPIPPRRSCLPPTCFTTPSTAAPDPVLPPLPAKRHLAELSVPPVPPRTGPPRLLVSLPTKEEESLLPSLSSPPQPQSEEPLSTLPQGPPQPPSPPPCPPEIPPKPVRLFPEFDDSDYDEVPEEGPGAPARVMTKKEEPPPSRVPRAVRVASLLSEGEELSGDDQGDEEEDDHAYEGVPNGGWHTSSLSLSLPSTIAAPHPMDGPPGGSTPVTPVIKAGWLDKNPPQGSYIYQKRWVRLDTDHLRYFDSNKDAYSKRFISVACISHVAAIGDQKFEVITNNRTFAFRAESDVERKEWMQALQQAMAEQRARARLSSAYLLGVPGSEQPDRAGSLELRGFKNKLYVAVVGDKVQLYKNLEEYHLGIGITFIDMSVGNVKEVDRRSFDLTTPYRIFSFSADSELEKEQWLEAMQGAIAEALSTSEVAERIWAAAPNRFCADCGAPQPDWASINLCVVICKRCAGEHRGLGAGVSKVRSLKMDRKVWTETLIELFLQLGNGAGNRFWAANVPPSEALQPSSSPSTRRCHLEAKYREGKYRRYHPLFGNQEELDKALCAAVTTTDLAETQALLGCGAGINCFSGDPEAPTPLAEQAGQTLQMEFLRNNRTTEVPRLDSMKPLEKHYSVVLPTVSHSGFLYKTASAGKLLQDRRAREEFSRRWCVLGDGVLSYFENERAVTPNGEIRASEIVCLAVPPPDTHGFEHTFEVYTEGERLYLFGLESAEQAHEWVKCIAKAFVPPLAEDLLARDFERLGRLPYKAGLSLQRAQEGWFSLSGSELRAVFPEGPCEEPLQLRKLQELSIQGDSENQVLVLVERRRTLYIQGERRLDFMGWLGAIQKAAASMGDTLSEQQLGDSDIPVIVYRCVDYITQCGLTSEGIYRKCGQTSKTQRLLESLRQDARSVHLKEGEQHVDDVSSALKRFLRDLPDGLFTRAQRLTWLEASEIEDEEEKVSRYRELLVRLPPVNRATVKALISHLYCVQCFSDTNQMNVHNLAIVFGPTLFQTDGQDYKAGRVVEDLINHYVVVFSVDEEELRKQREEITAIVKMRVAGTASGTQHAGDFICTVYLEEKKAETEQHIKVPASMTAEELTLEILDRRNVGIREKDYWTCFEVNEREEAERPLHFAEKVLPILHGLGTDSHLVVKKHQAMEAMLLYLASRVGDTKHGMMKFREDRSLLGLGLPSGGFHDRYFILNSSCLRLYKEVRSHRPEKEWPIKSLKVYLGVKKKLRPPTCWGFTVVHETEKHEKQQWYLCCDTQMELREWFATFLFVQHDGLVWPSEPSRVSRAVPEVRLGSVSLIPLRGSENEMRRSVAAFTADPLSVSGSPCLWAGGWGPGWVPAFYSTVDDCPDCPP

SEQ ID NO: 2004 - DNA, 4788 bp, Homo sapiens
tgcctgtcagggtgttgtgggggtgcccagctgcctgtcagaccctgaggactaccagacagagagtgggcagccatttcccgggaggcttccccttcccccacctcactctcttgccatacgggggtcaggagtcacgtgtagccacagcgctctgggccaggggtcggggctctggtgtggctcccccaggccctggctgtatgtgggtgggcatgtggcctccccccaccctgtgtgttaggaactcgtgtcctgtcccggagtgtctgtctctgtttcacttcttgtgttcccgtgtctgtctgtcttgcatccctagcccgcagtctttttctctgtccctttatctttctgtttttgtctgtgtcctaggtcggtttctgccactggctctcctgtccctgtgatctgggtctctgtgtggtctccgctggcagggggaggggagtgtgaggaaacagaactaaaagtgctgggctgtgtgggtcggggctgtgtggacagagggggcgtggcagccccgggtgggtgtgatctgtggcttgaagggaaggatgacgctgagtgggtctcgggggcaggaggagcccccaccgagccgagtcccacgggccgtgcgcgtggccagtctgctgagcgagggagaggaactgtctggggacgaccaaggggatgaggaagaggatgaccacgcctatgagggcgtccccaatggcggatggcataccagcagcctgagcttgtccttgcccagcacaatagctgcgccacaccccatggacgggccgcctgggggctccacccccgtcacaccagtcatcaaggctggctggctggacaagaacccaccgcagggatcttacatctatcagaaacgatgggtgagactggatactgatcacctgcgatactttgacagtaacaaggacgcttactctaagcgctttatctctgtggcctgcatctcccacgtggctgccatcggggaccagaagtttgaagtgatcacaaacaaccgaacctttgccttccgggcagagagtgatgtggagcggaaggagtggatgcaggccctgcagcaggccatggctgagcagcgtgcccgggcccggctctctagcgcttatctgctgggagttccaggctcagagcagcctgaccgcgctggcagcctggagcttcgtggcttcaagaataagctgtacgtggccgtggtcggggacaaagtgcagctctacaagaatctagaggagtaccacctgggcattggcatcaccttcatcgacatgagcgtgggcaacgtgaaggaagtggaccggcgcagcttcgacctcaccacgccctaccgcatcttcagcttctctgctgactcagagctagagaaggagcagtggttggaggccatgcagggagccatcgctgaggccctgtctacctcggaggtggccgagcgcatctgggctgcagcccccaacaggttctgtgctgactgcggggctcctcagcctgactgggcctccatcaacctctgtgttgttatctgcaagcgctgtgcaggggagcaccgtggcctgggcgctggcgtctccaaggtgcggagcctgaagatggacaggaaggtgtggacagaaacacttatcgagctcttcttacagctggggaatggcgctgggaaccgcttctgggcagccaacgtgccccccagtgaggccctgcagcccagcagcagccccagcacccggcggtgccacctggaggccaagtaccgtgagggcaagtaccgccgctaccacccgctctttggcaaccaggaggagctggacaaggccctgtgtgctgcagtcaccaccacagacctggctgagacccaggcgctcctgggctgtggggctgggatcaactgcttctcgggggaccctgaggcccccacgcccctggctcttgcagagcaggcggggcagacgctgcagatggaattccttcggaacaaccggaccacagaggtgcctcggctggactcgatgaagcccctggaaaagcactactcagttgtcctgccgaccgtgagccacagtggcttcctctacaagactgcctctgccggcaagctgctacaggaccgccgggcccgggaagagttcagccggcgctggtgtgtccttggtgacggggtcctgagctactttgagaatgagcgggcagtgacccccaatggagagattcgggccagcgagattgtgtgcctggcagtgccccctcctgacacccatggctttgagcacacctttgaggtgtacacggagggagaacggctgtacctgtttgggctggagagtgcggagcaggctcatgagtgggtcaagtgtattgctaaggcattcgtgcctcccctagccgaggatctgctggcccgggattttgagcggctgggacgcctaccctacaaagctggcctgagcctacagcgggcccaggagggctggttctctctcagtggctcggagctccgtgctgtcttcccggaggggccctgcgaagagccgctgcaactacggaaactgcaggagctttccatccagggggacagtgagaaccaggtgctggtgctggtggagcgaaggaggacactgtacatacagggcgagcggcggctggacttcatgggttggctgggggccatccagaaagcagccgccagcatgggggacacgctgtcggagcagcagcttggggactcggatatcccggtgatcgtgtaccgctgtgtggactacatcacgcagtgcggcctgacctccgagggcatctaccgcaagtgtgggcagacatcgaagacacagcggctgctggagagcctgcggcaggatgcgcgctctgtgcacctcaaggagggcgagcagcacgtggatgatgtttcctcggcgctcaagcgcttcctgcgcgacctgcctgatgggctcttcactcgcgcccagcgcctaacctggctggaggcctcagagattgaggacgaggaggagaaggtctccaggtaccgagagctgctggtgcggctgccccctgtcaaccgggccacagtgaaggcccttatcagccacctgtactgtgttcagtgcttctcagacacgaaccagatgaacgtgcacaacctggcaattgtgtttgggcccacgctcttccagacagatgggcaggactacaaggctggccgtgtggtggaagacctcattaaccactatgtggtggtgtttagtgtggatgaggaagagctcaggaagcagcgggaggagatcactgccattgtgaagatgcgcgtggctggcactgccagtgggacccagcatgccggtgacttcatctgcacagtgtatctggaagagaagaaggcagagactgagcagcatatcaaggtcccagcatccatgactgctgaggagctcaccctggagatcctggatcgccggaacgtgggcatcagggagaaggactattggacctgctttgaggtcaacgagagggaggaggcagagcgccccctgcactttgcggagaaggtgctgcccatcctgcacgggctgggcacggacagccacctggtggtgaagaagcaccaggccatggaggccatgctgctgtacctggccagccgtgtcggtgacaccaagcatggcatgatgaagttccgtgaggaccgcagcctcctgggcctgggcctgccctcaggtggcttccacgatcgctacttcatcctcaacagcagctgcttgcggctctacaaggaggtccggagccagaggccgtggagcggggcccctgagaccagtcaccggcctgagaaggagtggcctattaagagtctcaaagtctacctgggagtgaagaagaaactcaggccacccacctgctggggcttcacagtggtgcatgagacagagaaacatgagaagcagcagtggtacctctgctgtgacacacagatggagctccgggagtggttcgctacctttctgtttgtgcagcatgacggcctggtgtggccctcagagccctcacgcgtgtcccgggcagtgcctgaggtccggctgggtagtgtgtcactgatcccccttcgaggtagtgaaaatgaaatgcgccggagtgtggctgccttcaccgcggaccctctgtctcttctgcgcaacgtctgagcacaggagcccatccttggctctaggattccgccgctggaagccttctgttcagacaccccttatgctccaaggcctgatgtgagccagcggggggtgcatgggaaactgcaccccacaacccacatcctccatcctgactgcagcatggggttccccggcaggggtgggaggcagcaggggtcagcctgggcaggaacctctcccaactctgtccaggtgttcagacctcttggcccaacctgctcaccccaccgggttcactgtccttgtggggctggagagatgggcataagtcaggaacttgggaggaccaccaccctttcagaggcgtgaggccctggggccctgccggaagggagccccctgctcctcccaacaaactccagaacagcagaaagcgggtgctgtagaggagcactcagctcacggggagggagctcttggctgagcttctacagggctgagagctgcgctttggggacttcagccttccttccagtctgggctgagtggggggtccagactacctgatgccccttccccaatttggggactttttgataatataaatatatctgtatattttaccctatgg

SEQ ID NO: 2005 - protein, 1208 aa, Homo sapiens
MTLSGSRGQEEPPPSRVPRAVRVASLLSEGEELSGDDQGDEEEDDHAYEGVPNGGWHTSSLSLSLPSTIAAPHPMDGPPGGSTPVTPVIKAGWLDKNPPQGSYIYQKRWVRLDTDHLRYFDSNKDAYSKRFISVACISHVAAIGDQKFEVITNNRTFAFRAESDVERKEWMQALQQAMAEQRARARLSSAYLLGVPGSEQPDRAGSLELRGFKNKLYVAVVGDKVQLYKNLEEYHLGIGITFIDMSVGNVKEVDRRSFDLTTPYRIFSFSADSELEKEQWLEAMQGAIAEALSTSEVAERIWAAAPNRFCADCGAPQPDWASINLCVVICKRCAGEHRGLGAGVSKVRSLKMDRKVWTETLIELFLQLGNGAGNRFWAANVPPSEALQPSSSPSTRRCHLEAKYREGKYRRYHPLFGNQEELDKALCAAVTTTDLAETQALLGCGAGINCFSGDPEAPTPLAEQAGQTLQMEFLRNNRTTEVPRLDSMKPLEKHYSVVLPTVSHSGFLYKTASAGKLLQDRRAREEFSRRWCVLGDGVLSYFENERAVTPNGEIRASEIVCLAVPPPDTHGFEHTFEVYTEGERLYLFGLESAEQAHEWVKCIAKAFVPPLAEDLLARDFERLGRLPYKAGLSLQRAQEGWFSLSGSELRAVFPEGPCEEPLQLRKLQELSIQGDSENQVLVLVERRRTLYIQGERRLDFMGWLGAIQKAAASMGDTLSEQQLGDSDIPVIVYRCVDYITQCGLTSEGIYRKCGQTSKTQRLLESLRQDARSVHLKEGEQHVDDVSSALKRFLRDLPDGLFTRAQRLTWLEASEIEDEEEKVSRYRELLVRLPPVNRATVKALISHLYCVQCFSDTNQMNVHNLAIVFGPTLFQTDGQDYKAGRVVEDLINHYVVVFSVDEEELRKQREEITAIVKMRVAGTASGTQHAGDFICTVYLEEKKAETEQHIKVPASMTAEELTLEILDRRNVGIREKDYWTCFEVNEREEAERPLHFAEKVLPILHGLGTDSHLVVKKHQAMEAMLLYLASRVGDTKHGMMKFREDRSLLGLGLPSGGFHDRYFILNSSCLRLYKEVRSQRPWSGAPETSHRPEKEWPIKSLKVYLGVKKKLRPPTCWGFTVVHETEKHEKQQWYLCCDTQMELREWFATFLFVQHDGLVWPSEPSRVSRAVPEVRLGSVSLIPLRGSENEMRRSVAAFTADPLSLLRNV

SEQ ID NO: 2006 - DNA, 4519 bp, Homo sapiens
tgcctgtcagggtgttgtgggggtgcccagctgcctgtcagaccctgaggactaccagacagagagtgggcagccatttcccgggaggcttccccttcccccacctcactctcttgccatacgggggtcaggagtcacgtgtagccacagcgctctgggccaggggtcggggctctggtgtggctcccccaggccctggctgtatgtgggtgggcatgtggcctccccccaccctgtgtgttaggaactcgtgtcctgtcccggagtgtctgtctctgtttcacttcttgtgttcccgtgtctgtctgtcttgcatccctagcccgcagtctttttctctgtccctttatctttctgtttttgtctgtgtcctaggtcggtttctgccactggctctcctgtccctgtgatctgggtctctgtgtggtctccgctggcagggggaggggagtgtgaggaaacagaactaaaagtgctgggctgtgtgggtcggggctgtgtggacagagggggcgtggcagccccgggtgggtgtgatctgtggcttgaagggaaggatgacgctgagtgggtctcgggggcaggaggagcccccaccgagccgagtcccacgggccgtgcgcgtggccagtctgctgagcgagggagaggaactgtctggggacgaccaaggggatgaggaagaggatgaccacgcctatgagggcgtccccaatggcggatggcataccagcagcctgagcttgtccttgcccagcacaatagctgcgccacaccccatggacgggccgcctgggggctccacccccgtcacaccagtcatcaaggctggctggctggacaagaacccaccgcagggatcttacatctatcagaaacgatgggtgagactggatactgatcacctgcgatactttgacagtaacaaggacgcttactctaagcgctttatctctgtggcctgcatctcccacgtggctgccatcggggaccagaagtttgaagtgatcacaaacaaccgaacctttgccttccgggcagagagtgatgtggagcggaaggagtggatgcaggccctgcagcaggccatggctgagcagcgtgcccgggcccggctctctagcgcttatctgctgggagttccaggctcagagcagcctgaccgcgctggcagcctggagcttcgtggcttcaagaataagctgtacgtggccgtggtcggggacaaagtgcagctctacaagaatctagaggagtaccacctgggcattggcatcaccttcatcgacatgagcgtgggcaacgtgaaggaagtggaccggcgcagcttcgacctcaccacgccctaccgcatcttcagcttctctgctgactcagagctagagaaggagcagtggttggaggccatgcagggagccatcgctgaggccctgtctacctcggaggtggccgagcgcatctgggctgcagcccccaacaggttctgtgctgactgcggggctcctcagcctgactgggcctccatcaacctctgtgttgttatctgcaagcgctgtgcaggggagcaccgtggcctgggcgctggcgtctccaaggtgcggagcctgaagatggacaggaaggtgtggacagaaacacttatcgagctcttcttacagctggggaatggcgctgggaaccgcttctgggcagccaacgtgccccccagtgaggccctgcagcccagcagcagccccagcacccggcggtgccacctggaggccaagtaccgtgagggcaagtaccgccgctaccacccgctctttggcaaccaggaggagctggacaaggccctgtgtgctgcagtcaccaccacagacctggctgagacccaggcgctcctgggctgtggggctgggatcaactgcttctcgggggaccctgaggcccccacgcccctggctcttgcagagcaggcggggcagacgctgcagatggaattccttcggaacaaccggaccacagaggtgcctcggctggactcgatgaagcccctggaaaagcactactcagttgtcctgccgaccgtgagccacagtggcttcctctacaagactgcctctgccggcaagctgctacaggaccgccgggcccgggaagagttcagccggcgctggtgtgtccttggtgacggggtcctgagctactttgagaatgagcgggcagtgacccccaatggagagattcgggccagcgagattgtgtgcctggcagtgccccctcctgacacccatggctttgagcacacctttgaggtgtacacggagggagaacggctgtacctgtttgggctggagagtgcggagcaggctcatgagtgggtcaagtgtattgctaaggcattcgtgcctcccctagccgaggatctgctggcccgggattttgagcggctgggacgcctaccctacaaagctggcctgagcctacagcgggcccaggagggctggttctctctcagtggctcggagctccgtgctgtcttcccggaggggccctgcgaagagccgctgcaactacggaaactgcaggagctttccatccagggggacagtgagaaccaggtgctggtgctggtggagcgaaggaggacactgtacatacagggcgagcggcggctggacttcatgggttggctgggggccatccagaaagcagccgccagcatgggggacacgctgtcggagcagcagcttggggactcggatatcccggtgatcgtgtaccgctgtgtggactacatcacgcagtgcggcctgacctccgagggcatctaccgcaagtgtgggcagacatcgaagacacagcggctgctggagagcctgcggcaggatgcgcgctctgtgcacctcaaggagggcgagcagcacgtggatgatgtttcctcggcgctcaagcgcttcctgcgcgacctgcctgatgggctcttcactcgcgcccagcgcctaacctggctggaggcctcagagattgaggacgaggaggagaaggtctccaggtaccgagagctgctggtgcggctgccccctgtcaaccgggccacagtgaaggcccttatcagccacctgtactgtgttcagtgcttctcagacacgaaccagatgaacgtgcacaacctggcaattgtgtttgggcccacgctcttccagacagatgggcaggactacaaggctggccgtgtggtggaagacctcattaaccactatgtggtggtgtttagtgtggatgaggaagagctcaggaagcagcgggaggagatcactgccattgtgaagatgcgcgtggctggcactgccagtgggacccagcatgccggtgacttcatctgcacagtgtatctggaagagaagaaggcagagactgagcagcatatcaaggtcccagcatccatgactgctgaggagctcaccctggagatcctggatcgccggaacgtgggcatcagggagaaggactattggacctgctttgaggtcaacgagagggaggaggcagagcgccccctgcactttgcggagaaggtgctgcccatcctgcacgggctgggcacggacagccacctggtggtgaagaagcaccaggccatggaggccatgctgctgtacctggccagccgtgtcggtgacaccaagcatggcatgatgaagttccgtgaggaccgcagcctcctgggcctgggcctgccctcaggtggcttccacgatcgctacttcatcctcaacagcagctgcttgcggctctacaaggaggtccggagccagaggccgtggagcggggcccctgagaccagtcaccggcctgagaaggagtggcctattaagagtctcaaagtctacctgggagtgaagaagaaactcaggccacccacctgctggggcttcacagtggtgcatgagacagagaaacatgagaagcagcagtggtacctctgctgtgacacacagatggagctccgggagtggttcgctacctttctgtttgtgcagcatgacggcctggtgtggccctcagagccctcacgcgtgtcccgggcagtgcctgaggtccggctgggtagtgtgtcactgatcccccttcgaggtagtgaaaatgaaatgcgccggagtgtggctgccttcaccgcggaccctctgtctgtgagtggctctccatgcctttgggcagggggctgggggcctggctgggtgcctgccttctactccacagtagatgattgccctgattgccctccctgattgccctccggccccctccctccagccttggtgggggccctcataggcctctttggttcacaccattcaaaggagccccttctgcctggccctggaagctgggagtcccctctgcctggccctgggagctgggagcctggctgattggagtgctccccggctggcagtggagagtggctgcagcagccgcagcagcttcagcggggcgccagcccctctgggccttcacaaaatacctgtgggtctct

SEQ ID NO: 2007 - protein, 1235 aa, Homo sapiens
MTLSGSRGQEEPPPSRVPRAVRVASLLSEGEELSGDDQGDEEEDDHAYEGVPNGGWHTSSLSLSLPSTIAAPHPMDGPPGGSTPVTPVIKAGWLDKNPPQGSYIYQKRWVRLDTDHLRYFDSNKDAYSKRFISVACISHVAAIGDQKFEVITNNRTFAFRAESDVERKEWMQALQQAMAEQRARARLSSAYLLGVPGSEQPDRAGSLELRGFKNKLYVAVVGDKVQLYKNLEEYHLGIGITFIDMSVGNVKEVDRRSFDLTTPYRIFSFSADSELEKEQWLEAMQGAIAEALSTSEVAERIWAAAPNRFCADCGAPQPDWASINLCVVICKRCAGEHRGLGAGVSKVRSLKMDRKVWTETLIELFLQLGNGAGNRFWAANVPPSEALQPSSSPSTRRCHLEAKYREGKYRRYHPLFGNQEELDKALCAAVTTTDLAETQALLGCGAGINCFSGDPEAPTPLAEQAGQTLQMEFLRNNRTTEVPRLDSMKPLEKHYSVVLPTVSHSGFLYKTASAGKLLQDRRAREEFSRRWCVLGDGVLSYFENERAVTPNGEIRASEIVCLAVPPPDTHGFEHTFEVYTEGERLYLFGLESAEQAHEWVKCIAKAFVPPLAEDLLARDFERLGRLPYKAGLSLQRAQEGWFSLSGSELRAVFPEGPCEEPLQLRKLQELSIQGDSENQVLVLVERRRTLYIQGERRLDFMGWLGAIQKAAASMGDTLSEQQLGDSDIPVIVYRCVDYITQCGLTSEGIYRKCGQTSKTQRLLESLRQDARSVHLKEGEQHVDDVSSALKRFLRDLPDGLFTRAQRLTWLEASEIEDEEEKVSRYRELLVRLPPVNRATVKALISHLYCVQCFSDTNQMNVHNLAIVFGPTLFQTDGQDYKAGRVVEDLINHYVVVFSVDEEELRKQREEITAIVKMRVAGTASGTQHAGDFICTVYLEEKKAETEQHIKVPASMTAEELTLEILDRRNVGIREKDYWTCFEVNEREEAERPLHFAEKVLPILHGLGTDSHLVVKKHQAMEAMLLYLASRVGDTKHGMMKFREDRSLLGLGLPSGGFHDRYFILNSSCLRLYKEVRSQRPWSGAPETSHRPEKEWPIKSLKVYLGVKKKLRPPTCWGFTVVHETEKHEKQQWYLCCDTQMELREWFATFLFVQHDGLVWPSEPSRVSRAVPEVRLGSVSLIPLRGSENEMRRSVAAFTADPLSVSGSPCLWAGGWGPGWVPAFYSTVDDCPDCPP

SEQ ID NO: 2008 - DNA, 555345 bp, Mus musculus
  misc_feature (1)...(555345): n = A, C, G or T/U
taggacaccgaggcaaaagggcagggagagacagccaaagccacctttgacagcagaagtgttatcgccatcgcaagtattcgtccggaaatctgtctgccctcttggcccacctaattcctccaccttcgcctccccaagtagataatctatagaagtgggaatgagatgaaaaagaagtcaggtggcttagagagtgaattgttaagtctccgtaaagttcgaggtaggtatttcatggaagttcgcacaagtgtgggatggaagaagttggtgtgcctactgtgttgtgttagtgtttctctctctctctctctctctctccctctctctctctctctctctctctctctctctctctctctctctctctctctctctctctctctnnnnnnnnnnnnnnnnnnnnnnnnnnnnnnnnnnnnnnnnnnnnnnnnnnnnnnnnnnnnnnnnnnnnnnnnnnnnnnnnnnnnnnnnnnnnnnnnnnnnnnnnnnnnnnnnnnnnnnnnnnnnnnnnnnnnnnnnnnnnnnnnnnnnnnnnnnnnnnnnnnnnnnnnnnnnnnnnnnnnnnnnnnnnnnnnnnnnnnnnnnnnnnnnnnnnnnnnnnnnnnnnnnnnnnnnnnnnnnnnnnnnnnnnnnnnnnnnnnnnnnnnnnnnnnnnnnnnnnnnnnnnnnnnnnnnnnnnnnnnnnnnnnnnnnnnnnnnnnnnnnnnnnnnnnnnnnnnnnnnnnnnnnnnnnnnnnnnnnnnnnnnnnnnnnnnnnnnnnnnnnnnnagagagagagagagagagagagagagagagagagagagagagagagagagagagagagaacagtttagattgccaggggagtctgagccacagaaggtgggggagggctgttgtaattgtgggtttggccgactgacgactggagtgccctcttcggcaatcttagttgtagccggaggtcatgtaaatcgaccttaaaagaatgcataagccataaattaaaccctcacccaacggctgatccataagtagacaaaatctaacctggacaaaacgggcttcctttagggccgagttaacccctctcccccaatagaaactcaatgcgaagttagttttgttagagaatgaatattttgttttcttgaaaagtgtcgatttgccgtgtgactgcgccgccgcagttctaagaggcgtcagtgttagccaggctgtggctcaggggccgggaggacccgcagggcttctgaacctcccccatttcggactgggatcgttggctagttgtggggttgacgctggcctagggcgggcgggactccaggatcttcgtagctctccgcgctaggggtgaaatttacccggaggattaaagaaaacccgggtggctagaagccgcgcgctccctcctcgccctccaccaccggggcttcccacgactttcccgggacgctcgagttccagttccccttgctccctccactattgcactttacttttaatggtcctctcagcagtacacaaaccgaactccaaggcagtttgcaacccaacggtggtcctttttgctcagcacgcttgctgcgcaggctggcccgctgacggcgtgggcgagggacagccccgtaaggctcgcgcgggttcggcttccaggtcctctgcgcttcagccggcaccctcggctcagagcctgacccgcaaccttcgtccctctaggctctctgcccggcccgctactggctgcccgctgcgggccgatgttcggagcaccggctgggccctgggcgggaggcggtgttggcgaggctcgcctgccccgggggagctgctttcggctttctcccttaaagggcagtacgaagaaggacccgggtttgtgcaaaggctgctggggctgaactgctgcaaatgcaaaggaacggccgggctctgcggaggacagactggctccgggtccgcgcagctttaagataaaaagaattggtgtgttcggatagataaaaggtggtcgtttccggcgtattatgagttttatttaagcttgtctgactctgaccaagtttgaaaatgtttgtttgtgtgaatgaccagttatcggcagcgactccagtttgtggtctaaaataagtcatttactgggctggcagggctgctagttagcaagatgggctgttctaggctgcttctgcgagttgcctcctgtaagggccgcacttgaagtttcagtctcaagatagcccgaaactgtcccagcggcacaatagattgggctccggacctccagtttcaatgtctgagagggagttctggtgacttctcggtcctggacgctgggctccagggtgaactccagtggcttggcttttggccctcacggaaccgcccagccagcaacccagtggagagaatgccccttccccccgcccaccagggtctcctctcttctgtcctttgtagtcacatgtccgggttttccccctggtccgagaacagacacagccccgcccagtctatttctagaaggtgggttcggtgaataaaaaggtcaagtggttacgttcccgagctggtccacagtgaggggggacaggacagacacctggcaaggcccgccccgcctgtccccccaaccctggcgggcctgcctgcctgcgactggcctccctaggccacattcttgtgttaggttggagaggcgagaggcggtaggagagggaaccctgaaccggcccagagcaggcgaagctgatcccgagatggcattttgttttgaacagttggtggggaggacgcttcctcataaggtaaggtgtcaactggacagttggctgcccaaatgccacatgtataattagcctgcgcactcagcacctcatccccaaggcccataggcacgggcttggctgacttgagtagctcagttcagctctggattacaggattcccaagggaagcctaaccggccaggagagcctggagaggccctggctaggaagactgaccatgaaatctcgcttttgatttttgccttttctccttctccagtttttcttagttttcagctaaggggcaagtgctggttaggagaaggtacccaacatcagcggcaggttgcagactggatggggaaaggggaaacagaacaaacctggccacatcctacccacatgctgccctggagaatctgctcaaacactctgtgtgcactcatctattgggatcagccagtcttggcactgtgtgacttggcttgggaagagacttcagatctgctcacttgtctccctgcttcccccactctcagaggtctatcacaataatttagtgtcagtgcctgattgtagtttctgctcccgcttcaggcctagttgcttggggctgctagtggacctgggagctgggcagatctgttgtttcccttctcattcctgttcagcttggggttcttagagcagagctttgtctccctgtctgctcagatggatgctagtttcctgttgagcttcccgggacatcctagcctgaggccagctttaaggcttgtggccctgtgcagaccagacttgtgcagcttcaaacatgacctttcctctgtcatccctctgccaccctgggcactcgctgtggaattcagcactcagaattaggcactgacatcaatttgccttcttcccttgcttctaggtctctcagatatagtactggaaagattctctgtaatttcaaaacaaatgagcaaacacttccccgaaaccttgcacaggtctagtgggacagttagctttctcagcagcaggggttctgtgatgagaagctggggcttactaagtttctcttgcttcgatggaagccagtacagtcttttcttatagcatgaccaaggttagagctgaagtttctgttctctcagcctgggaatttttattgatgcattttccagagggtctttgttgtatgcacatacatgagcatgtggagaggcacaatgacatgtagatttcttctcaatatttgagagaccttataagaaatgttatattgctcctgttcttaagaaaaggaaacactccactaaatggttcacattttgaaagccagtgtgcactagaagtcattggatctagtttatggccaaagacatgaagtgatcaggactggataccagaaagagaccaggtatttcctcaggcaagctgacacccttagtcacttcatgagtactgacacctctttctcctctgcccttccacatttcttactatggcaggaagagaaggttttttttgttattgtttattttttatctggttcgttgttgattttattgtgaagtgaagaaaaggaatgctcttttggagtatatgttttttaattaaaatgcaaatatttgagctgttttagaattatgtggtatgatacattctgtactatattgcataactacaatactcaacaatatattgtaaaaacaaatgttaagagactacttatcaagcagttatcatgtgcctgtgtcttaaactgactctaatgcattcagcatgagtcttaaatggagtgatgtgctgtgagaatgctgtctatgaagcatcttttcagtagcagcagaaaacaaccgatatttttctttataagggaaaagcaaggatttacaacgtgtcaatataaccagtaaatcttccttttataaagcttcaaaatatataactttaaacataatgataaattttggtggcattattgaggttttatataaattttttatttgtcttgttttaggagatattgggctttaagtcaatgatcaaattcctgtacctatttaccttaaatattataaatctgaaatattttatataattctctttcaattaatacagtaggtcctggaaggattggtatttcttgagaataaggtaatacattggctttaaggcttttagtactttctatcttttcatattggctattttaacccactagtgatattactcacatatctatatttatatcatatatatatatatatatatatatatatatatatatactacttaaaaacagcattttatgaaattgtagtttgggtttaagagaactatttgcttaaacatagtttgaggatgcatatatgtatatcaattgctgtttttgaagtaaagtagaaattccctagaaatgtgtctaagagcaccatatcagtaccatatcaggcacagacaggtactagaaatgataaaacacagataacacactggaagatgatttgcagatggcctgtgatatctgccatcatgaggttagatgtgtcatgttactgtgtatacacacacacacacacacacacacacacatctttaaaaattaacctaggccatttcacattgatcaagttatgaggatatatgaggtttaatgatggcaggtattattatagaaacctgctaaaatgaacaaaataagcactcagtgcttttttagacgaaatggaccagatctgggtttggaatgcaacttgcttaggaattctttctggtttttttttttttccttttctttttttcagcagggagaattagggtgcaggataacggcagcagcatttcatgtcctcagcggatttcacattccttgtgattatgtcccaaatgtgaagatagtctagttaaaaaagccagtgttttagactatatgaaaacagtttttactagacacagcacgttttaaatggacagtatggccttgtcagttaagctttcagttgttatctgaacattaattgttttggtgagaggtagcagagattctcaccgtcctctcattacatattcattattcattcttaggaaggaggttttcattttccttggtctgtaggagagggtaaagtttttcagctaattattttgtttagacatttagtcaaactggaaatagttcaaaatttacattatggttttaatggagcttttcaagtatataatatctgactgtcatagtttggataataataatcacctgaagagcatggatagaggctgagaaatggaatataatttaattctcctctgggctctcacctccaaagtggggtgctgatgtttttcttcaaatctgtggtagtcttaaaaaaagggaacaggaaaccctaaaatctcagagaggcagtattgattcaattcttaactgcaaatccttcatatcattgctcaaaatatccaactttgcaccaatattagccattctttttatagtgacaccacgcttagtaagaacttctaagcactgaggtcaggtgttgagattggattctagtttattttttatgaatcagataaagatttctgtgcatgagaccatatgtgaagatgagagaacaagaacatttccatatcaaaggcaatatatctgaggctgcatggtaattaagatgcagtggtttgggctctgcactggcacttagagcatctccgggccctgtgcatcatgcaggctggtgcctctgcatacttcttgaaatacacttatgattttgtacaaacatttatgccagtccacacttttctgtggataatttgtatttcatccaaaccattcaaagtcgaagttattttttgagctaccccctcattatggcttttgtgcatcaactatttttattctagttgtttgtatttccttttaccagaatgatggcttgtttatattcagaatctcttcttgctcctctaagacccctaatatatcacccattttaccattcactcaaaaaactttcatctttaggaaggatgtgagttattttctgaggttaattgtagatggtacaatccactataaactaataaaccacattaaaagttaactgcctagttatttgtgctttacaatgctaatatatttaggactccgcagtagcttgcatagtatataatgttgggaaaatttcttttcaaaatatttagagaagaatttagaaatcttctgttttgcttttttatagcgtgaaaatatgtggcgacattctttttcatactccaagtgagaagcaatactttgaaactgtagaaatcttgctttttatctagagttatttgttttttgttttttgttttcatttaaagggagatgtttgattttatttgtaataaattgaatcagtgtcttaacctgttggggtacagaacagtgatacagtgaaacttgctgtaaaatagaacagtgaaataggatctaacaattggtactccaatgctttgtctatttagtacattttgcatctttgggaatcagcttgaatgtggtctgtaattttctggactttctatttctgtgtcttctctctatgaaaagcctgctgtggtgctcacaacaaggacttggtgtatttcattaggaagctttcagggtcagtgaaacctttttaatgctttctcgggaatgaagtattactaagtattgaggccttatatgatattatgaaacctgtaagagttttccatgttttagttattttggattaaattgctcaagtatattgatttgctgcttctcagtgatgttccatgtaaatcggcaaaatgagaataagatcagtgcattgtatgatatgcatattatgtatggtatgcagacttctcatgctatctcagatgtcaccacgagataaccccttacatgatcttcctgtcaccttcgttggctcgttgtttctagtcatagtaaagagagatgttgaattgtctgtctttaatatattcatccaaatgcagaaagggactacagtgctgtttttgatttcaccttctaaacacagtctctgcttctttgaagagagtagttctttaaaattgaacaaagaaaattgaaaacacttcattttccaagtctaaaaaaagcttagtgggtgtaagaagaaaacacaatacttttaaaaaaaaaaatcaaagagcatcggcttaagaagggacttattctgacacatgggtgtgaaggcttcattttctgctgtgcagacatatcactgggaagtgtggttgggtacttatttcttagcacccagaggacccaatgctgagggcattgatatttgttagagaaaacttagccttccagttccagcttttctaactgtgtactaaggaatgtagcatttggctagttgcaaacttgcttcttttctcctcttctgtaaaatagaagcatccatgtatattcttttctttcctaaatagaactcacctgaattatagaggacttgggagagtcccaagtgagtgaatgtagtgtctggattcatgacctctaaattttgatgaaactccaatcttaaaatctggaagcgattatgaaaagtcatttcatctgtcatcttccattcaaaattgatgatccttatttcattctgatcaattaaatctttcccttttgtatgcctgcaacaaaagagattttatatctgaatgtggctatatacataaatgtttcacatttgtgaaacaaaatgtttcacaacatcagagagttcttttgtccaatagatacattttagtctttatcttctatttgaaggaaaaatggaaagaaatatttttcttcatttgaatgatagacctgcaaagagcagaatcatacctttagtttttatttccttttacatcttaccccaaacttaattgtatgtacttggaaaagttacaaagtctcttcaagtatcaatttactaatttaaaggatgggacggtgatagaatttattgcatagaattgctgagaagatcagtgtcaagatgctgtagacaactatgtcaggacagatggacagtggttatgtgatcagtactagactcttgacatgagaagtgtcttttattctttaatatttaaagattttaccagttttaaaactgcattcatattcattgtccttttcaataaagcacatgcaggaagatagacttaccagtcatcctgcctcccggatatgaatgtagtctcttgggactttgctccaggatattgtttattccaagcaaaggttggaataaagatgctgcaggtaggactggttgcttggtcttgtctttccatcttctcactagaatgtcagtgctcatttgctctatctttgtgttcacttccagagcgaccatcgatgtgtttttcatgactaatggaagtgaccagtgccctgctgacttaggagcactgcacatttgttttgtatgccctgatgaatgaaaagtagagaatggcttggcaagtacatactatagttgactagtttcaaaatatggggttcacggagagaaatatataaaactgtcctcaatggtggaaaggttgggaattacttgattacacaatttcaaagctgaaaatgcataatccttgaggagatatgaatatgggtacttctgagcagtatagtcattactacagtggatatatatatacacatacatgtgagaagtccttatgctgaggaaagcttctagtataaggtggcctttggtctgtgatagaaaggatggttggagccggacagtggtggcaaacgccttttatcccagtacttgggggcagagacaggcatatttctgagttcgaggccagcctggtctacagagtgagttccaggacagccagggctacacagagaaaccctgtcttgaaaatccaataaaaaaaaggaacccccccccaaaaaaaaagaaagaaagaaaaaaagaaaaggaagtcagatagtacctcaaggaacaccggggcaacatttggtgtaattctttactatctggtgagtctgataataaaatgtctcattgtgttttgtgacttctcaaaaggctgtatctgccataaatgtgatatggccctagaccagtagcttaatcactgcacctctttttctgagctcgattttgtggtcagaaacatcatgggtatattcaaaggtacaaagaaatctttcagatttgtttcccttcaaagtttttaaataaggtataaaaattaagagaagtggtttattaataaatgcacttgagccccaggatataacccagaggtagagtgcttgtgtggtatgtataaggttttcagtacgatttccagcaacacacacacacacacacacacacacacacacacacacacacacacacaatactgtcagataagctactgattcaagattatgaattagtataatcttgtatgttatgcttatgtgctcctttcattcatttgacaagcatagtggcagagaaaatgctatctgaaaagtttctgatctgagtattaatttgaatttctcctatttgtttctggtgttacatattaatagttttaattttaataggcatcaagttagcatagttcataattttgttgtgtttatggatgtatgcctgaacttgtattcaggtgtgtgtgtcttagtgtgtgttggccagaggttaaccttagtgtcattctcagatgctatcaaccttatgttttgagagagggtctctcactagcctggagcttgctcagttggctgggatggctggccagagagctccagtgatctgcctgcctctgtcttcccagttgggtttagtgattgcaagtgcacaccaccatgccaaacattttatgtatgtgggttctagaaattgatctcagattttcatgcttgctgtatggcaataactttatcaactgagctatctcccaagactctttataactttaaatcgaaggggagcatgaaagtaaattcttcctcagagtatagaaataggaattcctataagatgataatggacaataggaggaacaacaatataaactaaccagtacccccagagcacgtgtctctagctgcatatgtagcagaagatgacctagttggccatcattgggaagagaggccccttggtcttgcaaactttatatgcctcagtacaggggcacaccagggccaagaagtaggagtgagtgggtaggggagcagggcggggggagggtataagggacttttgggatagcatttgaaatgtaaatgaagaaaatatctaataaaaaatttaaaaattatgaaattaaaaaaaaagatgttaatggacagagagcatggcaggacagagagcatggcaggagcagggacagtaacaaccccttcccatccctgagaatgttcaaacagggctgctgcatttattcttgttagttttatattctgaaaactcatgttttctagattctcaaaggcctttcctcagagctgagggcttctgggtttgatctggagtttctttagtgtttaacaattcatttctccaaattaaacaagctcactgagatcttgccactcaggtggctgtgacataatgactgtctgagaaaggactggggggtcacacagattgctgaagtagtgggcctagatttcagtggtcattgcctgctttgtctttgataccccctttgacttctggacacttgtattgtttttaacatcatgaaaaagtgataccatctctacattataaagaatgttctggaggtgagtcaagggtgggactcatagaaaacagttttaaggcatcctgaggcacataaaactagctgtgctccctttaaaggagcaacagctcaaacaaaaagaaaataaattaaattaaaataagatggaggatttattagctaactgaatcccaggaatgaatatatatatatatatatatacatacatatatatatacacatacatatatatatacatatacatatatatatatatccacgagtcagaaagcccaaataaatgctggaggaaaatttgactacttagaaatttcttagatatattcctttctcttataggcatctcatttatttatttatttatttatttatttatttatttatttatttattcattcattcattcattcattcattcatcacattcttttgagacaggacctctctacatagtcctggttgtcctggaactcacagagatggacctctctctgcttccgagtgctgcgattagaggtgtgtactaccacacctggctctagttctttttcactattaaattttttgttgaaattagatgtattgagatttagaaataattttaataattttatccctaaacttgtagaacattatagtaaacttctaatttttttaatgataccagagccttgtatgtatttagcaaggactcaactacaatattttaaggtattactaacagagattatccacctttctgagcttagaaccttttgagttttatgggggtgctttgaactgtacatttgtattggtttatgcagtttataggatgttcattatactgaatagtttcatattttaaattgtgtggtaccttgtagtaggcttattttcttcagtgtgtgtgtgtgtgctcatgcaggagcatgcatataatcagcttaaatagggtaagataagtgaacttgggcactcaaattcttctgtgtggtttgacaagggtgaagcaaaaatggttgttctaactatgacacatttttctaaagcactgtccgtaattaactatgtgcaagctgtgaaatttgtgtataatgtctttgtcatagctgtgtggaaagatcatcaatattatcagaaagtgaagaaaagtttatgctttcttacagtgtattaatgttttctttatatttttagtaccacttttacttgtttatattattattctttttgctttttaatgtgtgtataagctaggccctgtaattgaaataccaacatattaggacatttgtgtcaacgtattttacagtttaagaagctaaaatagtatatatgttagttttgcttacttatcaagtttatattaaggtaatttaaaaaagaagtaaaattttattaaatgtagtaagaagggcattgaattatatggtcatcagaaaatttcccaaatgtgtcctctattcagttaaatctatagctgatgcatctttaaaatatcctttattactaataagatgtaatttcagcagaagagtatggtagtaccatagctgttggtacccatacttctgattgtcgtgagcagaggaaagacttccagcagttttaggtgaaagacacagaatttagtatgttcaaagagatatggaaacagagacccaaagtagcgtaggaatctaatcacagatagtgaatctgacaagacagggataaggctcaggagaactgggagaatcatacatgaagcatgttcctactacacgtgcatagttacttaaaactttagacatgtcctgttgaggtattgtatgctatatctccaaacagatatttaaaggaaagctatagatggaacaaaaactttaagattaattatggtttcccatactctaacccaggacatgctttgttatttgtaaaagtcttggctgcacaccatgatggagtgattcaacatctggttctaggctccttttcctctgctttgtgcttttaatgctgtcacacttaaacagtgatcccggagaaggaaagcacatgcgtgcaggagaaaaatcacaccaccagttacactttctaaattgtgatattaattttttttaatactaagcacaaagaatgcaaaaactttttttttttttttaaaatttgacccctaaatcaccatcttccaattgattatttttaccactgggagtgaagttttaataatttaataaaaagacccccaaatccatcaagactttgaatatcactaaacaggttagaatattctgttgccaattttaaaattgaaaacagatgagaatttttttttttttttggtttttcgagacagggtttctctttgtagccctggctgtcctggaactcactttgtagaccaggctggcctcgaactcagaaatctggctgcctctgcctcccaagtgctgggattaaaggtgtgcgccaccactgcccggctcagatgtgaaattttaaaggtaatagtcatagaattttggtgaccaaaccacccaatgtgatgtgatgtttacaattttttttcaaatcaatgtgtaaatggcaattatttttacttgtttgataaaatatgacttttaccttaaagagacaatttttataggtatgtttctagttatttatctgtgtatctgtctgtatatctgtgtaccttctcaatttgtctatcatttattctagctatttaattacctgtcagaatctctacctatcaataatctattcccctcctcttggcttatgtaccaagtgttatttcagggaagctcaatgcatttggtatgttaggtcgcttgcttttgtttcttttccttaattctggaaactttttcctgagataagcagggaacctgtggatggtgcaagccattttgctagtgcttcccatcacttttatagccttagaacgtcttccctgttcagtgcatgcttgttcttttaattactaagacttcacttaagcaaatttgttctgtggctgctaataaagtagttgtgtgtagtggatgtgctatttgctagagatattctagtgcaaactgaatattgcaaaacagggtttctataacagcttttggtactgtgtcgtgctttatggtcagctgcagctgtaaggtgtgaacctgaaagaaagccctgcattcaggctactgcattgtatcctttagcctaggaataagaattccaggctgatttactgtgtctttcctgtggtctttgtttttattgtataagttttgtgttgcagaggtctgacattacccaaataactctacattaggagtatttccaaaaactgtagtctccttttgagtcattgagtctcattagtaaaagaatttcaaaacagaaaaaaatgaaaatcttcactgtttcacaggtttgtcttgaaaggtagatgttacatatgacacctcagcatttggaggcagtagttagtaaggcctgtggtactgtctgtagtctcatcctttgttcttctacctcagccaggacaaccacttcaccaactgttacacacttcctcagttacccctgggaattacttttattaaaaaccaaccaaccaaacaaaaaacaaacaaacaaactcatggccaagattgtatcttctgctgtgtttcagtgttatatttcagaaatatcactttaggcatgctaagaaacaagaaacatgtagatatattaatctgaaaaaacaaggcatgatatgtctttgtgcaaattttcagccgtggtttctatgagtctttctttttttatgtatatatattttttattaggtattttcctcgtttacattttcaatgctatcccaaaggtcccccaaacccacccccccaatcccctacccacccactgcccctttttggccctggtattcccctgtactggggcatataaagtttgcaagtccaatgggcctctctttgcagtgatgaccgactaggccatcttttgatacatatctatgagtctttcaatcttgtttgtgacagaactgatgtacaaccccagaggttgtcattcacattgcattctgggtaaatggctcctccaaagtggtgtattaaatagctatgattttcatttcaggaagggattgtatattgttgccctattgtttatcttggtttttttttttgtagctttcttgatgggagcaacaagaacaaacatgcaacctgttattttatgaagaaactcaggaaatgcttctaagtctttaatgtgttgttaaaatttgtaaaatattggattgaattttcatattatttttaaagacattgtttgaaagaattacaatttaaatttatatctatgtacttagttttaaaatatcttacagattgtaaagtctttattttttaacctttattatttagcatctcaaagtacactaaggaagggtacactgtcaatgtcatgggatagaaatttgaatctacaactgtcttcgtgagaattaggaagagtatttgctatttttggccagatctgcttggatcatcatccatccaaaaatgtactattaaagagcctcagcttacagtgacacatctgccaggctggtcacaggtttatcattaaggcttgcagtattaacattattttctaacttatatctttggaaagaatttttaaactaattgggtacttattcaatattaatttaattaaaacactagatattaatatctaaaattaatctctatttttattcagaatgtcttttattagatatgaggcattaataattgatacagagaacagtatgttattcagtatttaaatttaaataaggaatcattttcttacttttaaataaatacataagcctgtttttttttttttatatcatattttcctagaatggtacatccagttaggaggccactgggatgaaaaagtaggtgagaatgatagggaagaatatagagagcaaggggaagttatgcgatccagagcttcctttctgggacaccatctctgcagagaaacccagacagcagcaggaaggtcagttgctgcttcatgtgttggaattcaaaaagaaagaacgacactctatgggagcccataagagaaaggaggcaatcagacagcttttgtttcttatggcaaagtcagcctctgctcttttcttttctttccttttctttcttcttttcttttcttttcttttcttttcttttcttttcttttcttttcttttcttttcttttcttttcttttcttttcttttcttttcttttcttttcttttcttttcttttcttttcttttcttttcttttctttttcctttaatgtaaccggacaagaaaggcctaggaattttagagttaagcccatttcccatgctttaggaggggaatgagtgagggttactagtgggaatgtctgcagctctttgtcgcttccatactcagcctcctttgatttagtcaaagttgaagttagaaaagatgagaagagtggcgaccagtgatgatggcctttggcaaccaccgtcaaaccagcatttcctacttgtcccccaccctccaactcaatgggatatttcctttgtggattgacttaataacaaaaacagtttgggaatttcagctcagcaaacaaactttgggtgatgttggctctgtcagttctctctaggcataaattctttcattgtgagactaatgatttctaaggtggttttggctttgatgtcctgtttattactttctggggctgtatcgtttcttcatataaaacttctggtgggtttctctgttctgcatgcccgtcttaagccaccatgcccacagtgctttcagaagcaacaaatgctgtgaatctaatctatgattctcatgctagtgggcttaggagcatatatgtagaactctttacttcttcagtttctgacaatgcatttctatgacgtgatcctgggtgacatgctcttgctttctagctcagtggctaggaaatacctcaggaagggaaacttgtgtctgtggaggagcttggaccgcatgagataggaagggtgttggataaagccatcggttcactgcatgtgcttggctaggcaggcagctgtggccactgccaggctttttgagtatggtttctgtcaccaagagagtaggctgtctttgaagtgtgctagttaacttcttctagaatcttaagaacaactggctctcaagaggaggaggataggagatctctaggaacagaaaaaggcactgttttcatggatacttttcttccactagtattattttttttgtcttttttatttttatttttgagtttattgtagatgaacagacttcagccttttttattcttcttttcaggacctacgtactgccatggattgcagtactgaataatggagtagatgagtatcatcagtgtgtactggcaggagatgctatgcaccatgcatatttcttgggtcctttcatagaacagaggtgaaaacagtacttgtatcatagttcctcagaacttagaatgaacagatatactcgaagaaacatataataagagttgtaaattctcattaagtgtttgtcattttattattaaatgttcacaatttctttggaaatagatattatctttgttttacatgaaagtaagttaagagttgaagaggaaaatggccacctcacaatcatgcagccattgagtagcaaaaccgtggtaggcatagatatcctagcttgagaccttgtggcatgtgtgcttctaacaaagctgttctaatgggcaaatgagtcaagagatttcccctgacagtcatgagccaaggtgattaagcaagtaagttggataatcaggcaacgcaggagctctctctgtatatctgtctctgtctctctgtctctctctgtctctgttgtggaatctcactggtgaagttatcaaagtagtcttccctgaacatgccatggcattcactgcagtgcttactttcagagccacactctcagctttatatggtttctatgctgggatttgacctcagttattacagagtttgcaaagtgaggccatggttccaatatgaacgagttcagctaacatgacttactgacttttcctgttagcttcaatttcacatgcagaaatctcaaattctctttcctttggaccaattggatggttccttttcaattgatggcctcttgtgtatcttttaggctcctgctgctgctaaggttaccatctctgacatttattgtgtttagtggcagaacttcactgatttagacagaaatacctgttttcttttgcctttgatgtctcatcatctcttattatatgctgtaatgctttctaagtggatgcactgctttctgtgtgtgttagccaggtcccaggccaatgtggtcagttatctctcagttggtgttttattacacggagagtgacatataacctttaagtagcactgagtctatttaaatttctttttagtgggcatttaagtgctttttaaggacagtaatcatttcaacttgaaggctattgtgtagatatcaattttagagtaaggtaatgaaaatactgaagctttgaatctcttcttgatcccaaagcttaaaatattcttccctgaatctttattgcctccgtggtaagatgatgtggaaaaccagttctcagtcaaatgttctgaagaccagagctcgtgggtgagcacactttggctttctgacctgtacagtgtgggagagttagtttgaggttaaagaaactcagcagtgtgaacattgtctcctcagagttccatctcctcatttgcaaagttatacttacttcctagggatgctttaagatgcaaaggaataactatttgtattcgttggtggtataggtatagtgcttgctaccgttaaagtaaatgtctgtaaagacccaaacagaagaatattgcattcaacatacataaaatggacaacatgagatacaatgcaaaataattctatattataccacacacatccatagggcctttgagaaaagcctgactcatctatagcaacgcatactttgagaattagttcaaccagaaacaaataaacctgttggagctaaaattcctttattacaaggtcagccttgtctcttttcagtgtcatggcttgtgaagaggaactgacacaggtctcagtgaatctagatgtgtgatttcttgggctcagacctgtaactgaagaggcaagagcaggagctccaggagtttgaggaggcagcagttgcccaccgagctttagcattggacctgtaggctcactcccagggaggcccaggggagtcctgactgggctctgacagtaccttgcttcctagatccaggaggcttgagtgcagttgtctgtctgagattgggttgtggtattggaaatcctttgatttccctctattccccttaaactttttattgacatgaactccaggtgaccttcccctcagaaagcatctctccagaggagcttagcctcagtcctgcagtgccgggaatctgtgggttccagaggatcttggcagaggcttcagactggctgtgtcagatctgggatcggaacccgagtttgtctgacggtaaaagctaagctctttctataatggttcaatcctctttgcctggagaagatggcactgcggagagatggaggagaagcatcactagggggtcctggctcatcgtctaaactgatggtgaagtgatattaaagaaggaagctgtggaactgcagtaacttcctgtgtgctggatgccatgagggttgtgctgtaggtgacaggagtccctgcggccacccgtgggcacatgagagtgcattctgggtacatgttgttcgggttataaactcagcctttttgcattatgaaacacacctaaagctgaaggactgcaccagtcaccctttcatgatgcgattccccatgattatccattgctgacaggggagcagttatggaaatgaccttctcctgtacaccataacttaatctccatctggacatttgtgcggctagttaatttgtgtctggcacctcagaggtacttggcaggtactgctcagtgaaagaatacctggagtactttattggattagggtatggcaatatctaagccatagagggcaaagatattttgccatcaaatctaataacctgagttcagtttctggaacccacatggtgaaaggacaggactgtatcctacaagtcatcctctgggttccatattgactccatggcatatggagtggatgccatgctctctctcacacacacaaagtaaatggatgtagaaaaaaagccccgtttcttgtttgatatgttcaatgaagatatgcttcaagtattatctcatataagttttccttaacccagcaaagtatgtgctattatttatggtttatagatggagggcacttaagaataaaagaatttacttaaggtgacattgttaagacatagtggccaaggatttgagactttaagtacaactgttatagagtagtaggaattatcacctttcttgtcctagataattgcctattaatagaaccgcccccctttaatggaagccacctcttactgttgactcattaatcttgctgccaactcaaactcataagccttttatttactgtgacttgtactgtgctggctgccttgtgcctcagtacaagaccttgtctttatttcatatagacattctctggctacattcatgtgatctttctttcttgagttattttggattatatggtcatatggtttcctcaaacaattttttttttggaatttactgatcacataaattttcccccttaatattattagtatagtgtgaaacattttgatagatattctagtgcttaaacttccttatattcctttattaaactagctgattatattgtgtataaatgcatattgctgaatctgagttatatgtatatatatgaatttatatccataattcatgtatcttaatgccataattgtagagctagggcaataggaatgttctggaatcatggggagagcataggaatttatgatttcattaatggttaaaaaaagccaaaaccaaatcctaactatagaactattttatcactatacattttaaagacctggagattcagttgcattttattgatctattcattgtgctatccttcctcgagtcagtttttgtaatttgtattttactatggaatcctctttttctcttggtttaaaaaatatattgaggccagtgaggtacctcatttggccaaggctgaggatctgagttttcatcctagaactcacatggtggaaggagagaactcccaacgctgtcttctgacctcactccagcaccatacacacacaaaataaataaatgccagagaaccctctaaaatattggtatcataattgatatggttttaaaattgttttctacttttatgtacccatgggctatagtctacatttttcttacgttttaaaagttttgtgatctttttggatctgattatagcatttaacacattagttattagaaatggttgagtgtttggcatatagtttgtagtcattatatatttacaaggcttagttgaatataattcaaaatacagaaagtaccttctatttatcagagaggcactaatgactccaagggtgattctgagaggctcctgccttaagaaccttacaatatgataaggatgtttgaggccgattataaacactgtgctgaacatccactcatccagaaaaacagtaacaaggtcggacttgttcttttcctgctgaatgcttggtccatatggtatctctctgtatagatctgggcatgctgtcttggtacttaaaatcctattctgttaggaagacttttacacaatgttctaataattctagaacgttataaattttatcaactagaaaattgctttttaaatttaagcaggcatgtatgttacttggaggtctttagtaaaattcagattctgattctattaggagtaaggcttaagatttagtacattccccaaacacccttaggtcatgtctctgctgcttttcctctgtgcctctgcctgagaccacactttaagcagttgagaggtaaaaggtgtaaagtactatgtctcctgttctgtaagtagtaaagacaggcttcataaaagtaacgaagaagcatctagagggcttcttggctactagcagtcagttacttcaggctgtcctaaaattagtttcaatttgagggtagtaaaattaaaatgtgtaaagataagattaaaaaagcctctacattcaattgaatgattagtatagtgattcattaaactctaatttcaggctgagttcattgataagaagccatgattagacattcctaggtttagtgatcacatcaatgatagagactgaatgagatcatcacacttactttgaaagggcctcaccactcatgatgagaaaacagtcttcaatagccgggacttaggtgataaaatatccctacaaatgaagctgaactcttaccttacatcatatacattaacttcaaatgtgctaggacttaaatgtgagagattcaactcatagaagaaatagggactgcatttctgtaagcttggtatagagaatggtttcttgtatatgctgtgaaaagaagagaaattggacttcatcaacattaagaattttgtgcttcaaaggaaactaccaaggagttaaggataacatggagaaaggaggtaatttttacagatcacgtgtctgataaggtgtctatgcccataaaaatcctcagagctcttagcaatgaaaagacaacaccataatgttgttgtccctccacatattaaaacaaattctaagaaaaaaggaactttgataaagggcagaaaaatcaatcagtatttttccaaataatatagctacctagccaatatgcatggacagacagacacacacgggcgcgcacacacacacacacacacacacacacacacacagacagacacgatgctgaatatcatcaagcattagggagtgctagttaaaatcacagtgaactgctgcttcacaacttcacacatcccaggctcaatatgagcagaagccaaccaatgtggataagctagggaaaaaactggaatgctcattccttgcttatggtaatgtaacatcatggtacagccaacttagaactcagctagctgattttcaaagcaaagtatacagttactataagccccaattgtcccattcatactagctaagatacatacagactctagaaccaggacctgtgtgacaagaaagctttgatagaaagaaaaaatgagaagccatacaagaaacagtacagtggaaaacagcgcatggctatagagggtgtaatatggttaaaaccttttgatttatgctcatttaatttaccagtttaagaagtgagatcatattcattcaaatatatatatttgaacatagaatttgagtgtatctgagattctgtttttaaaactataaatttggaaaaacaacctcctgctttctcctcttattccatcctttttttgtgtgtttaatttaaatgtttttttccattagttacttaacactttgaagcattttctcctcgtttaaaaaactaatctattttagggagaccatcaaatggaataaagatctttaatataagaggattattaggagacacaaagtatttattctaaatctaagaatttcaagtcttcacattgtaactcttcagaaattgctgatagccttagttccctgcttagggcattgtctctggaggaactttcatgtcaaaaagattaggttttaattcaaaggaaggaatctctttaaaaccagtgttttaaaaatctctttaaaactgctgttatagaagacgtgacttagtgctttgaggtggcagaattgtgaggcaggggattttgtaatgtaggctgtttcttgtatggtctgtgagagagactgattctgattctaattcttaactaaccttaaaaatagcatgcacatactttgtgattttgaaaaggagcttttcacatgtctattctatctcatctagtgaagtctttaaatttatttgtgtttttaatatgtatgagtattttgcctgcatatatgtgcaccatgtatgtacctagtgcccaagaaagccagaatgggctgttggatcctctggaactggagtacggacaagttataagttgccatgtgggcaccaggacatgaacctaggtcctctgcaagaacatcaagtgttcttagcctctgagccatcttttcagcacttggtttgtcttctaatgtagagaatcttctgatgggaagatgtttttagtttttttttttttttgtagttgaatatttattgatatttttctttatggttagtgactttctgggcttctctatctgaggccataaaataatctctagtgtgttctacactgatcttcactgaaccagaatgtattttggcatattatttgaatacaggcattttgtattttcttatggatctccagctattccacacaatttattaaaaacttacctctccctcatgattgtacaatttacctttgccacctatcagctgctgctcagaattttttttggaatctttattgtgtcctctgatgtgcctgtctgtgctggcacttgtgtgcttccatgtgcctgtctgtgactgcattcctgcctccttgtcttcctcatatttgttttgcagtgagtcttggtgcctcataggctaaatcttgttacctggttcttatttttcaagagtatcttagtgcttcttgtcccattgcatttttgtatgaatttagaattacattaaatacatataaaaaatgacctagcgttcttgatgtagtttgtttatatttatgtaagaaaaaaatttaggtagaaatgattctttaaatgtccagtcttccaactctgtgaccttattgtattcatcatttatttttctattttgaaagtctcccaatatggttttatttttccttataggtcttatgtaatatggacattaagagaattttaaaaatttgaagaaaattgaagcaaaaaatcgtctgcttaatgaataatgcaagtattgtgcattgtcatgacaggagcaaagatgcccagtgtttcagggtagatattgctgaggtagataaatagtattcagtttgtctctttgtaggtgtttggtaaaatggaaataatatggaaaccactgtattttcatctagttaataagtaaaagggacaatctgtgtcctggttgtcttattggccacttgtgctggcctatcttactgtttccttttctgtatggatagaccccttgcctcaagtgctcaggcttaaatagatattctggtgttatagacagccaccccaaggggagggtctgtagaatgatttccaagctaaatatgctaaataatttttgtataaaactatacaaaaaagtgataaaatgatgcctgagttgtttcttagtagaaaatagagccattttcatttagcctcttttttttctttgacagggtttctatgtataactctaactatcctggaactagccttgtagaacatgcattgaactcacagagatttgcctgcctctgcttcctgagttctgggattaaaggcatgtgccatcacttgccagcctcaattaatattttttgaaatcaccagagcctgtaggtgtgcaacttatatactccagaacaaaattaagccatatgcatcatctaacattagcatgtaatttatttttgtttccaaaaaaaaagagagagagagagagagataatgaagcaggctgtcatagtttgtgataatcagaagttcccattgggagtcggagatgctgtatagatacgccctaaccttgtcacttctgtggagcagcattgagactgcttgcttctgacagcagacagccccagtgcagagccctggtttcatgttacattaggtattagcgctgttctttcaggagctattatgctgtgacatcaaagattttcagacagggcagtggtgggttagcattgaagttgtctgctgaaattttaaagaactgaattaaatatatatggttagactttaatataagaggtagagacagaattagaatcgagtaagtaaagcgaagaaatgatcaacctatgggctgtccacttagtctttccttgtttaagccgaattttatgtctttttatttctacatcaagtacaaatggcccttatgttaatgccctaggagttgatcatttgtagagagacattatgaaatagggcaaaaataaagtggttagtctgacccacagagcattgaatgaccatatggacagtgattgccttaattgacatccttcttgccaatgaactagttagttaaaaacagcagagcacaccgctgggtagactcacaggtgcgcaggtttcaggtgcgagtgaacacacacacctgcagctgaacagtgcagttgtatgaatggaagtgactggaagtatggccgatcacagtgctgtcctttggaaatgctaattttgtgcaatggtgaggaccattattactcacctctgtctgaatgcgctttgttgttaagaaaaataatcaaggcaatctgatttcaagtcttttttttttttggtggtgaaattggagtttctgtcatgtgatgttatactatgttatttttatgactgctgagatatgaaatgttaattaattttagaagccaaccaagggagctaaacattaaagagaacacagctatagaattatatatatttttgagacctctaaattagatatatcataataaatttttctacatattaaaattctaatgctgttatttgagaagtaactggtataaaactcctcaaatctttatagatcctgtgcttttgattatgtttagagatagtttgtttccatttcagattaatgtataacatagccatgaaagcactcacttaggaagcagaacgcaaaggccctccctggcctgggcttcactgctccatcctctaatgtcgttagaatgattaaaggccgatgcccccagctctgctgtgtgcctgcctctcagtcgtgggatgtgctaacctgaatggtggattgaagtggattgcattatctaaaatgctttttatgccttctatgttttagtttgtttttatttttggcataataaaacagcagaaagaagtacctgtccattcacagagaaatatattaagagctattaaagcacctaagacctctgggttcagaaccctttaaggatattcaatatttttcttttaaaaatactataatttaaaattacagcatttggtaggaaaaagggaggatattaagatgctagcttacacatttttaagcaataatcagtcacatagaaaaattagtattttcagtactgtctcagttcttttgcttttaccagttagggagatcctcattcagaatgctgcgaagggtcccatctccagagcccgtgtgactggcaaggcttggtgagctccctatgtggtgggtgtggtgggtgtttgtaatactttcactgacagactaaggggctgaggagtttgttctgtatcataggacactgaggcaaagtatagatactttagcttatgtgaatggtttaaaaagtactttaaagctggtgacttacaatgtctgtaaaattgaccccagcaggtaggtgcaaggttgtcctaactgtctgtcaccaaatggaaaggttgccttaactgtccagtataagaatttaaagtggtgctatgaggcacagtcttaggaagctgcagagctcaaaacaaaactggaaataaagccacatcaaatacaaaagaacaagctggagagtgtcttcagttaacagaaagttctggaagaaatggagttgtgctttcagagatagaaaggaaaataatatttgacctaatgttgtaggattatgtcttgaatctttacatttatttaaatgaaggatctttggaaataaactttgagaaatatttgccaaaaagaaaacagtagtgttccaagggggctgtttgtgggtggaagcaacacttcctggaatgggcttcagaggggcatcaggagggaagcttgtttaaataaagactttcatgatatacatttagagagctaattggacagcacttataatgaggaggcatagtagtcattttaggaaaaaagtgatctgtctaccaaacccctccaggaataagaaatccctactaaatccattattattcagattaaatatgtcttagatgacccttccaaccaacaagtatgtatcacgtgatgactattgccagctctcatggagacagaaaatagtatgtttctctgaacacagagaccttaataataagatacaagatactgtctactcaattgttaggtgagtttgcacctcctgagataggagaataaaaccagtggcaggaccttcaaggtctgagcctttggatctatccagtcagtggattgcgtgctgtccatgcacagtgacccttttgatccctagcacagcaaaaacatggactggtgacacacctgtgactccagcacttggggcgggggttgggaggagggaggaggagggttgtaagctaaaggtagtccttggctgttggtgggtttgaggctatcctgggacaggtaataccaaaccaagaccaaaaccaaaacccaaatcaaaccaaaaccaaaaccaaaacccaaaccaaaccaaaccaaaccttaaaggcctgactggatttggatgatgccttctcagggtgggtgccttgggtctacctctgtttgtttgaatatctttattattcgaatgttttttttttttttttttttacagtgaatggtcaaacttactaaaggaaacgaattcagggtttttctctggtttaaaaaaaatcaagaaacctggttttctatgtagtacagtgttttaaaccaacatggcatcgttgtttccttttaatagctggcaggaaaaaatggcttaaaaattccatttggaagtgggctgtatatgatagagaccgagttttcaatgctgtttctaagtgataaagggggaggtctgaaaagatggaaagttcttactttctgctgaagcataatgcatttaagagagaatattaaatctcataattaggtatttcctgacaatttttacaaatctctggtctagaggttaatattgctcagcattctaatagtgttattgataatatgtctggtaaatgccaggaaatctaaaagtagacagtttatctaaaactcaaaataaactattacaaagttaccaaggtgtgtgttaaaatcaacatggaggactctagagatggcttaagatgccttgactggagagtggttaagagcactttctgctctgctagaggacctgagtttggttctcagcaccagcatcaggtggggcaaggtcacttgtaactctagtttcacagagtatagcatctataatatacattatacacatatatatgtcaaaaagaaccctcaaacattgtctttatttgagttattttgatttagtaagtaatgtttctttttgtgtagaacaaatgctcaaaacacactttgttttgcatatcatacaatgtaaaagaagtaggatcatttaagtagtcgcattaagaaactggtgcacagctatgtctaagaaacaaaatttatcatctattttttcttatttttatgtgaatattcagttaaaggaatgataatactcatatttaaacaacttttttcttaacacattatttgacagaaaatttaaaacataactgatctggcagatgctcacatttccttgcctcttaggggaacaacagtggatagagtgaatttgaccatttttactgctgcctttttttttttttgagtcctttcaaaaaggggatgagatgcatttttctaaaaattgaaaagattaaagttaactcggatttcagattgctctgagaattggcatgctaaaaaaaaaaaaaaaaaagaacagtcaaatactcagattggagtacatttagtataacaaattccacctctaaatacagaggtaagttggtaatgactttcacctttacgatggttacaggctgttctgccaggcactcatggtttgtctctcctccccttcacttggcagacttagtgagcatccacactgccgggcactgagacatacgcacacagactaaagtgtgccaccagggcgtaggagagggcagactgaggagtgaggaaggtgaggtgaggtaaaagatggctgaagggagctgggcagtgtgaaagccataagcatactgtctgttatgctatggacacttctatacagtagtggacaaaggattgtaggagcatgcaagagagaacattagttctgactgagtgacaggctctcagtattatttttatgaatatgatataaattttcattgttggcactggagcatcatgtccttaatttcattgtgataaattctgtgggtaaaatttacacagcatagaggggtctggttcagtgatatttaccatatccccatgttatgcagtcaccacacccatatggtcctagactacttcatcacccgaaaagaaaacctgtcaataagttgtttttctttcctcccctagcacttggtgtccagtaatctgctttctgactctatggatttattgctgataatttcataaaaatgcagccatggaatttataacctttgtcccaagctgtttctacttagcacagtgtttccaggtctatgaatgtttcagcacatgtcaatattgcctttaaagatagaatagtattccatagaacatgtggacatgtgggttgtttttgcctactggcttttgcatgtagtgtagtcatgatatctgtgtccaagtttttgattggatacccactttcagttttgagtatgttcacagcagtgttaggtcatgtgacaattctgtttaactttctgaggaactattgtactgttttccacggtggctatacttttttttttggcatttctgccagcagtgtatgatgcttccagtttcttcacttactttctcttaaaataattattgccacattaattcattaacaaatatttaacatatttgacatcttatctctttttgtaaacttatttaaactattttattacttctgtctagtttccatatctgttctttatctacccattcaactttgtagtcttaaaaaaaaacatgaggggggtgggctgaagagatggctcagcggttaagagcacagactgctcttctagaggtctcgagttcaaatcccagcaaccacatggtggttcacaaccatctgtaatgagatctgatgccctcttccggtgtgtctgaagacagctacagtatatatatgtatgtatgtattgggggcctcacatcagctggagtatgctgcctggttggtggtccagtgtttgagagatctccagggccaggttaattgaaactgctggtcctcttacagggtcaccctcctcagcttcttctagcctttccctaattcaaccacagggctcagcagcttctgtccattggttgggtgcaaatatctgcatctgactctttcagctgcttgttgggtctttcagagctgtcatgatagggtccctttttgtgagcacttcatagcctcagtaataatgtcaggccttgggacctcaccttgagctggattctactttgggccagttgctggaccttgttttcctcaggctcctcttcgtttccatccccgcagttgtttcagacaggaacaattatgggtcagagttttgactgtgggatggcaacccccctccctcacttgatgccctgtcttcctgttggtgggctctataagttccctctccctaatgttgggcatctcatctgaggtccctccctttgagtccttagagtctcttacctcccaggtgtctggtgcattctggagggtcgccctactccaggcttttaatgtttgccttaggttactctgagcaatctggagaatcagtgccctaaatcagaggctcttttgttctttactattggtgttcggtgtctctttgcacacttaataaagtttttgttcatgtgggctattttaattggtacttactgcattggaattatttcccctgttgattatctcatttacattagaattgtttggtccaagtttgggtagtgtgctttatataatctagtagactcaagaggagaaggaaaattggttgatttattcatgttttcctctcttgcttcctcccagaactgaaatcaaggcctcatgcaggctagttaaacacgttaccactaagctacctgttgtggcctcttcttcctaaccttccagtgttttgtggcctttctgcttgaagaacttccttctacattctttgtgtgtgattttactttggataaactctcttcatgttttcttctgagaaatgtttagatttcacccacattcctgaagtatggttcactgtgtagggctttgtctgtcttttagcacttaacaaatatcaggccactcccttctgactcttagggtttctgatgagaagtctgctgttgtgtgaactttgtttccctgtaactgacatggcatttcccaaaggtttctgagccttggttcatcttttttgaagcttagcttgtctctgttgcttagattggatgcatcctactgttttctatcagagccagtggtcattctgtccttttcatcctgaccaatcctctcttttgaatattttatttttattttccagttctaaaagttttcagtttttttctgccttactgaaaatttatcacagtgctcaagcaaaacattactttttctattaatattttgctctacagcttccttggtcctgtttactaggatcctgagaccttaccatagaccctgtggagactggcaaaaacataaaactcttctcttggtcatgatgattctggctttctctttctataaacttatgagatgttacctgggttgtcaatttgaattcttagcagatctgtctcacttcttggtgatgaagggtttccagggaaagaatgtgtacttggaagagtccttcctcatggccatgcattggccttgaggggctgttgcaatgggttcacagagatgccatgctgttcaccctgagtccttctagactgaagtccctgtgagtattcatccgggtgtgttttctcattgtgggcacctcactatggacctgatgcagggtaaagccaacgtggcatgctttcaccagtggggccttggtctgtgggtcttctggggttgccagttaaactaaatgttccttcactgctgccagtccttgtggacaagggtattatacaggatcctgtcattccatgttggcccacaactgcctcctttgcaggacatttaaatactttcttaaatcatggctgcttaacatgtttgccagacaattctaatagttaggtgttgttatctattgattgacttgttcatttaatttgtgaactttccagttctttgacaatgcattttgatttaaacctggacatcttggtactgtcttatgacaaaaccttctgctttagtcaaatccctttgtagcagggtaggatgctgctcttttactgccaggtgaatttagcagttcaggtgcccatctagtgacaagattcttgttattgctgtgtgaaaagttccgactctcagaatgatcctcactgtcattcaagtggaaatgaccttttgccaatgggcagtgcttttggactctcctgtgggtacactctgatatcactttagtgagaatgagaggataccgtgaccttggacagcacaaccagagaagcagttgctgactggcaggggaaaggcctctccctggtcttttctgacaattctgagatgagagagtgatgttcagaacctcatttacagccatgagaaagtgggactctagtttccatgtggcttttgtttgaatcacttaagagggcactacaagaccttttcatctccagtgtctacttgaagtcagagtggttattgtagaatgggtcgccttgcctaattctttcaatttcctggtcattaggccaaagagaacagactgctcttgggacatgtttgtctgtgtctattggtttcctaggttgtacttgggatgtgttttgcttgtgtctattggtgttctttggctgtttgcatcttcagttcaaggggaaagatgcagctgaaagaaatctcagggaagtcacagcagtgttgtgagttctcttgactggtctacctttccccacctgctggtgtcttcttatgtttgtgttaattgtctgtagaggagagaaaatggaaaaggatcctactccatcttttcagacttggaaattcctaatctggttatgtgcaacaaaggagcacagttatctctagaggtatgatgtcattaagcagcctctggatacagaaagaagagtgagaagggcatttatccttaccataacaaaatttaccttgaagacctctggaagaatcctatgatcatatcttaggaatgactgccctggatcagaaaacgttcatgttgacaatatgaaaaaaattgcacattttttcttactttgagatttgtttttatttatgtgtgtatgcacatgtgtgtgcagatgtctatggaggccagaggagagcatgggatctcctggggctgaaggttataggtaagccattttctgtgtgggctaggaactcagctttggtcctgtggaagagcagcaagtgttcttgaccaatggaccatctctcaagtctctgactatatgtatcattaaaacatttttggttaagtgcctattgttttagttctgagatacggcagtgtagagaaaagagcctggccctcatgaactttaattttttttgattcagttgacttggcaaatgattgaagttgtaagtttctattacccagggccaagtccttgcatccatttctcagtatttatctcagtttggtgtctttgtttatcttaggcaaggcattgcagtcataggtgttgataggaacttggatgactggggaaagtggtgttcaaaagcagtagaatgatgtgatcatgtaggtgtcactgtgcagttgcagactagacagaatggtgtagcaggtcctccctctccttccctcttcactccttctatctttccttcttctgactttctcctccccttccctttcctcttccacttctctgtctttacttctttcctcttttctactttcccattccagtttgaattataaacagaacacttttctaattcttatcttccaacttgtatatattttacataaatacacatagtgcatgcatatctatagaatagattcatatattgattgatatatgtaatgccaagtattagatatgtttgggctcaataaaagatgacaatactggctattacatggagtaagaattgaaatgatttttttttgttttgttttgttttagggtctctctatttagaattgcttgtcttgtaactcactatgtagaccaggctgtcctcagaaatctgtctgcctctgcctcctaagtgctagatctagaatgttttaatgttgtgcgtgtttaactgcctgtgaggtatatatgccacagagccatagatccctatccattctagcgttcatttgaactcactttaacagttcctttgtgcggttctaacatatttgtgatgggctggctttgaaaactttctcgccctatctccacacccagtacctcaatcataattgaactcatagtttactttcttgagatcttaagggcagcctaatgtttgtcaccaaaatatgcggactatagctataatctgaaaaccccttttttctttggcagagaacattgtaaaaggcaaggaaaaataagcttaaaattaaaaactttgctttggttaaaataaactctatgggcatgcatatgactggtgcactaatagcttagggaagtcagagtctcaaaggaaatattattagcttaccttagattctaagtagtagcaacaaaccaatattgttcaaattacagttttgaaagattagcacaatgcagttaataaggcctgaaagtcagtaacaggtaaatgagagctggggtaaaatgattcattcatttgcaaggtaggaaactgattttctatgtctttggttttttgatttttgttttttaaacacctggtgccacttgctgcaaatgaaaaatttaacagttaatgatggaaatcattgtgaggaataagcctgctagtgacatcctttcagtcagtaacatacttccttgttggtcccagagagcaatgaatgaggcattatattacaatggaggctcatggccctaatcaaaggtcactggttgcctcttagtcttcagtttcagatttgtctgtttgatcaggggcagcactgaaattatggtgatgaagactgtactaggctgtgtctgttggaacttgaaagtcttcggagctgggttgctggcagcatgtgaaccctgaagaaagtgcaagctgtgtaatgtcttaaaggaactttctagcagcagcttccttctgtgtcctttgaaagagtcccagtcagtattgaggtgcacgtgagaaggtgttttattgattaaaggagatttttcctctcgcaaacactcatggagatagtgttcctattacttctctctcggtgttggcttttacacagaagttcattaacatgtggatatgtggtgattgaagtcagaccgcttttcacagtggagctgtcttgatataatgagctcctctttaatgttcaaaaattgttgttactttctaaaaggggttgtttgtgaatttcattaaatttaatctcctcttcaaacaatttctgcattgttcagtttactacaattaaaatgctttctgatgctaagaaagccacttacaacagatgtatcacaaatgcaagcactgtgagaaggctttgtttttcactctgacagaaaggctgctatttagctgagaactcttggtgtgaatcaggagaggtacacactgctacaggctcctttgctcataaggttagctttcacaacgccttggctccttcagtccctgcacttatatctgcacaatcacaactgaaatacagggccttgccttctcagttgaccagagtgcagcccttcacccctagaaggttgggaatctggagcttctgctgaggaaagaattcccaagggacgcaggagagagtcctaggagcggagcgaggcttacaagtcctagtggagttgaagacagtcatcttgctgctcagtaggacttgagaggcatgagagcaatccctcatctcttgaagacaaagaggcaggtagtccttctggagagtgttgaacaggagaaagagcaaacattttcatgtgctagaaaacaacttttctagatacagccaggacagttggttgttttgtcagcaatggtaatttataagctttctgtgctgtactccctcacctggggaagtcagctagatgcatcttcttccttcagtttccagggtcattaacttcttccctgagcatctggtgaagtgaaaattattcttgtgttcttgataattagaaaagtgtgtcaaaaaagtatttaagatattgaaattttgaaatagtgctttgagttgttgagggcagagccagcatgtgaaatgtgcaggggtctttagttgatggagctcatcttgtcaccaagccggcctttgttagtcattgtgatgtagctctgtaacaaaagggctgtgaggtctctctgttacctcaagtacaatgatgatactttgatctgaaaagaagcaattcttgtgctacacgagacaggaaagatttccatggctttgtaagacctaactatgataacattaatgatagtgtttataaccaataagtaaggcagttgccaatgtgacaatttggaatcataaagatgaaatttcaggtgagaaattaggatatctgtgttagtcacctaagaaaattatatataagcaaagtgattatagaatgataaggggatggaactttgtttagattaacttctctgtggagattgccagcttcacaatggaatttgttaaggtggaactattgagaatgttctaggggtagtgaatagttgagaaaggattttgatgtgaaatgggtttgctggagatctttcacgaggaatatatttacaggggacaattcaggttataaaataggcagaaaaggttaccaagctaaagtggaaaggaacagggttaagaaatctgtcacacgcagttcatacactgaattgaaaaattcctagtcctgcttggctggtcttcacacttcatgtgggcatacacaaactatgttcatggtactttgacatcttcaataacactttccagtaaataagggaagttgggatggagatttgaaattttatgtaaaagacagatgtgtttacgagttctgatcaaggcactgaatataccaaaagacaagcattacacttggaacgtattcagttgacagtgaaaatggaaactcaaatgcggcagtcaagtcatcgtgtgtaaatataatgaacagccagagagtaaagccagaaaatcttgtgcatctacctataatcatcttggtagtcttagctgagacctttggattatttgttggcacaaaatcaaatttgtgtgtattctatgttttgtcaattaaatttccattattttgaaaataaaaataaagctgctgaacaattaaatgttaccaccaagtatttacaagtaaatttatgattagataaaatgttatctgctgaaagcaaaaccatcttacatggcttcatactgggtactttatttgactggatcattaaatattttaatctacaaagagaaggttgtagagactagtataggtttaaaaatatttgtttttccaggtcaattctctgtgtaatcctctgactatattagaataattcacagacagaagggtttaaagttgtgctttaattacttttgaatattgggatgatagacacagtggagtcaggcatggtcacatatgcctgccatctcggcacttgggaggtggaagcaggaggaccaggagttgaaggccatcctcagctacataatgagtttgaggccagcctgggaagcatgacaccttgtctcgaaacagatagatcacaaaacaaacaagatctagtaattttgttttagtgagagaaaaatgtacaagttgtggaggctgggagagaatggtgagctaccacacaatggcagccttcatttcatcgacagtgttaatttggggacctgcgtatcaatggttttgatttgttttctttcttgctttcaggccataatgaagttttgataattatcataattatctgagtaatattcccagtcattttgacttttgaactgtcactaagagatcggtttctatatgttcagctagtggccttttgttggatgcctgaggtagaagataatagactataaacaagagctgtgatttcttacacatcttcattttgactcaaatgcaggaaagcctttattacataagtaatagagatgcaagacatctagaagttccatgtctgcttctcaatctgcttatctagatcagaatcttgggaagtatgtatattaaacacatctggatgtaaaattactggagtgtcactagatcattggtaaacatgaatattttcataattttacctaagcagtcaaaggtatgtggttaaagaatttctgtttaataatatttctattttaaaaagtgatttaataatctggtagacaaaattctttgacaaaaatttttatgtgcttaaaactttatatgtaataataatgatgtcagtatattttatttgagaagcacatgcttaaattacatatcacacctgagaaaaaatgatttgaaaaagaaataattatagctatcttggtagatgatcagctaattagtggtaatttagattaaatgcacacactgaaagctgtaataagttttcatagcattgtcaagtttttaaggtgcaagttaaaacattcttttctttcagattgttgaattttgctatgtagactatgaattccatttgcttgtttgtttgtttttttgactgtttatttttggttgtgaatttttcaaattgtctcaacagcttgtatgtgatttaaatggcgatatcctccatttgtagacatttctccacgaggcactcataggtgtaatcctgtatatattttaggcaatcagtgaccttattttttgtacaaatcaagtgacattcaatacagatactatggcaagagaaatcaaaatagccacctaattgtaattactccccccccccccccatcattatatcgctgcacgcagaacaactggtttctaaagtgagaactcaactgctgagtttggcaggtacaaagggttcttttcttttctcctctccctctgcatttgtatttccattgcgtgtgaggcttattggaaagttcaaactgacctctctcttgaaagacttcatttgaattctagtagcttacaggaaatgattattttgtgtcttctgaaattgtcaacatttatggtatagtagttagattgttacgggaataagaacagttttaggtaatttgagggaaatcattatcaagggttgggccagataacataattagctgtcacagttagtgggtcttgggtaaaatcaaacatatgcatgtgaacatagggatgacgccttctgaactgttctgtctcaatgcatggcctggggcctggcgtgtggtagacattcagtggtgactgagaagagagctcaatgggagggaggagagcactcaggcctcagttccacgcgtccttttgcagtggttcatctaatcgcgattccccttgatagtaaaacaggagagtcattcttcctcagagctgagcacgaatgtggcagaagtgtgggaaacctcactccaaagggttgtaagcacattgtctgctttactcttttctgtgtgtttactcttactggttagtgttgagaataacaagacaaacgttacatgtagcatcgcaaggaaagcttctatgaaaactatgaacattttaaaaaccgaaaggcatttattagttcattaactgatagtaacatattatttacctcgttgataaggtttcttttgatagtggtaaaggtcctgaataatgaagttcgtaagtcagagatgaaactcatctatcttaatattgtgaattgatttttactttaatgcttttttctgggtacgtgttagtcagatttctgttgtgacagaaataccggaaagacctggcttatgatgaaaggcttggttcacagttttagaaagttcagtctgtagtcacttggcgctattcttttgggtctgtggcaaagcagaacaatcatggtagggaatatgccggaaagcaaagctgctagcttctggcagctgggaaggaagctgagagcaagagtcagtgaccccagcctccaccaaagttttgtcccttgtgacctgacttgtttcagtaggccacctcttaaagtcttcctgactcccagtagcaacacaatctccctgccaagtcctcaacatatggccttcaggggacattttagagccagataatcccaggggcaaatccatgctagatgttactggggtctgtacctctttaaaagtatgatctcagcagagaggggtggatgctgagtagttatgaattgctgttgtgtcaggtagattagtcactaaaagaagagatacaaagaaaatattttgtaacgatgataaattcccaggcttcatgtttagacttcaattttttggtgatactaacatttagtgattattatatttactatgaaatgaagtaattaccattgtatgaaaatagtccatgtactcacacagtattgtttctcagaattaaggattttcattcccattaagataggtattatgcaatgctgttttaattttcctggttctcaaactgtgtcagagacctgtgatatttaccaaatcctgacttacaaatgtcagcccagagaaaggctgtgattacttatggcacaggggtctcattgtaacctttcagatcttcatttatgactttcaggaatattatagaaagcatttagatgcatgtgcatgtacacacataccccaaacctctgtcatgctaagagagctaaacaggggtagcaatgctttgtgaataaatgtttagaaaaagtgttttcatttctggctggctctagatgttgtccggtgtattaatacttagtttatttaacatttcttgtagtgtaggtttaccaatgaagaattatctgttaactttcatcagtgtgaaaaaaaatcttgatttttgcctttgtgttagaaatatacttataaagtcatccacttttttttgtaatggtaatgatgttgtcattatttccattgctctatctgtagtgtgttatatatattaattagctattcttgtggtttgctctaaggcatttcttctccttttttgggcagtagcttgattatgatgtactggtgttctcttcgagtgattccacttgttaactcttcttgtgccttttttgatgtccccagatttgtgaatttatagttttattcacatttgtaaagctttggctagattcttcatttgatatctcctttatcttgggactcccatgtatgttagattgtttgataccctgttaattttcttctttttttccctctgtgttttatcttgaatagtttacattgctacctcatcaagttctattgttaatacaatctggtagacttccattctggatagtatttccttttttgctttacatgttctttttgtaccttccattcttcttttcaacaagtttgtatttttgaacacattggcattttacatatctatgtgccatatttacctgttaaatctgttgtttttcaattctgtgtctgtttctattgacttacttctctcctggccatagcacataattttcttcttccttgtaagcctaagcatgcatgtatatgcataacatataatctgttttaatattttactatccatatcacattagtttattatcaaattacaagtccataattccgcagtggagaagaacaaactctgcattttcattatctttctgtgccattatcctctgtttgactctcagtggtgctgccctcacagtttatctactgtctcctgagtattcttaaaatcagcttatgcttgatcataggcataaatccttctggtggtacagtgctttggcacatgatgggtgggtccattttacgaatctccaaaacaactgttactcttcgttacgtatgcaggcaccattcttctgtacacagctcaagggtaccccagcctggatgtatttgttttctcaggagtctttgcactgcctgcctgtctgtctgaggcttttgtataatttaaatagataatgtccaatttttagatttgaacatacatttctaatcccctttgaagtcttctgataattttcttattatttctcttgggaatgttcctcagtcaccactttcctttatttttctacaatcttcaatactgtttagtgtggtagatttttatactgtttatttctgtattttctggtatccttgctgtgcctggttctttaattacattctcaaacatgtttgtttgtttgtttgtttgtttttgttttttcttaaaatctggatttggagtgaagaatcttccagttaagggctgagaaccaagtgtattgtgtcctgcactgactatccttgaaaagccctcttgtgtgcactagaaatactccctctccctgtcctgttctaatttgaaacgtctctcccctgagacacacacttcttaataattcaatggagaaggcatcttttcaaatggagaggtttcccagttgtggttcaacgcacttttctactgtacaaaacaaaattaattttgtacttttgggaataatatatacaaaaattctattctacttggatcaacttgttcacttttgatatttcattcaaagaagactcagggatgctgagttgggaggacttaactactcagaacaggtgagattcttaaattgcagatatattcagatttaagacatggatgctttgtgcatgagcagcacaagggaccctatcccacaaataatgaaaacaacatctccatttgtttaggtaaaatggccccatcagaccaagagtatagcttcctaaccattcttgtgacctctgcagtgtaggactaccttatcagttccctgcaggagccagcatggacattcttagcccaaacaagatcttaagatgagtcctttttcagtcaacacaatgccacaaattctggaaaagccatctaattggacagaagagaaagacttcacccttcatgggacagcaactgttttccttttacaaattcctttaagtgctataagtgcactgggatccagagggtcaaatggctttagctcagctcatgcaaaccttaggtttctacagtattcatcagcaaatgctgtgctgtctcaaggctggcattgggggaggagctaagtttacctgaatttacttcagacaacttcagattcacttcagagagtgaggtcaggcctacccaaaagtagatgggtagagtgccaagcagggatgcgtcacctggctggtgatcattggtagtagatggctatcacagttttaagtggggccatctaactgacgtttaaaaagagatgaaagaacaggaatggtccaggagattttgtagtctttgggcgaatgaaaagaagcacaaaggtaactaatccatttatcaattggaaattattagaattttgaaaacagtcttttttttctttttgacaaaaagctatgtttagagagagcactatagagcaaaagtggaatggactgccaaatgctaagataggaaaattaaaaatgtcatttttaaaggtatgtttgaattaatggcaaagtgctagaagtcaacatgtgttagagtggaggctctgagcaccagcagggtgccaatggtacaggaaccaatggaactcactggtctggggttttttttttcccagcatttgactaatcaatgcaatcctaggcttaaaatgtatatggaaatcatcatttttttatatttatctaattcttagactacaaccacattcatttgtagatggtgggcttctacacttcctcctgtggatggagagctttgtttgcttacctctgcagacatcctgttaacattatccactagacagtggctgcagtgtgaggcagcagctgactctacaaacacacttcatttgtgtcccgagaacttccaatctcataacagactacaaccttgatagtttaagaggcaggactcccaaagatgcacgaaatacctggtaatattgcactttataccagatttctgattttctgaccaacagctacattttcctcatttataatcattaaagaagtaatttaataagaatgtacaactcaattttgatgatcttcctggtagctcacttctttgaaagtcatacatcagaactttggagacggctcaatgggaaaagctacctttggtgaaacctgatcctcgaattccatgcccaggacccacacaaggaggaagagaaatgactcttgcaagttgtcttgtgacctttacaagagtgctgtgacacccctcatatacacatggataaataagtgaatgtaataaaatgctttaagagccataaatcaaagaattaaatgcgagttataatttcagtatcacaagaggggaaagataatttaaaagtagtgacagttttaattgttttcattatctattataacattcaatttatatgggaaatttatgataaaattatttacatgtgcattatcaacacaatcaaactattttggattagaggatttagaggcaagttctgggtccccatttaacccaatacttcctgccccaccaagatagaaaaactgccaataaaactcgatttttctgggatagagagatggctcaatcaagtaagcacttgctgcatattttgagaacctgtgtttgaatccccagcacataatgtgaaaaattggctatggtagtgcacatctgggcgctcagccctggagaggtgggcacaaggagggccctggggcttgttggccaggcatcttactgtctcagcgagcatcaggtttaaccagagaccttatctcaaaggcagagttgtgggggccactgagatggtcaggagggggaacacttgctgttcaagcctgatgacttgagttcaactccacagttgtcttcccacaccatggcatctacatcctcacactcacacagtaacacattttaaaactcaaggtgctaagtgacacttaatgctgatctgtggtctctctctctcttacacatacacagaagaaagagagagagagacagacagacagagacagagggaaaacaaacttgaaaattcttacaatcaatagctttagcacattcatagattgcaaagttactatactgtaaaagagaaaaggttttgatcttcaaaagcaataagcaatcttgtagttcctctggactagcctgttttgcatacatgatatgaacggtgccatgcaaacactcatcttttgtttctggtttgcttacttttctgcatttctccttagctcatctttgctataccatgaatgagctttaacgtttgtgttctgttgaagtgaatcgtgttctgttgcacagcagtgccttcgttttggttgtctggtaccctgtttaaggaaatgggctgtggctaccttttggttgctatgaagaaagctgtgatgactgctcacataccagcttttcctagcacctgtttttgatttgctggatctggtgattttgtgcttaaccttttgcggaagtgtgaaattgttttccatagtggatgtgttttaagagtcacagaagcaatgcacagatgctgtcgatttctcccatcatgggcactcagtggtcctgtgccatggttctgacttccattttcctacggcatagtgacatttcctaatgcatgcaactcctcatgtgcttcttggctatttgtatattttctttgggaaatgactgcattttcagtaattacaatttaagaaaatatttttagtattgggtagtgaggagttcgtttgtatttgggacattaaatatcctaaacataaataacactatgttttgctaagattttctactttctgtgggttttcttctcaagttaagtagtgttctttgatatataaaaagttccaaaatttaggtggtgagtggctcttatcatttttgcagaaatataacacaagaggactttttattcttgcagagggcctgagttcacttcccagcatctgtgcctagtgtttcacaaatgtccataattctaggaccaagggactgaaggcttctagtttctgtgactgcctgcacacacatacacagatacataattaaaaaatactttaaaaatgttataaaatttgaagaagtttaatatatatatatatatatatatatttagttactagtgttttgggtgttatcttgataattattatttagctgtatatgtacgtctgtctgtttgtatgtgtctgtgcatgtattttatgtgtatatgtgtttgtgtgtatatatatatgtttgtgtctgtatgtgtgtatgtatgatgtgcatgtgcatgttcatgtgacaccacatgcatgtgaaggtcagaaaacaacttagccgtgtctgttctctgtttccacctttatcttagttctaggaattgaattcagatcagccggcttgcatggcaaaagttttactgctgagctctctcaccagcccctttgatgctatatctaagaaataagtgtgaagtccagggttgtaaagacatacccctgggcattcaccaaggactctttacttaatgcataggtttaggactctgctacatcttacaatgacctctcttgcacacggtgtgagtgaggatttacacacatatatccagcttcctttcatattgttgaacagaccactctttcctcactgaatgctttggtgctcattcacctgtgaatgtctgcacttgcttctgagttctttcttctgttccattagttttactcacttttaggccagcactacttgtgattactgtgcgtttctggtgaatttggaagtgttagtgttctagtgcagacccttttcaatatagctttggttattcagggtccttggcaatttcatatgaatttataatcagcctttctacttcttcaggaaaggccatcagatttatacttttttttttaaataacactacaaaataaccatgtcctagccagcagcagaatgtgtaatgttctactgtgcaagttattgcatcttaatgggtggagagatggtatttcaatgataagcttttattgtcagcttctgtttctattaaggataatgaaaacctcatgtctgggcctgtgaacagaactactgtgacctttgatatgacccacctgttgcgccttcacagtcaatgattgtcacctcatgtgaaggtgatctggagagtaacattcctgcaagatggagaataacatttaatatggcgcaggtcttggataaacataaaaaaacaaaacaaatgaaacaaacaaacaaccccgccccaaaccaacacaacttatttaaccaagtattttgagaaacgaaggtaatgacagctgattggctcatagtgcccttctcagggagacttgtgtcttcactcacaagtatgcatactatgctcctgcctggtaagacaaatgactgcctgattcagagttggacaattttttacaactacaaagacttcataaccagttcctggattatactcattttctagtgctgcttttatgggaaattagaattgtttatcatttaggactaaacttggaaattattgatcatccttcaaaagaaaatataagcagatatatcatttgctcttagagcataggctagacctttttactctggagttttgtggaaaatagtttctcagctaaagaatgatgtcagttcttggctggagagaaggcttggcagttaggagcacttgctgctcttgcaaaggacctaggtttgattcccagcactgcatggtggctcaccactctctgttattgcactttcaggggatcctacatctcttaggatttccttggacttctgcacaatttggtgtaaatacagacagtcaagcacatatacacatgcccaaaataagtacttaaaaagaattttatcaattctgcctatatatttaaaaaatgcattacctttagatattttcactagcttaaaatttttctttttcattctacttcatttctaaagagtgtatccattcttagagagatcccagtactgacttcagtgagtcaatgttagtgttttatagtataaccccgccccccaactaagatacttttgaatatacatgtaagatttcatcatcatggaactctgttatagaaacaggaacacatctttgtttgggcttaggtaaagatggttcatcccgagcaccattcagactaacacttctgcagaaacctctctctctctctctctctctctctcattagtgccttgcctgtagctttgtgaaggttttgctcgtaggatgaaaggtcatgatggtgtccaagctccagttgaaggtttctgggtgaatctttgcttatgtctcttgctcttgaaaccattttgccagtgccagtggagcttgtttgtaaaaaggatggtgctcatttgagggccaggagtatagtttattctgggagtggaattcaataaatttcccttccctttccctcccctcccctccactcccttcttttcatccttccctttctctcctctctttttttccctctctgctccatcattctctccttcccttccctcctgacagtttgaattgtccacgaactgtttcttcagatcttacctctcaccccaattctcttttgtctttagacagggtctcatactagtaactcatcttggtcttgaactctcggttgcccagactgttctcacaacatgatacgcctgcatcagtctcctgaggcagaaccatgctcaactcctattttcttagagaagcaagagtgctacagttcagtgccacaccatgctgtgagtggactggcataggattctggccgctgctagaatcaatgcttttatgtgtgagtgcaacatttcaaatgttaagaacttgtggggccaatccatttccacttggggatttctgatgctttacagtctagacagcagcattattttggagctaaaggaggtcatccatttcaaatttattatatacccaggccagaattctaaaagaaatagtccagtttctagttttctagtccagtttgactagaaaagtgatcttatgggattgtgtctttagagcattgagaaaacctaatgtaatctataactttacttctttatgggtcccaagactcttagttttcaaaattattcatagttttgtaatgtagaggcctaggaattcatcctttgagaattttctaggtgtctctatgaggatttctgtatcactgaccaatgtttgcgagcggctggtgaagggtgagtgagagtgtatttctttgaactcatttgcctctgacttattttgttgttgttgttgtttgtttgttttgttttgtttttgagacagggtttctctgtgtagccctggctgtcctggaactcactctgtagaccaggctggcctcaaactcagaaatccgcctgcctctgcctcccaagtgctgggatcaaaggtgtgcaccaccaccgcccggcccctgacttgttttattaggtgtatttagtatcatgttgaaaatatggtatggtagttctgagtgtttctttggatctgcatgtgctcttggtagtatctaataggatactaccatcatatacacacacacacacacatacacacacacacacacacacatatatatatatgactcatgcaatgctgtggctcagacactttattatattgaatataaataaatatgtaggaagaattgtatttgtttttaaagtgacatttgaaacaatttttttgttaccaaatggcaaaatatggttattttagcatatgggtaatttctttgcaatattgacagttttattacctcttatttatccaaacatgtactgtaataagataaaaataaaaaagttagagatgttattgatacatttaagacagaatttcatgttttcaacaaaggcatatatactacgagcatcaaaactcttaattttaaacatctttaatttaggacaaaaaaaaaagtgtaacaaccacttgctgctacagaaaaaggggtggcaaaagagctgtcaataggtggctttccactccgtttttcatgtttgatttattcagaattaaaattttagagtatggtgtgtgtgtgtgtgtgtgtgtacatgcattctcatgtgtgtgcacatgctgaggccaatggctaaggttgggtgtctgcctctactgctcttcacctatacttgagacagggcctttcactgtagctagccttgctagccagcaagccctgcatttttcctattttcacctgctgtgacctctactagtgcaggggtcacagtgctgttgctgttccttgcttctacagggtgttgggtctggatcagggcttcctgctcactcagcactctactcactgaacaatagtcttgccctaaagtatgatttttaaaaatctcaagatgcaaggttaggttttttttcctcccgttagggttaaccctcttcatttgcccttctattgcttctctagtgtacctaattttaggagataaacagtctcagtcactagtgatctgctatctttctcaacctcacagactaaattattcacaaaatattaaagatgttcacttaggtttaaatattatgtttctatcacaagatactggtgttatatactcttgatttatgttgaaaattttgtgttttttcgctgaatgaatataatcagtatggtaagtattatgttttaaaaagatgccaatctgtaattttgtatctaagtattttttgatgatacagggcatcaatattaaatgaaaatttaattcagtgatttcattttattgaaaatatttctatcagaaattcatattctgcttgtattatgctgaacatgatgccgcatgcttttctcttccaagcaatcaccaaaatatccaaaagtttaatttaaatggaagtgttcctccatgaaatgcacagaatgacctgtgaggatgattgcactccagaggtcatagtacttttgcagttcataccttagctctgagtacccagtgtctgagagctctggcatgctgtgcacacaaccaatgtctaggtctgagctattcttctgagcacaggggatcaaattctacagtcaggaacaataggcaagcacacctctctattcttcatttcttctgtctctagggtctttgtagaaaaatgtttctgaagtatcactttaaaaaaaacctagaaaaatatcaaataatttggttgattctgaagctgttaactagaagtcattaaaactgcagtgttcttaaaggctggcatacctccagggtgactgtattagtgagtgttctgttatgataagatatcagagaacatcaacttagggagaaaaatttattttggttcatggttttacaggtctggtggtggtggtgaggcactcacctctccgtggccaggaagcagaaagagctctaggcttttttttttcaatattggagatcaaacctacggtgtcatgtatgcgtgacaaattactctatcccttagctacagtcctgcccttataagtctgttctcatagagcagttttctccaattatgctatttaaaagagattttctttttaagtatagaatagtttattcagggcatggggagggagtcaagagggtagtagaggcagagaaaggcagagagggggagagagtagagaagtagtggctggccatgaacatgtggagagagggaagaggggggaagagcccaggagggcaagcgagaaacaagagagcaaaagaacaagagcatttttaaaaagatatatttatatattttctatgaataagctgaagctgtcttcagacacaccagaagagggcatcagatgtcattacagatggctgtgagccccatatggttgctgggaattgaactcaggatctctgaaagagcagtcagtgctcttaacaactgagccatctctccgaccctaaaggaaattttttttaccatgatatagtaatatattctaagtaggaataagtaatttaatttgcttaattaaagaagtagattactattagacaaaattgcatatggtcaccaggattgagcatttattgcataaaaacatgaacatgggaaggggcttgcaagaggaagcgaagcatgagcagggtgggaagggggtgagatgatagggctgagagcagtcagaatgtattatatacatgtatgaaactctcaaagagcaaatctaattagtgaaacatcattataaaactgaacaaagtcatattattttagagcattggatgtagaacctagtgcagattaaagttgcaggctgtgagtcagatagttaggtttctccctcctcccttcccccttccttcctcctccccgctctccagtcttctcttcctcactccttctcctcccttattccctccttccttcctttttcctcccttctccttcccttctttcttctcctcatcttctctgttttttgacaggctttccatagatagccaggctggccttgaattaaagatcttcctgcatatagctaagtgctcagaatgaaggcactcatcacccttcctcatttccagaattaagaataaatctgtgagttgagtggtgttatgagaataatttttagggggtctattctaagactagtgacttaaaaagttatgcatttatttaaaatgtttctaccgaaggcttattttttaatagaaaatttccatataatatattttgatcatattctttctcttcctccaactacacccagcacttttccccgcttccctacccatccaacttcatcttctctctctctctctctttaaaaataaacctaaaccaaaacaaaaagtaactaaactcacttaaaaagccacaataagatccctaaccaaagaacacaaaaaaatatagagtccattttgtgtggggcctaccctagagtgtggttgatgttgctagcaacagtccactggagaaaactgatttttcctttcctggagggtatcaattgcaaacagcttcttggttgggggaggaatatttttgtgtgcccaccttcccttctcaatgctaggaatttgtatagtttgaatctgtgtaggtcctgtgcatgctgttacagtccctgtgagttcatatgtatgcatttttccttctgtgtctagaagattctgtctccttggccaccacttttgtctcttacagtcttttacctcctcttccacaaagatcccagggccttgagggtagaggtttgatacagacattccatttgggcctgagtgctgcagatgcagtctgtctcccaccatgtgcacattgtccagctgggggtcttttgttaattgctgtttaatgtaggacaaaaaagcttctctgatgacagttgactgaggcacttatctgagtctcaacctagtgtctaaaagttttaaatttgcgttaaatgtaatgtcatttctcactaccctttctcctcccaattccttccatgtcttcttcatctaacctcctgatccccctactgagtctcaaattcatggcctatttattattattattgttatacacacacacatatgagcatgcacacacacgcgcatgcacacacacgcacacacacacacacatgcgcatgcacacacacacacacacacacacacacacacacacacacacacacacgcagatgctacaacccgctgagcttatctagtttatctagtttatctagtttatctagtgctacatttatgttcatgatttcagagcggatcactttgtatgggataaccagctagcagatcatctggggaagactcattcttccctcccttctcaacactcatcagttgcctgtagttctttgtctaggggtttttcccatgcccatgttaggctgactgtacagatacaactccttttctcaggggaacagaagcctaatttaagcttttcaggtggtaaacctcaataaagaatggctaagtgtcacaatgaacttatctttatatacagttgatatatagtaatgataaaaatcctaaaaataagaatggctaatatacaaaattatcaaacacaggtaaatagaaaggaaactaggaataattttcactataggtcaaaagagattttttgttatttgagtttttatagtttgttttttatttaagacagacaacaaaatttaactttggctttttacttagaataagtagaattactttaggagctttgtgttgtgatcccatatcaaaaggaattctgggtattatgaggaaaaataataaaaacaatgtatagcagaatcctgtctttgagcaagaacaaccaacaaaatcagacaggaaagtcaggttttgttactgtgtcttcaggaggaaatagagtcagagcatatctagaagcccggggaggatgaggtgcctccattacacagctccagcctcatgtcatgtttaggaaagtaccacactgagtccaatttgtgctgtgttgtgtgtgtgtgtgtgtgtgtgtgtgtgtgtgtgtgtttgtgtgtcctctgtatcatgcttcacctaccagggactgcacttctgataaaagtgattttccctccccaggaagccatcaacacagctctgcatgagtccttatcccttccatgctggactgttgactggcttcatcttatggagccttgtatagatacccacattttctctgaattcaggagcacatcagccctgtcatgcttgggagactgcttcatctcaatcctccctgacagctgctctcacaatctttcttcttccttttctgtgatggtcctgagccttgtggggtgtgtggtgaggatgttccatttatggctgagcactccatactcttactctctgtgccttcgatcactcacgtttctgcactaactgctgtccactgcacaaagctgctcaggagacttttagtaccttttatgttctattagtctcaacagcctttgtgggcatttggtgtcactcccaccccttacagtttatgcctgtttgtgtccccagtttgtagcactagagctttctatgacttatgctgaagcgctgtaagcaaggcagactgtatgatgcggtggtctctgcttacatttctccaccacagacagtgtctaaagatattagatcacagacaagatggtatgcttgtgtttctctcatcgagctctgctttacctggaatttccttggtacacaaccaggatatttcttcatggactcttcctgactagttctgttgctttgcatacccctactgcattccaccttcctcaaaggatcattgggtctatcttcttattttgagacaactgtattcttagtttgagtgtacagttagtgtcagatcactcaattctccatttttctagtttgaatgcatttggaaaataatctttagtgcattgatcttgtagttttttttaaaaatcattttgttaagtcatttgccattttcattatgttgattgcttttaaggggagtgaatagagaaaaaatgcttttattccatgtgtgctggtcagctttctgttactggagtaaacttataaagactagaggctggctttggtttaggttcttgtccctgatctggactcagtgggatgtggtgctaactcacatggcaggattgtgtggtagagcacactgcttgcttcatcaagtcagagaatgaaggtggaaagggaaaatggctggggtcccacatacctctcagagctgcccccgtgactctaggatctcccacaggcatctccttctaaagatccataaccacttcccagctgcaccaccctggagacccagcttggaacaggtaagcttagtaagcttgactcaagtgccatctttagctagtgtaatggctcctactgtaaaaagatttgtaggctgtgcatagtaggacacattcttaattccagcatttgatagcaagtggcaggcaaatctttgtggtttgaggatagcctggtctacagagttagtttcaaggccctgccttaaaagcaagcaagcaagcaagcaagcaaacaaacaaataaaaatctgacaaaaccaaaacaaccaaaggatttatgaatgtgtttgctacactttccaggtcaaacatttcctagactttattgcctatcatgtattaagccttgctcagtgaactataagtaactattatcattctgaatcttttaaaatgcagtatgttttaatactgtcttacttagccatttaagattcagattaagttggttgcctatgtcacactgtagtgaagctgaaagtagaatccatgtttttctaactccaatggtataagtttttttgccatatggtcccagtttgtataattaaaacttttaaatgaatgctatatgattctatttatcataattagatcttctattgtcaccttttgactcgtttaaatttaataaatgtgttcgttattcatctactcacacatatgagcaatgatagtgctggaggccatgagttgattttaatggtcatatcttgtcttgggagtcacacactgtatcagtacaatttcttcatttggcttatctatgacaagctcattcctgacagtctatttaaagtctgtgttcataggcttgcaccatgctttctgttacccttaaatttgctattttcacttagaatgtttgcttcccaaagccctttttaggcaaatgctggcttccatataacagagcccacctgctgagttagtatttaatactctccaagctcataagtctggatgggggaaccattctagtgtcctgccatcctgcactggggccagcagctccccctcacacattctgaagcccccagctctctgtaaatgacttgcaacaagtactaactttagctttataaaatctagtaccttcctcacagggtggggtccgggtatgatggagactaactggtatgcttaggagacagagacagtacattctactgttatccacagtcatccatttgctatttcatagagacatcttttatccttcttactgacttgggtcttaacaatgtaatttcttggcagaagcttttataagcctgcaggttcccatctagaaacattgcaggactgtcaggctcttctagaagattggaaagcttgtatcaaacctcttcttgctatttcctctgttatgcaaatggcatgtttcaaccatgggatgtataaccctcaaccctaattccagaaggagaagacaacagaatagacctgaacttgacttacaacctggaacacaggaatagaagatgacctgttctcactgatatgtaacacaagctgggaaatgaatacttgttgctgtaagtcacagagtctttgaggttgttatgcaacacaataccaccttgtttaccagttctgaatgtgtcagctttgctgcagtcacaaagcaccccaagctagcttacaagcacaaacatttatttctcagtcctggatctacaggctagctgtggctctgtttgctttgcttggccaaatgtcttcttagtctgtgacctgagttgaaggaacagcttctgttggggctatggtgttcccatagaagacccaggagtaaaagaggcttcatcacacccacacaggtgcacttaaatcttccaaaggtagggctatgccacgtagttttatattctatcgcctggtgatgggtcagggacatctactttgtctactgagaggccatgggagtcctaggcagaggtgggaacagacagttggaagcagtgcaatgtagccacaggagacttttacttgtagaattcttctacctgtagcatttctctttccattccaggatgactgagtaggtatacagtacttaaaaagcttgggagttgtaggtcaaattagattaatttcactcactatagactttttgttttcttttgttagacagggtttctctgtatagccctgtctgtcctagaattcactttgtagaccaggctggcttcgaactcagaaatctgcctgcctctgcctcccgagtgctgtaattaaaggcgtgcgccaccacgcccggccattatagacttttaaactgtttctttcagtgcaggttccagccaaggcttcaatggcaacaagaaagagtgtacagaaaagttaactattagaagggggctggttccaggaaggtgcattctagagagagtcaaaaacttctcaccttggaaacacgttcataatgttgtcacttttccaggactctaaaaggaaatggctagggcagttgcccttttttcctttttcttcttcctcctcttccttcttcttcctcttcctcctcctcctcctcctccttttacttctttggtgttctaggaatttttttttttgagacagggtttttctgtgtagccctggctgtcctggaactcactctgtagaccaggctggcctcgaactcagaaatccacctgcctctgcctcccaagtgctgggattaaaggcatgcaccactattgcctggcttctctaggaatttttatgagccttttaaaagtaactgagatgctggtcagaattcttggagcagacaggtgatatttgtagtctggttgctgggctcagagtgagaagttcctttggcctctagagccatttctcaggattggcatttgtgtcccaggcatgaacatccatctggaaagcctttggtcggttgtatagcctgtaaaagctcctactatagattaatttgtaacttttcatttttattgttaattgtatgggaatacgtgtgtgtgtgtgtgaactggggtacatgtgtgccacagacctttgtggcagtcacaggataacttttatgagttagttctctctattactgtgagttccaaggattaaatgcaggttgttgggcttatacaataagagctttatttgtgggggagggagagctggggataaccactagaaagtttcagatgccagggacataagaggttaccaggacccaacagggaggactttagcagaaatgctcccaaaaggggagatagaacctgtagacaccatatccagtggataggcatggccctcagttgaagaatggggccactcacccacctcaaaaatattaatccagaattcctcctgttaaaaggaaaagcagggacaaagagtggggcagaaactgaaggaaaggtcatccagagactgccccacctagagacacatcttgtctgctaataccaaacccagacactattgctgatgtcaagaagtgcttgcagataggagctcggtatagctgaccaatacagatacggatgtacacagccaaaaattggattaatcacagggaccccaacggggaagttaaggcaagaactgcaggagctgaaggggtttgcaacctcataggaagaacaatatcaaccaacaagatcctctaaagctcccagggagtaaaccaccaaccaaagagtacacagggggcatccatagctctggctggatatgtagcggaggattgccttatctggcatcattgggagggggtacacttggtcctgtagcggtttgatgacccaggatagagggacactagggtgctgaggcaggagtgggtgggtgagtgggggagcaccctcataaaggcagggggaaggaggaggggccaggggtcttgtacaggggaaactgggaagggggattacatttgaaatgtaaataaataaaataatcaataaaaaagaaaaaagaaaagaactttacttgctaaaccatcttgccagccccacccctcctacatttgtatctgtaatgtggctcagagtacatcaaaaggtggctggagggaaaatttggtagaaataagaacctctttcaatgctatatagaaattcattctgagtccttaattccttttctgatttttgtatatctatttcttcttacccaaaatatatgtggatcttattttaagtaaatttgttataggaagaagaaatgttgattttcaggtaaaccagtacttttttttatatgttatttttattttttgtttgcatgtctgtgtaccatgtgtatgtagtgcctggtacatatagaggccagaagagggtttgagatcccctggaactggggttgcagatagttgtgagtcactatgtaggtgctggaaattaaacccaggctctcaggaagaacaaccagtattcttaagcactgcaccatatctccagaccaaagcagtacttttaaaatttaatatcacaccatgaaatttgggaaaggagttttcttccagattagcttattgcatagcacctggaagacatggttagtaatatgctggatttttatcttagctgctgaaaacaaaggttcatttaactaatttctctcctgtgatctccgttttcccagaacctagcaagtgactgaagacactgccagctctgcctttcttattgggaaaagtgctgtcacagacattttgttagtggtccaaatataaaggggaaattgaatgagatgtgaataaaatatattttagatagtgaccatattttttttgtctagcctttaaggataatttttttatattcaagagtcagattctggaagtagagttttttgaaaaggcagacacacttgctttgctgtgaaccactgttgctgaaggtattgccctgtttgtgatgaatacacatattgcttctataatgtgtttgctttgtaaaagttgcgaattgacatggatatgttgtatataaggtgtagcatgccagtagcaaatacttgtatttttccagaagttttgtttgtataacttgcttcatatttaaatcccacagaatgttactgagttcctggtaattagagcacttgtgtagactttgctggggaaataaatgaacaggacaagcctctccatgagaagacagtctattgaaaaagatgaaagatgttagatacagagcaaactcgcatatcaagaagagacatacaggccatgttctcattacttaaggcatgagggatgcattctagtctgaagactttgtaactgtcaagagaacttgtcaggggacattaactatggtggtacaatagctaaagttgccaccaagcctgacaacctaacttccatttgtggaaccagctcctgcaagctgtcctttgaccatcaccagcacatgctagtgtgtttgtgcatgcacatgcacacacacgtacacatgcatgcacataggtgtatacatggtaaaaagagaagaaagagaacttgatggaggaggtaggtttgcatgtgacatctggaggtggagaggactccatctcagtggctaagcctaatgaaaggaatgtacaacttattctgaggccagagttgtaaaaattttgaatttagtaaagattgtagggttatgatgaggaattcgggggaaccatgccaatgttgagcctaatagtgacatgcttacctctgagtttaagaaaaatccctggaagattgtggatggagtaagcagtcatctgtgaagaagaaaagttgacgtttcaggtatcaggttagatagaaattaaggtgagaggccagaaggggttactcgggctggtgaaagggaaaggtagagggttaataacctgagaagcagtttgcaaattaccagtgacaacacacattcttactaggaaaagagataattacagactatttttgttcctggtgaccagttatttagtcaggatcattttatttgttaaatttatcatttattattttttggtacttagggtttatcttggggccggggccacacaggcaggcacttaactgctgagctccacatgtagccctcaggaacagttttcatggccaggtttaaatatccagttccaatagcagctgtttcttttggtcattatcagtggccaggtatgtggtgcagcctctgagtttaagtcataccgttggaggtgtgtctgtctgtgtcctgagagcagcatgcctgtggccccgcagcccacgtgagaatgagtgtgaaggtctgtgctgcaggatgttaaatgtttccagtgtagaactgcctatattcaaattattgtcatcctgtcttcctaagtcatttgcaacactcctgctccaacaaatctcatttttaaaaatatggtgtataaattcgggtagtctgggaaacagtaagttacctgcacgattagcttttagcagagaggaaaaagcatcctctttggaccactataaatcaagttactctgtgtgtaccgaagtcttccttggtctaattacatagataagcccagataaccagtctattgtattgaagtcatccaagaacacaagagcagaaaaatactgtgcttcttggcattaaagaaaaaataccaaatatttttattgatatttcatagttatatatttcaacgaaaatttgtttttttttttcatttaaaaaaatctcgtttgccaggaagaatatatgaaattatcaaatttgggtcttctctttttttattggctgctaaggctgcattgaatgtgatgttttactggggcttttgggatcacagctgtggatactgcctagcctcctctatgttctgcctttgacatcatttgctggcacttgtaggtttcttattctttttatattactttgcaaagatctttctccccacttcttcccagcatcctctcttgaatgtctctaggcgttccacagagtggtgattagtctctggtttttaaaattgtgtttttgtttttatctccctcccgtctttagtacctatttcccctacaagctcttgtaaattttcctgattacgcttggtctgggaacagtactatcagacacagtcagcatacccagactgtgcagccgcaccagcgttactgagtctcacttcctaagctggcagggtagtgcttccaggacttcatcctttggtgcagtcggtctctcccctcctctcggggtgtctgtcacagtgtgtgtgctttgctaggcttgctgtcctgataccacgcgattgttgctctgcgtgtggattctctgctttgcttgggaagtaggttttcagactttagtcactttctctacttataaacagtactttggtttccttgtattttatatgtttggaattgagcagggaaagatttcatatcagaagtcaatttttacttggtttgtgatgtccttagtctgccaggaattttttaaaacaattttggggcaggggttctctgtgtagctgtggctattccggaactcattctgtagacaagacctcaaatgaagagatccacctggctctgtaattaaagacacgtgccactactgcctgatgcatgtcagtggttttattacagtaattctttcccaaaagagattacccagtttaggtatttatgtgctagtaaccttttagctctttgtaaaacacaatatagataaactataaaaccattaatttaatatcatccctttatttcctttcttctctttgtgtgtgtgacgaaatttcactgtgccctgtcattcaggccagcctggaactcacagagacctgcctgcctctgcctcctgagtgctgcagttaagttctgcctcctgagtgctgcagttaagtatgcaccataactggctcatctcattcttaagtcgttgttgctaatacactatgtttgcttcttttcaaactctgcagactgcacattgtcaccctagtttcctgtttcacattcattataacacagtttcttatcatagtaactgctgaaaatccagtcttgcaaagaggagtcgtagtcatgaacacagagtgatgtaatactgactctgaagcaatccatttgtaactggctgctgatcaaaagatgttgtgtactgctgtttttcttgcggagttaaaatatcatattgcagagagatgtgaattctctatcatgagtggctgtatttgcttgctttgatacttggtttgcaagctactgctttatgcacatctcgtacctaccatgacaacatgctttcctggcacacgtcatttagaagatgatggttttgttgtccttaggcaagcatttggttcacagaagttgggacaaaaaaagaccacatgtgcaatctgcagttctgaaaatgagacattttgcagtatgatgctttgctgagttccgatttcccttgcttgctttccccctgaatgtattctgacgatggtgagacactcataataggtttttcagaggcacagttcagaaccttaatcttctcccttttgtctttaatgtaaggaactcattttagacagctgttctgagaaaaacagagtgatggagaagccatggttgtctgggaaggttattttggaacctggttaagttcctgtgtttttaggttttagtagcttagtctttctcccttaaggtagctctttcaggtggaggccatcagatgtcccttcccaagcttggctgagtcaccttttactggttcacctctatagtgcactgactacaccaggaattcagtgggtgaatgtctggacaacatctgctctgtggccactgtcctcatgggtcacactatctgcagagttcacctgtaacaataacaattctataagaacagctaaccctggccatataaggtctctgttggagaaagatttatacagtgcaattctgttttgagttggcaagaatttttcttgcttaaaaaattggtttaagcctccctagagtgttaagtgctaagtcaatattttgctaattatgcagaaggagcaccagatggcctgtgagggcgacactctatgggtgggaacccacttcgtggttctgtagccaccaccctccatagcaacacatccatatgctgctgccatttggggatgacagccagcagcatggtatttaaaagcaaagatgctcctagcccagagaaagctcagggtgctttgtaaataacccgcagccctttcttcctactctgcttcctttttttctggacaacggtcctggatttttagcttgctttttattcagtgaagattcccactaagataaaaacccaggagtttccttatttttttcctgcagtcagtctgcaagaggattgttcactgtttttcactgctacctgctcttctgatcactttccctattttaaaaaataggggataaaaaaatcagttctctactggttgtctctgtaatggactctatttgcagcagacttcaagacaccaccagcacaccacaagagctgccacacacataagtttagatatttcagatatttcatcgaaagcaaaagctaggatgttaataatcacattttaccacagaacatggctggttaaaaatgtactttgattatataatatttctacttataaaattgtgctaactaaattgaactttgtggcttaatcaaatgcttattgaaggctgtatactaaggttctttataaaaggaaagacaggaaacaactttctcagtagttcctagtgaagggagctagaaggagaggacataagcgaagaacagtgacacacgagtcacagtgaaactcagcattttcaatactgaaaaattaattaatcaaacagtagagagtctgacatgaggtagaacagaaaaaattcaggaacttactatcactgtaggccaaaacttggtcactcagtatctgtgaaaataaaaaaaaaaatcaagataaaaccattgatgctggcttggtcagaaacatagcttttatgtagattgtcacaagcaagtaaataactggagcccttgtaggctaactgttaacccaggagtctctagtctatgaagattggaaggtgttgcaccaccacccatctgctgctgaagtcccagcttcagaatttcagaggggcagtgttcatctcttccaagtgtaattcactcctgttctgatgggactccgattgacgactcgcacatcatttatgactgtatacaactgaggcctgtagatgactgtagcttcaaagacagatatgagatcaactgaaatgagatactcttagatccatgacaaagtcaggctccagagtgctcatggaacgtggccaaagttataatagccacagcactgctacattcattgagtctcaagaaagggagtgaagctgaagatatctgattcaacctaccttatagcaactgttttacttctgcataaattatgaaacctcatcacatccccaaggtatgaatgccagaaaaatgggcaaaatcaactgaaagaaagaatcatttattgctcaagtatgcctaggtgaagagaaatggaatctattaataatctcatactgggtgtgtatgctctgtgggcctgtttgggcccaggcacagcttgttctccttctgtgtatgtgagtttgtgatgtttactctggtgctcattagcacaaggctaaaaagtctctaatctttgctctctttaacagcatttagtactgtatttttaaaaagatatgctatcttaaagacactcccattatagtgagaccatcctgccaggaccatggttctcctaactttgtttttaggctttgtcaattgtgttccctccagggcatctcagagatgttgctgcctaatatgccaattgtgcctaggttagtgtgtgttaaaaataaggcttggctgagcaaacttccaagagttagattttattatatgtcaaggtctgtgaggaattctatgaaattaaattcccaaataaacttacttatttgaaaagttcatacatatatagtaaaaatttataaagctacaaaaggtatatggtttaaaagtagatcagtgatttccttcaagcccctcaggtcctaagtccccttccccaaagccatggctgtcactgttttcttgtcaacctaccagagaatgtcctgtagagtgtctgcatccccttagtataaacatccctgtgtcaaacctattttttgtttgttgtttttgaagatttcacaatgtcttcagaatgcttttgtatcagaaatataattttctcattcttttacatgttacaatatgttcaaatatatgtgtatactagaactaatttaactcctattaatggatgcttactggttctagtatattggtactaacaatattgtagtgaatatccctgtataatgtgtgattatgcacaaatgatgtctgagatatttcttgatgttgaattgtgggctaaaggttatataaaaattgttatctatctatctatctatctatctatctatctatctatctatctatctatctatctatctggagcattatatgaccagggctggccttgaactcactatgtagctgaggttggccttaatctctttacccttgtgcctcaactttccaagtgtgggcttcagtatgcatcactatgcctggcccacaattgaaattttaaatgaatgtaatcatttttttttcatagctggcctgtcagtttctaatactaacattactgttttgtgtacctctctctatatgtaatatattttatagtacaaatgttaaaaactgcctgacctctaaatataagacaaacaacctaattgaaaataaaaatataaacccaaacaatgagttctgttttcatttgtggtaaatggtatgaagagacaggcattgacagtaatgtttttgagccaagtctcatgtattgcaggctgttgcaggcccgctttgactattggccctttttctctatctctcaagaccccggaattcaggagcatgttaccacacttggctttaaaaaaatgccttttctcctggggcgaatgtctatagctgctgcctaggttaacaggcccagtgtttccagcaccgtagaagccccacccccatccaaagataaagcccacactgcttttcttttgaggtaatagagtcttttagtttctttgtggtctcatctcagaacgggcttgcctaaacaagacagttttgctttgcttattttctgtactcgaatataaatagaattgtagatttactgtctcttttctgtccagatcctttcaatccacactgtaagattcattctggttcttctctgtgatgacgataataatatgctttttcataattgcatagtatttcattgagtactactgaccagagtttacccagttttctgttggcaaatgtttccagtttggggctcatatgaacagctctgtgagaggctctctctcccatgtgcacagacgggatgcacctttgctggggaagtctgtggagtggctgagctgtgttttctccttagacacaagtccttccttactcctgctgatggcacacagggctcctgtggtcagcttctgtcccctttgttgctgttattagttgtggctgcagcattctgggaccatggtggaacatcttctaatggttttaacttgtagttctctaagtatgactacattttagtaccttttaaaagtactccatttagactcctttgtgacttctacttttgtttaaaccacttatgttttattccgtcatttgcctcaccttactgacttgtgggatcccctagtgtgctccagaggaaagctagttcttgttggttgtttcccaacagccatggagactgtgatgacagcaggggcaggtggccttcaggtggtcaccttgagaggcagagtgcaggagtgttggctgggaggctgggaagatggaagagctccagctgggtcactggtgccttcctgaaggaaaagcctagaacacttgctttgtagtgactgagatttcccttcaggggcatttatacccctggctgctgcagagccagtgctgggataacaatccagtcacctttggagaaggtcctgaaaagggagacaagtgtccagccaggtgataggaaacatgctgagagctcatggcccccactgcactctgctcaggaaccctgataactggatacccgtcattcatttccctagaaaaatgcagcattttgaataattttacggggagagtacaatcttgaaacacttccacgaaatacctgaaatgcactgtattttcatttaagactctgggctactgtcccactttgaaagtttagacgcacagagcattggaatggaattgggagtgtgagggttaggtcaggtcttattgcagttttacaaaaagatgtccagtgggacccctgcctttcctcattgcttaatggtgcccacaatgctaagcaacagtgcagccctgacaggagtctctgctgcctgtcttcctgtgggtgggtctttactccctaagtctggctgccttgcctagcaagcctgtgcatgcactctctgtctgtctgtctgtctctgagtgtgtgtgtgtgtgtgtgtgtgtgtgcactcaacttaagaactatacatatacatgcttagactattgaaactaattggcattgcattgaaactataagttagtttggggagatggactcttataggattttgaatcttccaatccacaatacagtattggtcccattgccagccttcagacttgttctcaaaaattttacagttgattacatggaagttttgaatgtctttcactatacattttacttaggtgtttgatgtctgtattggtgtttatataatgtaattttgaaatagtttcataaatattgtttgggattatgcatagaaatgtacattttttggtacagtgctctggcacaaacaaacttgctagatttacatgtaacccttcctctgtgggcttttctattttatatgttacgttctcactgctgtgatggggttcctggcaggagcagggttgagggaaggtctgctttggtttgagggcataatgcactctgtgggaagccatggcagtgggactgtgagggactgtgcctttatgttggcagtcaggaagagagatagggaaatgctgctatgcagcgcatttgttccttttgattcaccttagctcatcggatggtgctatcagcattcagggtggatttgtccccctcacccaaaccagtctgggaacttgctcccagacaccagaggcgtgtcctctaggagctggaaatcctgtcaagttgactggcaggattaactgcccgtgtacagccatctgcatacagtgctggtctggtgtcttctgtccagggattgcattatctgttgatgcttctgtcagtccctgaactttacatttatcttgtcttgtcttgctgtattgttcactgccatactgagaacagaagaggtgacagtgattattcttctcacacttgctatcttgaaggaaatgctttcagtatttccaatagtttagccattgaaataaatggtgtggtggccattgttaagttgggtgcaccactctaaatcagtcagttggttcaaatttgttgataatactggctaggtcttttttttttatttaattttatttagtcattatactttttgttttgatttgttttgttttttgagatagggacacaggatttctctgtgcagctctggctctcccagaactcactttgtagaccaggctgtcctcaactcagagatccacctgcctctgcctcctagtcctgtgattaatggtgtgtgccaccactgcctggcttagtccctgtattttaagagctatcgatagaagtatttaatgtataaaattatctgggcatatagattaaattttaattgtgtgtgtgtgtgtgtgaatggatttgtgtacatacgggtacatgaacatcatagtgtacacatggagatcagaggacaatttgtaggactctgttctctctttctacctggactagggattgagtgaaggtcacttgcctatgtggtgaatgtccttatctattgagccatctcaacagagtcccctgttttaattaaaaaacttaagagaagttttgaaaaatcttcactctgcttatgagtttgtttatttttctttatatttctactaaatttaactaaatatttttgttctatgagttcaagttcatacaaacagccatgctctgttctgttggtaaattgcttttttactgatactgtcatgattattactagtccttttctctaatggttttctactttcagcctcccttgtctgatgttattagtgttttcttttgactagtatgtgtgtgctactttgaaaagtcatttacttttgcattagaaatgccttttgtaagttacacagaatgacatattttttattgtagtgcttactttctgggtatcttgggctccacactccagctcgctgagctctgtgctcaaatggttttatgtgtcttctcattagctgcttgtctgaaacactgttcacgcacctcattgtgtcctgtttgcctccctgtaaggaggtaaactcagtgacaggagacttctgcctgacttgtttatgatcaaataagtgggtaagcatttaaaaactgtgtcaaaattatcaacagtttctttaaatttctttctttaactatctgttttgatatttccacagacattaatgcacagaaagatccttaggcataaaatctgttcagtctgaactttcctgaattcatatgatcaggggacagctctgagttccctcgtatgttaggaaaccagtgttgcataggacccggtctggggaagccctggcctaaatggtattattaaggtattgcgagggtgtcacggcttagcctgtggagtccagtgagttgggaagcagaaaagccaattctgctcccctatttatgtaatcatttttttttgaatacagtcagccctttcctttacagagcctccatggctactcatgggtctccagggaaggttggctgtatgtgatgggatctctgtgagtcatagaattgcccttgcttactgactggaatcttatagaaagaaagtttggtcacaataagtgccaaaaatttgttaaaacctcactattttgtaggttattttatggtagatgatcttatttaatagccttaaaactcttactgatgtagattatttttatattacagagaatgctaaggagaatgataccagtttaaagagcttcaacattgtgaagtgaacttaaatatttgaacataacagtgacagttgctaccacttgtctagttctgttctatgctagaaactatactgatgtctctccttctacataatctcagtgccaactacataagacagggctatgttgtgccactcacagatgaggaagcaaagttactcacgaaggaaaaagtaggcaaacctgtccattctgcgtctttgaggaacattgctgatctgagagaagttcagtaattctgttcatgaagccaaaacttccctggacacaagagaggcagtgcagcatgcacatttctgttgtggctgtccagggctccagatgaaagctataacaagcattcagggctgtttctagaggctgggcttttgaatataggaaatagaactcatattactagttaaagagatgtactacatgttaatatagtctagaaaaaagtcctgaatgctggcagaattgtgaactttgcaaatgtaaactccataaagagctccatacttttgaatggctttatttagcaacatgaaaatttaaaaaaaaactacaaaactagaaagagaagagtaaactttacccctttccaagccagcagagccttagctaacagctcaatagtttttagtctcttctttaagcataggattgatttttaaaattattttattcttctctcatttaatgtatcctaactgggattccctccctcttatcctcctaccccctccccaccaccttacctctcaggcaattccactcctccttcatttctcttcagaaaagagcagacctcctagggatatcagggaaacatggtgtaagaagttaaaataagaggagatacatactctcatgtcaagtctgggtgaggcaatccattaggaggaaaggttccccaaaccaggcaaaagagtcagaaactgaccccattcccattgttaggagtcccataagaactacagaaaaataaagctacagaacatatatgtagaggatgcataccggctccctgattgtaagcctttgtgagcctctatgaaccctagttggtttgggccacgttcttgtggtttccttgactcccctggcccctacaatactttctcctgatcttctgcttggctccatgaactctacttaacgtttggctgtgggtttgtgcatatgcttctgtcagttgctggatggagactctctgatgacagtcatgctaggctctggtctactagtatagcagaatattattagaaataattccattgctttttttgtttttcagttgtgtttggttctatcctaggtctcagggctaaccaggctctggtccctggccatccaggtattgtcaggtgtgggtctcaagttggactagtcattggttggtcattcccacaagttctatgccacctttacctcagcacatattgcaggcaggacaaattttaggttgaaggttttatggctgggttggtgtcacagtcataccactgtaagccttgcctggctatagaagatggctggttcaggctctgtatccctcatttctaagcttctttgctagagtcactctcttagattccagggaatttccataggattgattttttttaaagtcatgcaaatataatctgtatctctacttttgctgtgttctgatactagtatattgtgttatcacctagggttctaaataaaaattttaataactacaaaactacataattttatgcatggtgagtagactaagtttacttaaaatgtgatgactttgggatacaggtagcttcatattcctcttgttgctggttcatctctttttcttctgcattttaaatcagagtaatcgtgctcatgtcaaaacagactttctggaaacatggttttcaaatttccttcaacctttttataaaggcttaatcatttataatgtaagtagataaatgtataatgtaggtgtctcacatatttatatacatacataagcattgaatttacttaataaggtaaatttattcgtttcatagcactatttcaacctatcatttatcatttccagtgtcattttggagcttataatttgttctaaaaataactgtgcttgagtcttaatttaatctttacccaatttttaatttatttaaaaataaaaatggcctttttttcttctgagcctatgagaaatgagtacctatgcatgtacataatttgggcaacctgggaagagatagaagaagagcagcagcagttacttatgctcccacacttaccaaacctccccctgaatctccctttcatttatgcatgcattccatactcagggttagttccctgtgcatcattcttttattaatgtgcacttgtgcacacatgatagtttgtttttgtgtttatggaacatgttatgactttgcttcttcaacctcctttctttagatatctatggctttcttccttgacataagtatatataaggtctgcaccatactctgttctgaggtttgctcttactcatgtctcgccagacctttgctggctcccagacattttctgtcaggagcattatacatgcctctttaccttctactccagtactttacttaggaaagagacaaacgagagttttgtaacaaaggtcatccatcgccatttaaaatgtattttactcaggatcttttactttttacatcttcccatatgcatatttttgtcatcaatgctatgtacagtgaatgctatgtacagtggatgctatgcacagtgaatgctatgtgtagtcagccatcttccagaaggcacgacttttctcaccagtcaacaggagcatccagtcgtccttatgctcatgaatgtcacattttgaacattaatgtgatgttggacactttgtaaagcttccttacttttctcttttgtcatttgtaagtacttacatcagtaacatatattttttttcattttaaatgacttttggagcttttattgttcctctttgtcacactgttccaaacatacttattaaagattttatggtttgttccttcattgtagttatacagaaattaaaaactaaagttataatttgtattaatattcatttgaccatttttattttaatatcatgtttataaagatcactaagatactaatagtcacctagattttctgatagattactcatggttctcctttttacattacaaaaaagccacttaaaatttattttaattgacatgtgagataggaattcaatattgttgttttttcccttaaatgactacatttctcaggaccagttattgaatagtgtcagtatgctaaattcttctacagagtcatcttttaaaagatattcttgttcattggtccgttggtggatttctgcactggaacaccttcttcacttgtacttcagtgatatttgtactagaggttttaaacccaaggctcatgtgtttcattatgttcttgggaagatattaaacttcatttgtaaaaaatcacctaggatttaagtcatttattggagcacaattataatatccttgaccaaagcataattttctttagtttctttaagttttcatgtaatgtacataatatatatgttttaagatttttattctagtttttttgtttgtttgtttgtgtttaagaatgaccaggggatggagatctagttcagtggtagagtgcttgtttggcatgtatcaggttctgggtttatcccacagttactctgaaatggaagtccacgaaagggcttggatgggctgatatgtgtgcttgatatagtgtctgcctttgaagaattatgggagctgaaaagcaaggttggggtcagcagacacaggtggcagcatttagaatctcttaaaaggagttcttggcataagaaccaataggctttgaaggggctggctggggtctcagatgctaagctgctccatttatggcacaggaagagatcatgaggtttgaaatgagacttggttgagcttcagtgctgactgtggaacctgctgagaaattgatattttgtctcgcagatatctcaggtttcttatgtatacagtggaatagccatcccttcttacagatgattgtggaaattcgcttgaaaattggacatcagctgtattgtgtatgagtgatagaatttgctttgtagtatttatcttcctttctttataaaacatatttgtttatctatcatacgtgctatctctctctctctctctgtttagtttagaggacactttgtggtagtcagttatctctttccactgtgtggattccaaggactgaacttgggtctacaggcttaaagcaatagcctttactcactgatccatcttgctagtcctagttgtcttcgtttcttaccatctgttccacaaaattcacagaatgagggggatgacattagattcagggctgggatgttggagggcttagttatctccatcctttcaagtaaaaacgaggagtttttgtcccatttttggcctgagcatagtaacatcagaaatatgattatgtacacacacacacacacacacacacacacacacacatgtaggggcacatgtgcacacacatatgcacagatatgctacttactgtttcatcaaatcttgttttgagagggagtcagcaagagaatgtgaaataagaaaaacttttggacagaaaaaaaattgatagttgtttggggatggaaatggagatgggtaggcgttagcactgaatgtgtttaacctcaagctcttccagcttccatttgaactaagcacagaagtaaagaactgaaacttgttgctgaccaccccactttacagatgaagcacaggaggcattctttccccccttggaatggatatagcctagtaattgcaaactcaggcttagcatgcaagctctgccacccgtctgttgccaaaccttctttgagctatgtgtttgttcccttgaccatagtttccacctcagaggtagggaaattcttctgagatgccaggacagatttcatctgtacttcactgtgagacccttgagatgttctgaaaatataaatagatctcttcatgctgcttgttgctgtttttgagagtgggtaaagacctgtttaggttggggaggactcactcagtgttcagctgatctttccgttgggtctgcacattgctgccctgacagcctcaatgggagcctcagctctggggtcctgttatccttaagtcactcttttaaaaaaagtattggctaagggactgaggaagtggctccgtaggtaaagtgattgctgagcaagtacgaggacctgagttcagctccttagcaccgatgtgaaaaagaggcatgtcaccacatacagatctcagatctgggaggcagaagcatgtctacactgattagccatttctagactaaccattgagcttcatgttcaatgagaggccctgtttgaaattacaaggtagaaaacaagagagaaagatatccacctttgacttctgatccctgcatagatgcttaggcacatacaagtaggtggctataccagccatcatctcttctgtataatatgtgacttggacacattttagctaagtttcaggataagggcagagaaaaaaatgtatgtgaatactgtgccctaggcaggagtcaggttctcatctccaactgtcacaaaagctgggagaggaccccaatattctcattctagaatatacattctttatcacagaacacgaggccatgcagtttccattctgctttctttactggatgtttctacactgctgaggcaacttcttcatctgttgagcaccttgacatcaccagttcaactcgggttacttgtgcttctccaggccttagcatggtgcccagcagagaaagcattcacagcccaaggcgtaactatgatacactcaggaaatttggtttttaattacccaagttaccaaatccttatttttttaaatgatctctcctcttttaaatttctgccatgaatttagaaatacttacaacatacaaagtgctacatcgtgctgcacagcaagttcagcgcacactggccctctgcactcatgtaagttgttctggttggtgtccagttgataatgcagctgttatttttataaccatcctaagtacatatttgcacaacaggcggtgtcaactcatcttggtgttatttgcctgatactttcaattaccaagctccattacccaagtcattatttgtggttaagagggagtggttctgagagcggcaacaagaagtttcttaaaatgaggatcaaattgacccttttaagatgtctttaaatatatcttggcttaactggcttggtgcacagagcagcccggcttacttgcttttaccagtgtgttgtttagaaaacagtaagctgaatgaaacttgtctgggcttcttagtatctggtatttgcttacaaaattttattacattattgctattttcagtgttctgcctctccgttcttaccagtgagtataattcaggaggggggaagctgactagaggaagcaattctctccaccgacctgagacctttagctgcagtttttatcagaagaggacgaatccagacctcaattgctggtgctctgaaattgagctttatcattatgaattctctgagatgccagtccatgctacacacccatgggctctcaaaaatgcttaccaaattcctgtatctttatctcatattcaaaagaagaaaacagctcatccagtaataactacattttaatctttaagtaaaccccaggtctagtttcaaatcctaatttacactgaaggaaatacttcatagcttaaaaaaactttcttgttgaaacaattttcaataagataaaacattttacaatttttacaagtaataaaactttaaaaatttactaaattttttgtaatgattttactcctgtgcttttcagcccagtaggtcttgaattttaccagggagaaaatacctgggaaaactgcataagaatagattcctgggccagccatgcttcagggttatgcagttggtatgtctgggtgggcctaatgttaaaaacaaatgctaagaagcaccctagttgttgttttacaaattccactcacttaagacctcctttgctgcctgttgtttttaagtgatgcacatctgttcaaaaccacataggcagcgaggagataagaaaaggctggtaactataaataaacaaggaggatgaggatgtagctcagtggtagagtgcttgcctagcaagcacaaagtaatgagttctatctcagctcaaaaccaaagcaaaatgaaacagatggaaagtccgtcataacgggtggtccagacgtgcatttgctatggaaggtgaagggactgaaggcaacagtgtacatgtttattgaatgaagaaattacagaatataccctagtgttctttttaagccattaacaatgcttggttctcctccagtggccattatttataaagcatgtgggatttttctgtagtcagtgcaaaagctttagggaccaatctagaatcactatgtgattctagaaacagttcttgaaagcttatggtctgtagtttgatcttggttcatagtgataagctgcctttgtgaaaaagcctttatgaagacatattcttttcttctaaacaatctatttttttcccggtgagtactgtttttgtgcctactatttttgtccacaataacttaaattgttacttcaggagaacaatacagtgttggtggttgtggaaacatgtcacacttcggcaatcctagctcatatttacgatttagtcccacaacctggcagaggcctacattgtgcaacatcagttccttctgtcccaagaaagatcaccaattcagttagactagctggccatgagccttcaggatctgcttgtctttctcccatatgctgcactgggagtgctggtatgagacactgtggtagcttttacctgagttctaggatctgaattcaggtccacaaagccatcccctgactttcaacttctaatgtggcataagagttcttttgatacctctgtaacaggcattcagcttagactggacaccttttattttgtgagcaaattattctatttttaaaaacattcgtttttgacttaactataaatgaccattttgtgatatctacacaaaagcattattcttttggcaagagaaaagttacctcttaattagtacttaccatatcatatttgctgtgctaaaattttttccttctttttgtcttgaaaatattaaaccagttagtttccttagcagcagagtggagttttagagtatgtcagtggttatcaaaaagtggccttcatagtaggaaccctcaagggcctttgtctctgaagtcaaaaccacttttatcctaatgcacagctctgttttcctaatcactatacctacagttgcatggaagtggtacctgaatgtagcctggtgacctcacatcttttactagaagtgatcttaggtgccttggagaaacaataaagaacttacttagttctccatcctcatcacccatgataaaagtaagcaaaaaaggacaaagttgtttaattatatacatgagtaaaaatgattgatttttcttagttctttagtatggatttaatattctgaatttggaagtaaatacagaatactcatgttgcacacccagtgtgggggtcattgtgattgagcacacgtggtaaagcatagtcttcacttggcagcacagttaacaagacacaccatagctgttttgacttggcccttggcagacatattttcaaaaaatgagcaacaagtctactaatttaaggaaatgcaaccaaaaaaaaagagagagaaagaaagaaagaaagaaaaagggaaggaaaggaagaaagaaagaaaaagaaaaaaaggaaaaatagaaagaaagaagaaaggcacttgacactgtcatttgttagtaaaattaaactttcaggaacttgatgggttcccaacaggcttagaaaacatttctggtaggattgttggaaatattaggaaatgctgctttaaaactactgtatataaagcatgtcaatgtgttggatgtgtgtgagtcaatgagccagtacttttcaaatgaatggattaatgatgctacagctatgtatgctcagaagacccaggtaaggactagaggcctttaaatcagagagtacaaaaaccatactgatgtttatgcttcatattccatcttgtccttgacctttgagaaactgctacttgtcagtttttgatatagatcaaagaaaaatagtcacaattatctggaaaggctacaaaacattctgcctctttttgagtatgtatctcagtacaaatggatacttcttcctgttgatacctctttctgagtatgtatctcagtacaaatggatacttcttcctgttgttacctctttttgagtatgtatctcagtacaaatggatacttcttcctgttgataccaaaccagcttgtcaacagtttgactttagtggcatccaggagatcatagctgtccttcagaggagaaagcatttaagaaatttacaaaaatgagaaacaatgcatttcattaactcttatattattggataatagatttattgttgctattttaaataaatcaatacttaaaaatacacaagttccagtttttagcataatgaatacttctaaatatagcactaagtttttgggatttgtaaattttaaggactgtgaaaaatcctgatatccaggggtttgactatcagtagagtagccaatattcttagactatgagactatcttaatgtcattgtagttctgtgctgctcagccatctcctctgattgcttttctaatatctcttttgaggtgggacccttacactaaaataatattggtcatgcagactgagaaacagaatacatgagtagctaagtgacctggcttcattaagaactgtctttggaactctttaagagtagaactcatatttcactaaagaggcaagctcttctagggaagattgctgtgctagcagaaaacaggttggttagctccctagaaatagcgcatggagttgacttctggccttcatacatgtgtgcacatgtacatgtgtacctgcgtacatgtaaacactcctaataccacacttcagtgttagccttgttataaattcttttgaaagtcaaaattcagtgtttttttaatagctaaaagtacttcatgcaattgttaaaaaacattaaatgcgaaagctaagccttgtggaattcaggaaaaatgagtccaatctcataaaactatgaaaaaaaagtgttttttattttttgttaagattaatgtagttgaggtgtgtgtaggaggctacttagctctaggaaatgcattagatttgcacagagaatattataggtattttaatatctcaatttttattttggaatgtaaaagatcagtaccgaggaagaactgttttgaaggcaagtggtttaaaccagtggttcactatatataaccttgtcgagtcagtgagtcaagaaagtaaaattctttagttcttcatcaattctttaatgtgcaatgctataattaatgtaaaaataaacaacattgtgtttacaagtttgttttttaagtactttatggactttcagggttggaagggcatttaatctaactgcccagttgatgtttgagccttcttgccaaatcaaacagtaaagagaaaaggaggagtgttcaaaagaaatgggtgtggcctggagacaggactttatgtaggattaaaaaaatttagcctgaaagcttttaaagtctaattacatggggaggtgcctgtgtttttatttgctatttacctttgatctgtccgctgtttttggcagactgggacaggctttttttttgagttttcgtggcttctttatttgatgttcagacactggtctgaagttgcctagtaactctgagtttctttttcttttgaaaacctctaatattaacactcaacttttgttcctagactaaaagcaagttaccatatatctgctttcttctgaatgtttaaacaacaaactggattttagaaactgtttttgtatctgttagacatgttacatataaaacccccaaataacatcaatctgtaagagtaacaacaataaataagaacttatagctcactatctactgtaaaaaattctgtgaaattatactttgtaaaacttgcatatgtatatattcacatatgtatgtgtaggtatttggtttttctataaatttgtttttagtatacacattgttttttattaagaaatatattgtggtaacattatattagtaaatataagatttacaccctaattttaaatagttacaaagtagtgtttctgtgtcataattaacttatccaaccacttggttgcttttgattttttttttttttggttttacgagataaggtttctctgtataaccctggctgtcctggaactcactttgtagaccaggctgtcctcgaactcagaaatctgcctgcctctgcctcccaagtgctgggattaaaagcatgcgccaccacgcccggctttgattttttaaactattatagatgtattacaatgagcacaaaaactacatgtgctgtgattttcatgtgtttgtgattggttcttttaggataattgcttgacaacttgaaggatacagacaagcattttaacacttgccattaaatttctgttcagtatgataccatgacttatattttagttcatgttattaactgttttgtattattggatattagtatttctttactgtatcatttcctttagatttttcatgatttttttttatattgatacatactgagaaatttatctaagaatgtgtgaagggttgacaagtggaaggtagggagctggctaccactgtggtgaatgtaaaagtctatgatagaattattttgaggggtaagactttaaaataccttcctgctccagggcagtcgctggcccatagttgctcctgctgactgcgtggactgcgggcagaggtctggatagtccgtggcccagggtgttctgggaagtcctcggactgaacagactgggattttccagaacagatggtgattttctctggcatttcctccagatcttctcgcttgtgtgctgcctcaggaccaaagtggccacttgtgcttttggaactatcttttctagctagcgtatagaatacatggtgtgtgcaggccgacaccctcgcgtgttcggacatgtcgcttctttattcctgttttctattttgcaggaagatacagtgaagtcatttttttgttgttgtttatgcaatgaactatgtgatgtgaggaatatataccctcttccaattgtttgctctggaatttaccaatagtttaagttgactgacgtctgactgagagatatctgtacctacatgtagcagcacagcattgatttaacagatgggacgtagagaatttcctgtagtgttagaatatttttttttttgaccaaaatgtctggaatgatttgttagagttagagtttttagaaaaaccaaatacctgtatgtacatatatgaaaaaaatctctcttcctttatctctatctatatgcatgcaagctttacaaagtacaatttcacagaaattttcacaatatgtgggctccaattaattcctgaacagctcagtgattgaaaaagttcaattcttgttcagcatgacattctctagttgcttttcttatgtcccccattgttcacgttacagtgaaggaagaggatgtgtcatgtatctctcacaactacaattcatgcttgtaaaagattagtcaacaaagaaacatgatatgatatttttaaaagagaaattgcataggttctgaaaacccttttgaatttctagcattttgctgtagatttctttcttgagaaacttaattcttttccccatgaaaactgattgaacccagggcctcggacttattgagccaatgcttttccacggaactacaccttcaggcccctctttagtgttgatgctgaggtcaggtctcatctgaactcactctgtaggccaggctggctttgaggttgcaggcctcctgtctcagctgctccagtagctgggatccaggcctgtaccactggggttggatctatgtatatcttcataaagaagtaaaaggatcagataagaaaataatctctgcacgccccccccccccccgaacccaatactctgttgctttgaggtaattcatgttgagtgtctagataaagctgttgtattcctggtaatactgccctcttagatcttaaaatgtctcatgtctaaagcagagaaggataaaataccaaaaatgagtgataatactgtcttcctggctagctaggctcttgtattctttcctccctggaagtcagatcacagagctgcagagcattggagaggaagcatggaggaggctttaatccagtggttctcagccttctagtgctgagaccctttaatacagctccccaaactgtggtgaccctcaatcataaaagcatttttgttgctacctcataataattgtcattctagaaatagaatgtaaatgtctgatatgtaaccctgtgaaagcattgtttgaccccagaggagttatgatccacgggttgagaaaacattactctaaccagatcctctcccgctcaaataccagaccctcactgtccctaggtcctgactagagattagaatagattgtcatgacccctaggtcaaagtgtattttaggtgccatggaagggcagaattagatatttactgtgttttgactcttactttcagatgcgcatctctaatctattttgatcaattgtagggattgtgaaacatagtatagtggtttctacaacaatatattgaccaaagttttttttgttttcttgaatgaattttacttaacctagttagttctcactgtgtgtttgccgtctatatttttaaagacgcagaatgagtcaaactcatccctagagtccaggaaagttcctgagctaaattagtaacttaagttccgtcattactttcatttgaacaccactcatcagcatcttcacattctggaaagaatacagcctctgtaacaaagttcctttgttttcatggaaccaaaatgtgctttatttaggccaaacaataaaagcaaacgacctaactactttctaatgcatgggggctccggagggaggaaaccatagatatttagaggcataagtgactcattgtgctagtatagttttataacgccggctctgcatgtttgaactacatctgctacttcagtgtaactgaagtgtgtgcaagcatgagaatgctgggtagaactgtggccatgcaggatgcaaggcacagcctcagcagctaacactccacccctgtgtagagcaaacactgcctccttctttactaattcacctatgtgatatttctgttgaacatgttcagcatatttctgatgaagtgaattctttttaacttgcaggatgcgtttccaaaatgtagcttgcaaattttgtttcccctttgaaaaaaaaatcttcctttagttttcactcctacttttaaatattcctgctactgctgatagtttttagaaaaagccactgtggatggagaggttgtatttttagatgtagaacaatgaaataattgttgcttttggcacaaaagtcttggcaaaagttcttagagtaggtgaggacgctgactttgtttgaaatgttactactcattgccaggatgtacgtttcttcaataaagcagtaaatgcagtttacttatactttttcatttcattttgtatccaaaattgtaggtcacgttcatgaattcaaaggcgatttaccagtgacttctgggtgctgggtgatcctcgtgtataactgtgagtattgatccagtcactacttttctcattatataaagcaaaagtcacagttcacaaacaaatcaacccatatgtaaattctggttagctttttagtaactgtttagtaaatattattagttctacataagtgattcttttggaattagggtaatgcagacaatgttggctgttgtaaagcctgcttgctgtgactcctggtacagcagcacattgcaggcctaccaccataggcctaaacaataaccttatttcaggaaataacctcactgtaggaacaggccaccttaaaaattctcctgtatccacagatgcctgtttaccctgataactttgtacatcttcgtgtctatgctgagaagatacaagatagcgtagatttcaaagagcggtttgtgcagggagattgatgctaaggagccagattcattggtgaatatagaatggacaccgaaatggtggtgttctccctttttcccctcccccaagtatcttttatactttcaaccttattttggagaaaaaaaaccctattttctcaagaaaaaaaagatgaattaaaatactttcacgcatatttgttatacagaagaagccataagtacatggtagctattaaaacaagtctgcataaatctacttttaagcaaccagagtttgctgccattttacactgttgcaaagcattggtgtttaaggatgtgtctctttacagttgacaatagtaaaaaatataagaaacatcttttgttgttgtaaagaatatactttttaggaaagtatttgaagaaatgtcaaaaattagagtttaagcagaaagcactgaaaatgtatctaaaagtcagctttatctgtcagtgggactgttgatcaggactaaccaagcaaatagatacgaatattaaatgtagtttagatcattttgaatatttttagtgctttaagaatgaccaaactggggctgaagagatgctcagtggttaagagcattgactgctcttgcagagaacccaggtttggttcccagcacccacacagtgattcacaaccacctgaaactccagcccaaggaatttctacactctcttctggcctcatgtggacacatgtagaactcacatataaatacaggcaaaccttcatgcacattaaatacaaaaattaatctttagaaaatgacaaaattattctttaatgaagttatcaacttttgtctgatgatctgaggtaaccctgaaaacacaggcttgtataaacttcatgtcttgtttggatttcatgccagtttgctctgccatttctctcagccccttctcagctccttcctagcattccagtctctccagtaagttcttcgagaaatcaaaggttttaaagcaacaaatataattgtcatcgtttagttcaaatgtgatttctcatcaaaccaaggtttctttcctaaattcttcactccttatcaagacacagagatgctaatcttgaaagaaggtgatcaggagccgggtcctcagggtcaaagatcagggggtagggacattggaaggggacacagttcacacagatttcatgccattgtttttatagtttaacttaaaacacctcaaaccttttctggtcagattctgtctggtcatgggagtggaagccatgcttgtcaaattgactcatgtagtcattttccagtgttcagaaaacgctaggttagggcatgggccagagattccagggttggtaaagctgtcttaagctgtagggctgtgggaagagatgtggcaggaagctgtgactgctctgtttcttccagttgctgtggagctggtcgcccagtcaagccagcaaaccggggtgggagggtcagtgacaggttttatgagcctcactctgaaactgcctggtcactgcctgtctaaggcaggaagctgcagctcacagctccagtctgtgagataaggaaggtgggctattatcttgcacatccataatgaataggccgcactgagggtgtgtgaggactgatgggaatctctctgctcgcatctgccagtctgctcagatggctgtgacttctgacaccgtgtcttatcctcgcaatccctcttcctttttttttctctcttgttaaagagtaaaatgacatatttttccaaagtaggcactgggtagaaagatcttgatctgtatgctctatgtcatatttaactttttatcgttaatgaaaaataattatgtaatcctttctactaaattttattgtgataataaatgattgattaaataaatcaacaaataacaaaacccaaagatggttcaatagataatttgcttttctaatcttcccagactactcagcaatttgaaatagattcccacatagaaaatgctgcctccttctgatcttaataattttattgtcctgtacacatacacacacaaatatgaggtgggttgggcagagagtattgattaactaaaggcctgaggcacgaatacagcttagattggcgtgaccctattctacagccgtgaatctggctgagttttgtgagatgagcctgtgctactttctgtgtcagcacagcaggacacacgcctgacctcagtgtacacaaatcttccccacagcatcgtggtgtcgtcctctgagagacaattttcattttctttcgcttgtttttgtcactgtctttgacctcagtttcatgctatgtcaggggagcagaggcccagtccctcttcccactcacttctctttctggagtgctggtacctccttggccttttcctacgcttgtggtccagactaccacatgtcatacttctgctggaagtttttgaattacatagtttttttttgggggggggtacatggagtcattaatttgcatctttgtggtattgttattattattactgttagtttttaatgaaaattaatctgtggcaaactgagcatagcccagaccaaggctccctcagggagaacatctgtgaatttaagggaaagtatgtctaaatgcattatctttaaaaaatattattccagtctaatcttgacatagagcaggtaaataaaaaagatgagctgtgaaaatccacaaatagggcttgaatgccattttccatgacaacgggagctgccccacgaaagcattagtgctgggcgtgtaaggaatttagaattgtgccttctcagttttacagttgtgtgctcatgttaattagagatatactgacatttgaagtatctacattaatgcacagacctactatacatttgtgaaccaaggccagaaatctcctttaattgaaaggagctgctaatctgactgcatatccattacaccgcaagcttttaagttttatgtactggtgcctctgcactcttgctctttatatgctctctgctgcctatttctaatttatccctcaaaggccagcctgctctggtttcacatcccagactggtgtcttggagtagtatcagtgggatttttcaggaaaaaaatgtgattcctagtgtttcttttttctgactaaatttttggttttcctttagaatggcctacactgaagtcaggtaggcgttaggtctatgtgtggaagggagctcatgccaagttacttatcagactcacactgcagttttagggaaaaagccagttctgcaggcagaccctgagcagctcagcggcattctggttttcctggtagagctagggttctgctcttttcacgccagaccacgtctcttcatttctgccttgtatatccatgccttctggaggtcagattttagagattttgctttgtaaagtaagaccttcaaattatttttatgaccttgtatttctttaaatttttaaatgatttttaaaaaaattttatgtgcactatgttttgccttgcatgtatgtttgtgtgagggtgtcaggtcccctgacactagagttacagacagttgttagctaccagataggtgctgggagtgaattcagtcctcagagagagcagctagtactgtttaccacagactcattgctccagccagagcttgtatttcttaagatctgggtgtcagggtttgaaacctaattgttttgtgcttgtcatctagtgaagctccttcacttacttattggagcaatctgtaagtattacacaagacgagatagaaggtttctttctgcagcaccagaacacactgccccaaagggctcttaggactcaggacttgttccattaacttattctacaggcacactcagacccaagacctgggaccattaagacttactcagaactgttggtgtcattatggcccctttccctccttacaacttctgcctgtgcagcacccctgctctttcctctttcatgttgcttgctactccttgtgccatcacagctcacttggtaatttcaagttaattgctcaattatcaatgatagtcacagaggacttgaaacacgtgcagtggaagatctttaaaatttcaaaatgagtcggtgtgtcataatcttaaatgtgaggcatgccaatatcctcagacgtaaaacacacggcctgagccaggcatttcagagaaggccgaaactcactcttacaatcccagtttttgtctggcaccaaagtgttccatctttgctgatttcaaacagcatgtctaaatttgatcttggttttctcttcaacaccaatgaattggggtggttcagagaagaaaaaggaagtagagttgtacagatttctgtttttgcttgtttgtttgtttttttgtttttgtttttcgagacagggtttctctgtgtagccctggctgtcctggaactcactttgtagacaaggctgtcctcgaactcagaaatctgcctgcctctgcctcccgaatgctgggattaaaggtgtgcgccaccaccgcccggaaggtatagatttctgtttaagtattggagtagaaatgcacaatcacacatttcctgtaaagtaggcttggctcctggtgggcctacatttggtgccagtacaggaagcttccgaaggaggcaggatagtgtggtggtggtgttcatgcaccaggtggggaggctgtaatcaaaggacacatacaatcattatcttttgctgttgaaaacacagccccaagagcagaggctttgaggaggactcattgaatcctacctagcaacactccgatgcttccaagataatgcacacattacatcagaactattgtaatgcttttggcaactaagcaaagtattattacaatttttgatttatcacccagtttatagttttctctaaactaatattacaccaacagctccatttttagatgctataatggtcctttcatatttctgtaggactgtggtaaagctggatttattagctgcatttgaaggtatggtgggccacacaagggtcagtgctgatgtggtcagtgtccactggagaaaggagagtgagacctggggagaactgctccctgctgctttctgagattgttttaaccaaaaagagagactttaacattgccctgtatttttacgtgacagtaatttttaatgaaaggaccaaatgcatatagagaaggcaaattcagtccttgtctcagctgggtaatggtctcaagcataggtgagggagtgccaatagacactcgtacacagctaacagcaggacatgacagacaggctgcccataatttagcaaaatagtcattgattactgcatccattttaataactatccagtttaggaagtctgagaaatctaagacatctattttgtgttttgagtctgtattacttagcttagttttatctaagcatgttggtatgttattttgcactttgacacgaggataatcatttcatcagtttttgccagttccaaagcatcacaatgcaagttagatgttgccggccaggagaatcatgccatgcagcctctctccttttcagtgtattgcttacatacttcttgctgggagttttcaaaggcatgagttaattatactgagaaagatgcatttctaaaacctcacttcatataaaagactggcaaagagacttaccattaatgttttatcagtcaaaaagacaatccccatgatgtgtgcttgttgttattattatttgctgagcactacgggcttggcacagtgctttgatgagaagggaggtgtgtacacgggaggggtttaaattttaactattactagagagtttctgcaggtggagttttctctggacagctcagcttcccatgggcagaggtgatagcccccctacagcaccaggctttctgtttcctctcttttctggctcttttagggctttggaatgcacagccatagcacaaggcatgtttgccagttaattgttatttttccctttttaagcctggcattatgaacaattaagcagcagcattaatggaatccagtctctgcccttatagctacttgaactgaacagaaatacaattttaatttttcaattggggcaagctgataagaagcccatggcttggtttttatgccttccacaaatgttccagtttcattaagctaagtaatatagaaatttagatatattattcctcgtgggatactgtcttcttttgttattgtgtgcacatcacaagttagaatgaatggctgttaaaatatgtgcttaagttcatattcactgaacactgacagctttaagggaagggatcattctggaatttctcttagtaatggcactgtgtgaacccactgactgtgttggttttatgactaattaagtgggtttttccatgaatctagagttgtagggcaggcagctaaagggaaacatctggggacactgagaaacctgagcataatatggagcagacaagaggagtattaaaggatccagagccttggagaaggcaatatggctgaagaggtggggcaacatctctacctccaacattatgagtaactgcaaaaacagagatagcgagagatgtgtggacaggagacagctaacataggaggctttttgtagctcacaaaattgattttaggactgtttttcaagacttggaaatacttgttgggattaagcaacagttatttaaaaggatttctacaatttcttatgatttattgcaagtgtatttattttaattcagtgttttttaaaagacattccaggaagtgtagattctgcagaaaaactaatgagaatcattttactttatctgggtaaagagtcataaagatgtgtatgaaaataatcacccatatagctcatggtagcattgtatgggagaactctagaaaagttcctcaccaggtcagcactcccagagagagttgtgccccatgcatatcgcagtgattttacagtcctgcaggtagggccggcctagacagccatcaagagatggcatcataaagatgatgtgtagcgtttatgcgacagagtactattcagccataacaaagaacagaatgatgtgatttgcaggaaaatgcatgaaattagagattcatgttagctgaaataagcccggcacagcaaggcagggatgacatgccttccctcttagccctcaccttgactctttgaaagtctaagtcagcatgcgagggaaagcatgtcttgcttagttttgggtgttgggaagctagtgcaacccatcctttcatgcgagcgagtgtggtggatctgcctcctgcctcctgccttctctccctctgtttgctccctgtctctgtcccttctttgttttactgatggtggctttgcttttagtttgcactgtgtggtaagttgaaggtgacagttggcacttgcctcttaagttctgtgcagttccactgttctgaccggggctacagaccttctttaaggtagcctgtggttgctgctgtcattctttttttttgtttttgtttttgtttttgtttttgtttttgtttttgtttttgtttttgtttttgtttttgtttttgcaagacggagtttctctgttgtagccctggctatcctggaactacctctgcagagcaggctagcctccagctcacagagatctttctacctctgcctcctgagtgctgagattaaagttttccagctttctgggaaacaaagaactgaaaccaagatccaattgttctttattttgtcccatttttgaaatataaactaaggtccctctagaccagtggttctcaaccttcctagtgctgtgaccctttaacatagttcctgatgtggtgactcccaaccataaaattatttttattgctacttcatatctgtaatttagctactgttatgaattataatgtaaaatttttttgagataaagggttgccaaaggattcctgaccgctgctctagttcatcctgtgcaatcacagggaaatggagaaactattgaaattagtttattattatgaagtgatgaagatagaatatttggaaagaaatagtctttattgtgttagaagcttactaagccagaattaaggattgtcaagttttaaggcttattgatatttgctgagaacaggacagaggaatgagcatcttttaaaaggttttagaagctctccaacagtgagcaagctcgctgcttatcactgtaggcttgccagtcatcagggacatccccagctcttggggatttcttgtgtctcttgggcatttctttttcagagaatgaattaggccctgttcttgatactgctattttttaagaacaattccacttacacataaataaggtaaatgttctatagtaccagaaggatcaagtttataggtcatatcaagagtagtatttaaataatgagatatatacccttggaagaatgctgtggcttggttaagaccatgaatactgatcaaatggtgagttcacaacaatctgaaattcctcaaggaagtttccttggtgatagcacttaacactagtactgtacacttcctacagcaggagaggaatgggtgggctcagcagtcaggacttgtagccatggctcttactgtataggttaactttcagagatgctcagggtaggcactctccccagttgtggttttgtatgctagttggtttttgtcgccctttctttttctctttctttttttcccatggtagtgtttaaaatgctaggaatgtatcatgtataatgtcagtttgctcccccagattaaaagttctctcagggtagatgccatgactattctttaagcctgtagagtcgacttctagcacaattcctgatctataagaagttccccctaaatatttattgaaagggtgaataaatgatcagtaagtaaataaaggacaggtgggaatgcagggaagtaaaagactgagctaggacctcaaatctgatgcccacgagggatggacattatttagacagtcctgggtataaagttcccatttcattgtacctaactcagagcagctgaaatatttggtctctgcactgttccatcttagtttgagattgaatgccatctcatctttttcaagctcattgcaactcggctctcttaacttagttgtcttaagctaacagcttcctccagaacagtgactttcagaattctcttcctcgtacacagagagtacttttctttattctataagatggaccgttttttaggttttggtgctgcagatttgagtttgggtcatgggcattgtggttgttgcatgccctgctgagttttcccttggagagtcaagtcactgtgagggtgtggagctcatctgaagtaaatcttagcactgccatgcttgttttggtcctctagcaataactaactaatttttgtgactttgggatctatgaacccattcatacccatgtccacagcatgttccccaacacacacgcacgtgaacacacacacacacacacacacacacacacacacacacacacacattctactctcccttttctaaaaaaaaaccaaaccaaaccaaaccaaaccaaaccaaaccaaaccaaaaacatttgaagcatctaatttttcagctttctggaaattagaagtttagtaaggagtgatttgcccccaccacagacttcacatatgatgacataactagtggccaaccagtgttcagcttagtccctaaaacctgtttctatgtgtgaccagctgttttcccagttaaagcaaatcattgttttgacaataaaggtttttaatcatgagagtgcttagtacctgctgaaaatgaatttatcttcacagccatatattgcacatggagtatactcaaagcataacattaggcatggcactagaaataaatgcaaatgtgtgcataggttcctgggaattgtatagtgcttttattccttattgtgtcccaagtatctaactaagacaacatatactccaagaaggtagtaataaataatgactaagctacaatggttcgattgttacagagatataatattgtctctcatgcagaatgtattaagtgccttacagagaggttagcattctagagtcttttaaagatacatcattaaggacaagggcattagaagcatgtatgtatgtatatatgtatgtatgtatttatgcttatgtatgggtgcatatataccacagcatacatgtagaggccagagaccaagttttaggagtcatttctctccctccaccatgtgagttcaatccttaggcttggtgctaagtacctttacctgctgatccacagcactggccctaggaagcaaacctttaatgttcctttacacttgagtacaattttgtgagaggaataggtgaggaagaaggtgtgcctggtagtgtaggactagcacaggacaggtgatggcagtgagggagccaggggcatagtgagaggttggatgtcatggggcacagcttgttggaagagctggaaaatgcagatatataggactatgggatgttttcacactaagtagatcacaggggcccatcatgaccagagaccagaggtgttatttctgaaaacctaactcaggcagccgtcagcagggttgactggaaatccccttgtgatctgagcaagggaaagtgcctgtgagggatataatgcacatgttttaggaagggtaaaggtgtttaagcaaaggatcagtaagaagggtggtggaaggctataatggcgaatggccattgtggctttctctgtctttcttttgcttatgtctacatgggctttatgaaaggcaagagtgacccagtacaatacctcttgccaatgtgtacaatcttttccatctcactgatgaaatcctcacttatatttaaggatttttctttcctttccatagaatgctaaggcaatatagtattttcaaaaggaacactagtaagcttagagataaaattaccttgaagatttagaggcacccaagtgcatacacaatgtggagatgtatctaacaagaacaaacatggactccaggagctcaaggacataggcagggtcctgtcgattttagatgcttattgtggagccaggcagctgtgaacatgaagaaagcaaagaaccttaagatgaggcagctttcttggtatcataattgtgtggcctctgtaaagagtaaagctctgttgggtcatgatgacagcggctcactggttcagttgtcacaacaggtatggttgcatcagacattacacttaaaaacattgtggctctcttttacttattcctttcaaggcaagatgggcagtgctgggaaatataccacaatgcaaaaagcttctactgaagtgaaacttagaaaataggcatttcaaaaaactacacatagccacacagcttccttgaggatcttggccatttttgttacagtatcattcagaaaaaaaattgacatctatctatccatctatccattcaatcatctaaacacttgtccatccatccattcacctcttcatttatccataatccttctgcccactcatctatctaatcatctacttacatattcatctgtctatccacctattcatctatctatctatctatctatctatctatctatctatctatctatccatcatccatccacccacacatccatccatccatctatccacccattcatccatttgtctgtccacccatcattcatcttctatccagttatcatttatccacctattcacttatttatgcatgcatgcatccatccatccatcccatctattttatatgaatttgaactatttccatgagaattttaaaaaagatttattttatttatgtatatgggtgttttgactgtacatatgtgtaccatatatgtatgccgggtaccgaaggagtccagaagaggatattgaattccctggatctggagttataggcagtagtgagctgctatgtgggtgcttggaactgaacccaggttctatacaagggcagccaatgtacttaaatgttgagccatcttttcagtattccataacaatttgaacttaagaatctttcacatgaggcagaatttaaaagagaaaagggatagatttaaaagagttcaggagcttatagtctgattgtgagaatagatgaaatacacacatctgaaaaatgcaaaggaaactgacacacctagtacttcctgcaaagctgttcgttgtttcttctttagagagttgaacaggctggcttcattcatcttatatttaaatacatctgtctcagctctggacacactgaatgctttttcatagcttttgtgtgactgaaaaacctatcttacttgttactaggactaatgaatatgaatatcagatatatacttttgtgtgtgtgtgtcaataataacaaagtgtttttcatatgcttccataaattctatatccttcatatacattctataaattaagatatttttgtgctaaaatatggaaaatttaaatatcctatgagaaaattaacatttattgatatttaacaacttagactcttcgtatgcctttgtgctttgagcataaacaaagccataaataaaacttttaaaatttctctgtggatcaaactatatttacatgttccatgttctccccctgccaatttccctaaatgatagctgctactagcatagtatcagagtacaatgtactcaagatttttttccctcagtaccagtcccactgcctgtaggaggacttgtgagagtattctaatggttttgaaagaaggcatgtggtattcctggcacgctgggctttgcttgagctagcagaggtgttagttaaagcacagaatgccacctgtgtatgctggttttgatagctttatttatttcttttatttgatagctttttttttgagttaggcaacagtaataatgccatttccatagcaaagtaacatttccatattcccagtgggtcttcgatccttcccagtttctcattcttgctccttgcctgacacagaccccaggttgtcactgacctgttatcacagctcactttgtacttcacagaactttgcattagcgggatcaaacagaatatgttgttttttagagtttctttcattgggtgtgattattttgagattcagccgcatgcttgccaataccttatttttaaaactgtggaacagtgttttattatatcagtatgccatacttgcttttgattgtccatttatagttgtttttttctgtttttgacttactacaagtgaggctgctgtgaacatccatttttgtgtggttctgtactgttccgtgtcttggataagcacttgagaggagaatggggcaagtgtaagtttaactttatatggctgctgaacttttccaaagtacagctttacattccttgtgttcctgctacagtgaatgagcagttcaggtactctacattcatggcctcagttgtcatgcttagccttagctattctcctgatttataacagtattttttggtatatgttcttttaaaaattattcattaatgaataattaatttagtatgtatgtgaagatagattgtggaaatcagttcacgccttgtactgtgtgggttacagggattgaactcaggtcatcaggcatggtgcaggcccctttccaagctgagccatctcactggcccaccctgtgcatttatctttccctaatgactgatgatgctgactttcttttcatgtgcttgtttatctactttgttgaaatatattttagtcctttcctggtttttgagttgtggttgtttttttcattgagttataatatttttcttgtgtattctaagttactttttttggagcatctcatataaattattgattctattggcatgggtttttcatgataccactcattatacttttaatgtatgtaagctatttagtgtaaccatatctctgttttctcatatgagaatataaacatatcagaatttaatgttgattttctgttttctaatttgcctatttctgttctaatcttgatgtttcccatcctctggtttggtttttatttgctgttttttttttttttttaatttattaagctgaggccgaggctgctgttttgaggttcttgcaatagcagttgtgttgctatgaactggcttccaagtgctgctctggctgcttccatgagcctgagaggtcacaaccacatttgaaatcactttgaatgctttccagttttccttttgatttcttctttgtttgtttgtctttggtgtttttgagctagggtttaattgtgtagtcttggctgtcttggaactcactctgtagactaggctgaccttgaactcacagagatcagcctgcctctgcctcccttcttaaattcatgtttcatttagaagtttaagtttatactctaatagttgggtgtcttccagtcattcttttgttacaaattcccagtttaatgccactgtatcagaaagacccattgtatgatctaatgaccttttaacatattgagccttgtattatagctgagaaagttctccgtgctccatcttagaacatgccctgtgagcaggaaggagcaaatgctttgctgttggatggcattgattgattgattgattgatagatggagttagtcaggtcttctgttatcccttttgactttttaaagataggaatgtcactgtgtagctcaggctggcctgtattctgtatgagtctcctgcctcagcctaatgagtgcggggttcacaggtgtgtgctacatatctaattatttttgactattgtgttttcacctgctaaaagagattttggaaactctcttattctacttaaatttttatctacctttgcctctttttctttgaaactgaaccaggtgggttagtatttagattgttatatcttcctagtgtgattacacaagcattactataaatcatttaacctagagaaattctattttgctctgaagtctaccgtgtctgcaaacctattgcactcttttattagtgctactatactatgctcttttgttttctctctctttcttttttccttttcttcctttcctacttccttccttccttccttcctttctttctttctttctttctttctttctttctttctttctttctttttcttttttcttttgaagcagggtttctctgtgttgctctggctgttctggaactctctgtagaccaggttggttttgaactcagagatatgtctgcctctgcctcctaagtgggattataagtgtgctccgccaccgcccagcttttttcaactctcacttttgaatggttgtgttttcatttgaaattgatttcttatacatgacctaatttttgtgtaatgtgataattctgccttttaactgggatgcttaacctgtttttgtttaatgaagtcactggcttggttaagtatcagtatgtactccctttttccagtttgccacctgttcattcttcaggctttccttccctttccttccctttcctttcctttcctttcctttcctttcctttcctttcctttcctttcctttcctttcctttcctttcctttcctttccttcccttcccttcccttcccttcccttcccttcccttcccttcccttcccttccctttcctttcctttcctttcctttccttatgccttcttttcaatttattgggaatcttgactattttaatctaaaactttaaaaaaacgtgtttgtttgttttattaatgttggtgattgctctagttctgatagcaactctgttcaacggtcagagccttggtactaatgatatcacatacaaagactcacagtggtgtggcttcgtttctctacccttgatgcttcacacctgctacaatcctcatgataaattatatttttgctttgaattttcaataagattttaacagatattttaaaaagaggcagaagatgaaaaatacaaactcttttgtattactcatgtgtctccggtaggattgtttaccacttagatttcactattatattggagctgggacctgaatccagggctttgcacttgttaggcaaacattccacgactctaagcccatcagctgcatttctagaaaaagctttctttttctcatgtgtatttcagatggacctttatttgactgttctctcatagattcattgtcctttggcttgcaaaaactttctgctatagttcctgcctgtgttgccctgtatgtaatgcacaatctttggctggtggctttggagattttcatcactgatttcatagagtcttgtcatgtaactcatagagatcttcttcactacctctcaagctttggatccttgagatgagatgtctgcggatttttgcctttcatcacattagaaacagcttagccactgtgttttctgacatttttgttttctcatgccacactctggagggtcagatatacagagcttgaacttctgtagctcaggccctctctccttgtggtctctttcattttgggttctttctgttgataagtgttcatgtttaattatcatgtcctgaagtatgtaataggacttcctaggggcagggatttctagggtggggattggtgggatttcaagacccgagcttaagggcaaggccataccacccccagtttctggctactatgaataaaactgcaatgaatgtggttgagcaagtggccttgtggcaggatggagcatcctttgggtatatgcccaaaagaggtatagttgtatcttgagttgaatggattcccaactttctgaggaactggcataataatttccatagtggctagacagtttgcactcctaacagcaacggaggagtgcttccctttctccacattcttatagcattagctttaactcgtgttattgatcttggccattctgacaagtataatcacaaagtagttttaatttacatttccctagtggataaggatgttgaacattctttagtgtttttcaggcacttgcgtttcctctataacaaattctctgtttagatctgtactccattttcaaattaggttatttggtttttttggatatctagtttcatgagttccttatatattttagatattagtccattattggatgtggagttggtcaaaatcttttcttattctgtagactgctgctttgtccaattgacagtgtacttggccttacagaagcttttcagtttcacaaggtcccattttttaattattgatcttactgcctacactctcagtgttctgttcagaaagtcatcttctgtgccaggctatctcacactttctcttctattaggttcagcatatatggttttatgttaaggtctttgatctacttggacttgaattttatgcagggtgataagtacagatctatttccattcttctacatccaatttgactagcaccattagaaactggctaaatctttttaagggattccctagagatggttggaacctggtatattgaggtccttttcctattagattgccctataaactacagacatcatagtttacttttgtttctagctccatcactgtagctaactgagaccattatgtttcttctctgaatatcagagctgccattgccccatgcagtgacacatgaccatacttgattttcctgtctcaggttctttgttgctttatatctgctctaaaactgttgttttcattttcattttattggtccaaatctctagtgttggaccatgcattgtaatctggtccatgttagttcatcttggctagaagcagaagtcatcacctatgtaaggaaaataacatatgtattccaggcattttattaagtattgctacactagagagtattcaataacaagacagttattactgctgttaactgtgtcctgttcattagtgaggctttaaataattcctgttttctcttcttcacatacacttcaatttttaaatcttcctttatgatgacaaaaatccatgttacaagtttgcgtttctttgtgtctcttgaagtaggttcatggcttttaagcaagtaagatcgatcttgcatatttacccctactcttcagcatacggaacatactttgctatttgttgtacagattaatagtcaagagttctgagcttcttacaaaatcttcaggagtagattgttgaccagaaaagaaagaggagactttaggaatatgaaggcattcaagtaaagtaaaaactgagaggggaaataagatctggtgaggctagagagaagcatgagagaaaaagtggttgtctgacttggttaataatgtgaataactaataatgataatgatgaggataatagtagtagtaataaatggtcccataaagttgagagtacagagaaatataaagtagaagatggaagaattatttcagtattccagtggaacaattttatgctgtcttcatcatagtgctatgatgacaaccttggtattggtaatattgcatctttgtgaattgtgttagctagtgtcacttgaactgctacagtgtgtgtgtgggggggtgttagatgatgtactaagtagatggaatagatgaannnnnnnnnnnnnnnnnnnngcagaggtaggcagatttctgagttcaaggccagcctggtctacagagtgagttccaggacagccagggctacagagtagaaaaaccctgtctcaaaaaaacctaccccccaaaacaaacaaacacacacacgcgcgcgcacacacacacacacacacgcgcgcgcacacacacacacacacacacacacacacacacacacacacacacacacacaaacaaaaagaagcagaaaggaattatagatagaaaattatagatatcatgtaccatcattgagcatgctatatagaacaacagttacacctcacagttaggtacattaggatttcattgttgttcctctttggatgtgacaatgtaggaaaccccctttcccaagcctcatggccagcaggaggataagtgcaaagaggtcaagaatggaacccaagacagtagcaggcagtgggtcagattttccagagactggtcttgtggttgacttttcttacacatttaaacatagcatagcttatgtcctctgacctttatattaacaatgaactctattgcctgataaacagagctcaggactagggcttggaaggaagatcatttagaaatagaaggatagattctgttagtggaggatgcaaaggatgggattagaacctgagcagtgctcaggatattggaagaggggatctaggtggaggttggctcctaatggaatagcaaagaatcgccaggttgattgaccacttttcattctggcattccagatgacgaggtgtcactcattttcttccattgaagaaaataggcccacctgattgacagtcctgatgtctccggtgcttattctaagcagtgcttcctacaggactatgggaaaattgctatcctgagtctcagttccctcatctgtgaatggatgtggccgttggaaaggatgatatgatagtacacatttattctgcatctggtagctagtgggtccaacaactactattttcaattttttccagacattctttaagttttgatgaggtgaggaaaatgtttctagcactttgtggttcttcattaactgtaatgatccctgtggggatgttgctcacttgttgcctagtatgcacagtcttggttcagtccccagtgttacataaattgatcatggcggcatagctctgtaaccccatcacttgagaagaggaggcagaagaatgaaaagttcaaggccatcctcagctacatagtgaattcaaggtcagcctgagaaaaaccttgtaaatagttcaagtacaatatatgtgtttgtaactgatattcccatttattaatcctgcctatatttatggtgaattgctttgggctcttgcactgttttgtggtgtgtcactaagaaataggtaatgtgcatatcagagtttctcacatattctcttttacttgtacttagagctactagaattgttaactaaactttatacacaaattactaccataattcagtattttcaggaatttttaaagtagaggatctatctattgagttaagaagagaaaatacgaagatctgacatattaaaatttcccaagcatttatcccattttcattcatctttaatttattttgtgagtgaaataagttttgggtttaattttcatcattgaatgatatgatattaggctgaaaataatatttagaaaccctgacattccaaagcaattatcttttaatcctcaattagcttaaaaataccatggccaatgtgaacttgcccatgaaccgttatgtacatctgggaactttaacgtggttctagcgtgaccaatctagaaagcagatatcctagcttcttccccacagagaaggtgcagcactttttcattgaattgatttgtgtttgtctgagagaacaatggataaataatgattagcacccagctctgggagctgccttcccactgtctcctgaatctttgcattgactacatgaatcagaggtaccaaacttactgctggtcttctgccaaatgtagacctgctttagacatctgtctgcttgcttgtcaactgctgtctgtcaggccggcaagcacccgtcttcccaagctgctgaatttcagcctggatctttacatttcctcggtcttctctgatggcatcttccttggtaagaccctccttaatttagctccagatgtgccaccaggatgcttgtaaacatcttgcaacacagcaatttttgtgaatttctgaaaatctctccataggtcaagaacccaaagcaaggcacaactcaggttgatatgagtgtttggaggtgctgtggatacccagcattcacagttcccctggacaaagtggtgcaggcaagtgggaagataactgtagtcctctcgttttggtctgcagtgagcatttgaatactttcttcagcctgtagctgagatgcagaaggtaccctagtctacaggactgcgatctgtggcgtaaaagtcagcaggcgtcaatttccatcttgatttagtaagaataatgctgaatttttataacatattgtggttggtttggggtattttaaattaccttttagtccaaaaatattagacgaagtgtccatttagatatttcaggcaaacatataagctttataccagtaaatatatgtattttatgtatgtacaagatctagaaatttggaagcctaagacatgttaataataagacatacaggatggctcagtgctggggacatgaaggtcgttatacacagttattttcagcacaggtaaatataccttctcatattaaaatgtcttagaaatgacagtttttttttaaacattactgaccacagtacactcgacatagtttgtgtggggttgaaacagtatgtactggctggtgtaaaagagctggctacctgtggtgtggtagatagtttgtagatctgtgtcctcctggcacacataggaacctgtgtgacactaaagcactatttaagacagtgctgtaggctcctggggccacttggctttcaggtaactgaaggttagaaatgaaggatataaactttacatagagaaaaagtatgctgtgaactccttgaagcattggagcctgtattagttcctggaagtctctattatgacatttagtcaatagtcaagggcataagtgaatgcattttaactagccatactagtgaaattagccatactggtttgtcttacctggagaaaaacattgacaataaaactaaaagtttagaaaagataaaataagatgttgattgttttgtttgttgatgaagctgattttaactttaaataaaatcaatatatgttactattttatgctcattaacataaatcatccaatgggtgattatgtccacatgacatgtaggtgggaataatgattgtaactcaccacctgtgtcaggaagcgccttctctttcccacttagaaattttcatagttttcttggtaaactctttagataaaaaaaaatcaattaaaacaaagcaaaacacccgatttagcatagagaaagatttaacggcatatagaagtgttgcggctgctgccgagcttgagatgcgggtgacgagaggtgtgtgcagcagagccggtccccgtacatgctgccagggctcttcgtgcgcggggcagggggtgctcacaaacagcactgtgctgtgctgctagcaataaaatgagagtttaaactagagactagcttagtgactttggttcaatttctcccccctctggggccttttgagaaggaaagtgcaatacgtctctgggaacgacctgcttttctcttgccctggaaaatcctaaagtccaacttggcttctgacactgtctgagctgctaggattagataaagctgatcttaaaggagaaaaactggatgcttagccaggccccactgaaattttgacacactcttggagctgacaggagttgccacaaattaaatattacttttcctagcagagaagccggctaataaaaggctttggatattttatgaacggctgtccatgcaccctggaagctggaactcgggggatggttttcttttgggaagaaggagtgttggagagaagctactgatgaggtgtcatataattttacaagttgcataactgcatttaacgattaaactagctctgattaaaataacaattgagcttgtaattctttctgaacagctgctgctacagggggtcattaccttggagagctgggaactaatcatcctcctggtacccgagctatgcagtcgtgtgttttacagcacagcacaaagtttaaagcttacagaagaatgttatttgaaagctgtcaaaccatgttaaaaaagactgcatcgtcagaaggccctggtggccacgcttctgcatgtagccttgtcttattcattataaaatgcatgtttataaagttccacggagcatccaattcccaattcacttatatcagcaagacttaacttgctcattaatctaaattcttttgcaactttaatctacatgtttaattaatcataaaatgaggcggtaagtaatttcagcaatgtgtggcttgttatcagatgcatttaatcactcttctgtgagctcatttggaaacacctgaagatgtcgagtgcggtttgaatgagcataaattattctttgtcagcgtacttcactcaactaataagacattaatttaaaaggcactgtttgtcatttttagatctttaccaatatttttagcttagcaatataactctaattgtatatatgattcaggcctagtgcccagcataggaaagggtaagagtttaattcacttttcttatttacatgtaattatgtcatgtaatcttagtttttaatgaggattaaccaccttgtaagtattcatatgcttttggaataaggcactaatgaattatagttgcaaaaattatttgttgctacaaagactgataatttcttggtttttttcaaggtgagggatgaaaggcagtgacttttgggggagggcactgatttgcggatgcaggtaccaccacacagggtcataagatatagaggctaacattaaatccaacagctatatgttgctgtctcatatgatagcataaaaaatctgagaagcagccaagaaacattaaatactggcaatcttattttccttaactttctcttggcattctctctctgtcttcctccgcctctgtccctctttttcatgtgggtgtggcttatatgtgcatgctcatacacatgcacaagtcaggacagaacatgaggtatctttctctgttgctgtcctcttattttcgtcttattagatcagaagcctgccatttaagccagtcttcctctcctagccaaaggagctcttgggcatctgtctctgattctcagtgccatgtctaccttcttatttgtgtgcccccatacttacggagcaagtgttcctatccactgagtcatcctgccccatcacttagcagtatcacactttttaagatgacttaaaaaggaggcaaaacaacagcaacaataacaaaatcccactcatcttcagaggaaagaaaaaaactgccaacctcccttcgccccctccctgaaaaaaaaaaaaaacccaaaccaaccaacaacaacaacagcaaaccaaaacaaaaaccaccactaagactggaatgagttatgtgtttcagcgtcaggagtagggggataaaatggcatttcataggtgtcatcacctgttctgtttatgccccaagattggtgacacatgagaagaatagttagttatctcagtagtaacagatttatttacctgccttggagcagctccgtccgtctgcctcaggagcttgtctcactcacaggctgtctgtggagtgtcagtagtgcaccagaggttaggaggactgctaaaataaagacagcttgtccattttatttggtgtgtgcccttcctgggctccctgctcctcagggacccttcatgccaaactagctattatcctctgtctcttgccctgtgtctcatgacttggaaaatgtttttcttcctagcttcctttataaggaaaaataaaatctggtggcatcttgtttgtgccatttcaacctgccaggctgcagctgcacagtgtggggatccactgtttccttgtgttctgtgagccgtggcgtgtagtgtttcttagaacactaacagaaactgcaaacgctgggacttcatcttgatcagcattgcaaaggaacattcttttaacttgattttttttttaccataatattcctccagtctctgtacattcttagaggatgtatacatactatctatcagacagggttgctgttgggttttcttgatataaaacctcaatcttccttaattgccctttccctggaaaattgatgacttttgaaaaaaataatttttagctgggtttggtagctaatacctttaattccagtacccaggaggcagaggcaggcagatctctgtgagctcttggccagcctagcctagtcttcatagtgagttctaggacaggcaggtctatgtagagagaccttgtctcaaaaaaattaaaaaaaaaattccttccttcgatccctccgttgatgactgcttttggtaggaggtttcttctccatccttcctggttctcatgtagcccagtttgaccttaaactttatgtagcttaggagatctttcaattcctgattctcttgcctctagttcccaagtgccagaattacgagacatgtaccaacatgttcaactaagagctgatactttaaatctccattgtacggactaagaaagtatacagtattccaatatccaccccaatacccacctctactcaggcatgagaggtctgtcctgatgtcctgttaggtacagtgctacaaccaattcattttataaaatgccaagtgctaactgattgatttttcctgtgcagacctattcttcaatatgcaaatgatgaactcagttccatgaatctcttgatcgttcagatgcttgaataaaggcttttgtggagaaatgcatcttcatcctcatctgcatccacacctccatcttaatccacatcttcattgacactttcactgtcattcacatttctgtctccatttacaagcatcccttcatccgcatccatacattttccagtgttgcccaaacacacactaacacacctaccttagtccagtcacaagtaaggacgttatcatttaagtgtgcttctttgatgggagctttatagttgaacagagtgaaaaactttccaagaagaaaccgtttcagcataaccctcagccttcatacactggcagaaatgctgagtaagctctcattttcatgcacgacttttgtagcttacaagaacaggggttagtgatagcaacaaagaggtcctagagaaagtgaggacatttaccatgtggtatgtactagatcacatgctctggggagctttgtggaagtcctgagtggatagccagagtcttccttcagctagtgtggaatttcagtggtagctgatgatggctaagcacaatcagttacatgtttcactttgcttcagactgtgcatgtcaatcttttacttattaaaaactgagataggcatctgacattcagttaatcctttgtgatacttaaggagaaggttaagtttcccacaccattttcctaaaaaagacagattatattgttttatagtgtgtttatagtgtgtgtgtgtgtgtgtgaattaagcataggccagaagactatcctaggtgccatcttcaggaatgctgtccatctcttttgagacaaggtctctgatgagcctggagctccccaaatggactaagctgttcagtgagccccagagattgattgatctgattttatgttccttgtgctaggataacaaagtggacaaccatacctggcactttcatgtgggtttcaacttaggtcttacgcttgcaaggcaagcactttactgacagagctatctttccaacagagctacatagcttgaattctgtttgtattttaaataaaaggtatttttaaaacagctttataattcatgtccatccatccttgctttgcgtcccagcattgccagagctttgttgtctgccttcctgtacaatctagtttccgaatcactaaaagctgctttggtctggtctcacttaggcacgacagagtataagacatttgagaagctctgatgacaaatgtgcaagctctgcccagatgatgctctcatggaccatacaagtgtagggaagaaagcaaagctctgggctgtgcagacagttcagtgtacatcagttctttctctggaattcacacaaagatgggttgacttgagctgtgccaactttccagtgctgccagttttgaagattgcctctgtgtggttttaaaaggtattatctaaggtgtttatgctcagaagagaaaagtactggttttagaagtgtactccctctcacctctagctcataccatgggcataaagttttcacttattattatcagcaataataataataataataataataattgtgttgcaatccccaaaaatcttttgcttatgtacgcttcctattctgtattttaaaacctcagacttcatatacagtcagtaacactgaattcttgttatgtatttttctattgtacttctcttttagtaaaacatgatatacttgaaggctattaatttcctgtttttacttttagtgtttatctacatctttgtttgtaaagtaccagtaggcaacattctgagagtttgtcatttggagtaacttatctgataggaaccatgttatagatggttcttaggaaacttcccaagtctcattacctcatcctgtattacgaaacttcatagaaacctactgttaaatggtcaaacactcttactttaaagtctagctttcataacattcttctgatagtgtctggtagaacatctgactagagcttcctgcactccctagtaaggagcaatgagggtaaactccctttgagatggaattgggatgtcagggctgcctcataaccattctgtgcaaagagagtaattgggtaccctagctgaggagcagggatgggtggcctgggatcccggagtagagacagatatctgtttatgcacagtgggcatctaattggagggctctgtagtttgaagatgaagagagagcagtgcttaagctcacatttaagatgttcagagaagggggatacaacacttcgcttcatttgtgcacccacagaagccaggtatttgtatgataggtcttatacttagcctgtgcctcctccactatggattctttgtctttaaacatcagcactggtgagagtgaagctttgaacagtcttggaaaacattatttatcaagtcttctgtgagataaagtcggcatgcacataggaagtggctgaagttgactgggaattaaatattccttaatagatgatcaactgagagctgtagctcattactgtttaaccacagtgcatccgtaacagcactgacagctttggtggcatccgaaaacatctgaatttcccgagttttgaatcatgcttactcctttcattttcgatatggaaaattatatttatttttattgccaagtgggggtagtatgagggaaggagaagcaggaacaagggctggcatttaataaactcattggattgaagttgctagtatagaaaacagttgagggagttatagataaaacagttagaaagatgtagttcccgaaggatatgcatcagctcaaagtgcaggccaaaccaggtgcttgctcttataaaccaggtattattcctaaaatgggacatttaggggaaaaagtagaaaaatagaagcttacaactcagctaacttcatgttgccaagtgaaaaatctgaactccatcatatggccccatagctgggtcactcataaacagagatgtctggtgtgtgggccacacacattggcaaggagccaatggtaaagacaaactcatacgctccaaacagaacagcccagttactctggcactgttggcagcactgccaggcgactagagctgtgtagcttgctgtgcaatggttgccttatttactcagcttgattgactctacttttgatagctgacttctgaacttgtttggctaaaatgagaccaaagtgaacacatgcactaatatacaccatcgtcatgtctattggctaactctccctaccttcccacacacagacgctctacacctttcaggaaaggggtggggtgagaacgctcttcaagcaaagctcggtcattgggctgctttactttccatttatcccacacctacccacagaggaagagacatctcctcggcctctcacttgttagttcttgcgttattgaatacgaaaagaatgacatttttaactcttctaattgcattaatttttctttactttaaatcactgctggattttatggttccagaacttgaaaagttatttagatccatgtagtttttctctctcatctttagatgaactctgataggcaaataaatactttggcctcacaatcttgcaaatcagaagatatcctgaattctatggatcaaagagatctgtaataagcaaaacaaaagtgactggttctttattccatggaagctcagggctttatgtgttctagttttcaccaagtcaagagactttctagctctttgagtatgacctagaataaaaaagtaaacttatctgctgacccaacaatacacagtgtaactgaaacagaaagtttagttaatggcttttatttatttatttaattttttttttgtgtgcatttgtcagtgtgagttagtgtagtgtatactgcatgtgtaactggggcctgtggaggccagaaggggccatcagatttccaggagctgtagttgtagatgactgtgagctgtctgatgtgggtgctggaaactgaacttgggtttcctggaagagcagcacgctctctgctgagctttcctccagcccccagcacttattagttgtgacactaatcattagtacctgctttgtgttcttttcagtcttagcctgtatctttcttagcctcctctctcttcttttctttatccttttaaagtgaaaaatgccagttgtttcagataattgatttttatcatgcattcaacccatggtttggaaaatattgcaccaatgtatcttttttcttttctttttttttaagtgaataagattttaatgtttttttgtttatttatttatttatttttacatttcaaaccatttcctggtttccctccctcctagaaactccctatcacatcctccttccccctgcttctatgagggtgttcctccacccacctacccacctcgctgccctcgaattcccctatactagagcatctatggagccttcataggatcaaggacctctccttccactgatgcatgacaaggccatcctctgcaacatatgcagctgaagccatgtgtactcctttgttgatggcttagtccctaggaattctggggggtctggttggttgatagtattgttcttcctatggggttgcaaacccctttaactccttcagtcccttctctaactcctctattagggaccctgggctcagttcaatggctggttgctaacattggcctctgtatttgtaaatgattgggttacctctctcaggatgatattttctagttctatccatttgcctaagaagttcatgaattgatcatttttaatagctaagtagtactccattgtgtaaatgtaccacattttctctatctgttcctctgttgaaggacatctgggttctttccagcttctggctattataaataaggctgctataaacatagtggagcatgtgtccttattacgtgttggaatatcttctgggtatatgcccaggagtggtataactggatcctcaggtaaaaatatggaacttttcttttcttttcttttttttttttaaataaagcaataaacttggtgttctttggtttacggttgttttccaagaaccaagtctccttcacagaatattagttacatttctgttttgttaaaatcatgaggaggataaagttagttgtcttctacaggtagcatgtaatttattcatagcaccatgtttaattgtatctgattttgtgtgtatatatatatatgtgtgtgtgtgtgtgtgtgtgtgtgtgtgtgtctaccacatacatgtatatggagggggagagaggaggaggaggagggagaggaggaggaggtggaggaggagagagaacgtgagaacttcatttatcttatataactactttggcaggtagaattaaggatcattgccagcccctgacaaaaagcacacactggtagagccagtcttcaatttgggatcattttaattaatgttcattctcttccccttaggcctaataatttaattgtgaacagtatgtgtcacaacgcaaagaaaaacagacttgtaatgatgattgctgcattaagatgtaaattgaaattcgcaataattttctttctgaaaagcaaaaagaaggaaataaagaaggggaaggaagaaaagaaaggaaaagaaatcttttatagtggtgggcacaaaaacttactgctctacttaaatattatataattgaatcttgtaagatttttctttttatggaaaaagtaggttgacaaggaataacatcttactccacaggtcagggtattttaccaagccaaggaattcaaacctgaatgaaacatggaattttcctttcgttttctataatagctatgtttgttgaagagaaaacagaggaaaaaatgaccatcatgcctgaatttgaagagcaacttgtttgtgtgtgtaagacattggggaaatttttgggactgctttggctgactatacagaaatgtgaccactgaagttctaaccagtggggctgttggatccacaagaggaaccaaggcacataagaatggctatctgctaaagaaatttgcttgcttcattttcctagtccccctttgtaaaagagaatatatttaaaaaagaaaccaccggatgcagccaacttttctgattgtttgcctctcccgctcctaccacatccccagcctcccttctagtctctacgtttccctccttctcctgttactttctgtcttgtttctgctctcttccccttcttcatcattttctttctctgacactctctctactttagtatccctctgtcccttctatcacactgacttcttcggtgaagtctctgtgactgtcattatgacctttgttttctagcgtcttatgagaaaggtataaaggacttttccattgccacttaaaggggttatctagaaaacatattttctctgccttttttatacttttctttttctctccataccacacacagtttcagaaagaaatactgtcctttttctgcagatgttggcatgctgtgttctactccctgtatctcatgaatgagatttgtctatggatatcatatgctcattagaaatgaaagcaaaaatttcactctaaaactggactggctcagatagttttgcctctctaaggaaaccaccaaaacacacgtttataaagagatgtacttgttctgtctgtaaccacagagggagtcctgtctagctccccagtggggaacagatctaggcctggttgaagtcaaggctgggattctaaaaccacccttttcaagagtgttcagacaaggtataatgatgaacttgggagtgtgttgcataaacactctccaagggccaggaaatgagaagtactttcagtgatggtagaagaagtcataagacagtcaataatagggacattgaggctccctagatagacagatgtgattcacgaataaggatgtgaaaataccctcagacatatgactggacaaaactgtaaattatggtgtaatttgaataaattcagatagctcagtcatatgtgccttggataatgttggggtgaaggagcagttgggtaaagcatttgtgagctgataggccacactgggtaaaggggtttcatgaattccagacttactgacctaatgttgccttgctattaattagttcatatattttaagcatctttacatagaaattaaccctatacattttaagatatggattccattattgattcaggatttttctgtgtcttagatcattaagatatctccctcatatagcaaattgagactgcagtagctatttaggacacttttgtgacaggcaatgcagcaacatggtgagtgtgatcactatacagctattaacttgctttgttgttttatgagtttggccatcaatttaaatatgatcagcaataagaaaatttcttaacaataggaaaaaatggcagagaaatgagcatatttccaataccttgtatttcttacagatacttcaaaactaatgaaaacaagcaatagagcctcttctttatctcttaaaaagtgccaatcaggctttatcaggtttttatagtattttatttaaatattggcaatcatcattttgtctgcatatctagatactgctaacagagactcacaggactttcctgctctttgacctcatgttaaatagttttgtcaatgaatgcagaatgaaagggtgtccagtgtcatgttagaatgatatgacagaactgagctgtccagcagggtttatggtggtgatggtggtttcagggtggcacagagggaagggagcccacactcattgaatgcttacacatactgtgtcctttacttcttacatcggcttcatgatctgaatggtacatttatagagagtatttgaaaccaggaactgttactataaaaagagtgagcttgccacagattctcctgggaaggactttatattatagacccaagtgagaaatgaggaagatagaatcgacatgcctgacaaaatgggggagatagggcgagcagtgacttctgacttgctcagcagtgagttctcagacatagtgtatgcaattggtaaacaacagtgcagttagagctactctatctatctatctatctatctatctatctatctatctatctatctacctacctacctacctacctacctatctatctatctatctatctatctatctatctatctatctactttatctatctatctatctatctatctatctatctatctatctatctatctatctatctatctatctatttttggttttttgagacagggtttctctgtgtagccttggctgtcttggaactcactctgtagaccaggctggcctcgaactcagaaatccgcctgcctctgcctcccaagtgctaccttattgcatggcatctcagaaaagatgacgggttgctctgctgctcaagtaggtaaagaaatgtcagaagaaccacagactgagttttaatttgtgcatttaatttgattcccaggaaatgtaccttttgatggtaaagagaaatttgacttaaaaaaaatcttaaaatgacttaacattttttattgtttctactccttagtctcatattccaaatctcattagttaaattagtgtttaaataaaatactaaaaccacaaaacaacaaaataaaacagagaccaattatttaaaaaaccacagaagactttttgtttgttttgttttgtttttatatgattgtattgtccaggttagattttaactgctgggctcaaataatcctcctgtctcattgtgagtcaccagaattccagtcttatatcacgatgcctgctttcatgcctaagtgaacatttgtgtagacttttgtctgatacctagccccacggatgacctgtagcagttactaactgtgtacatgttatagagatgaccatggcaagaagtgatacagggtctgtatttgcttatgtattattgtcctatttacatcaacaggccattaccaagagtgtactgtgacccaggaagacatgctaagacttaagtgttagtatactaaaggcactttgcaataccttaaaacactaacagagacagagaagaagagaaattataatggcattttagcactggagtcaagatatgaatgaggtgagaaatgtgaagtcttccagggtgaaatggggcaagtctgcattaagctatttccattcaaggggatttttataggagtggtaggcttttgtctgggaccacatggaagccagtaggctgtttagggcagaggggttagagtatctagatactaagagagctgggatgcttggtacctggaagtttaccatgctttccacacattaggtgagaggatggagagaagaacaagctaaaaagcataactgagatactggtagtatgctgatttccttatagaagcttggaactatttaattttcactttttggtaaacatgtaattttcttttgctagtttttattttattgtatttttaaatgtaggttcttgttatggagccaagggtggccaagagtttttgatctgcttgctccatcagcctctggcatgcaaggagttctggtgtgtaccactattgctggcccaggacatgcatttttgtagtgattttcctgttttatttttatttgctccttcccctgcttgctgtgtgagactgagtaactgctagatccttggacttccattcacagctgcgactgaacaattgttggggattgggctgccgactgtaagtcatcaataaattcctttactatctagagactatccataagttctgtgactctagagaaccttgactaatacagaagttggtctctattgagaccattagtgccattgctgaagtatgagagctgcagcacattagatgaaccagtggtgcagagagcaactcagtgtgaaagaatcttaaaccactgtattggaaaagctgcaggtcagggttggagagaattctcagtggttagagctactctttcaagggatccacgttcagttcctagaatccacatggggatcacaaccatcttcaactccagttacagaggatcaaatgccttttcctggccttcataggtcccaagcactgtgcacatgtggtgtacatgcagtcagaacacctatacacacaaataaaacaaaataaaacaaaaaaccttttaaaaacaaataaaactgatggtcagttttccttaagtttttaatttaatttaatttaattttattttatttttagttgctctttgaactttcctagagtttgacataaattcactttatagacaacttgcaggttagtgagagtctaaattctaaggccatgaatacacaaaatatacaaatgtgtattatcacaatcacttccttatgacttgggtgttttcctttctgtgaaccacttgtgatttccgtggctaagctttcctctgtgcccgagtttccgttctgaagggggaagatcaggctctgcaatctctgttattagtttgttttcctccagaggagtatttcaggtctccaagcctcctctcagtgacatcatagtccctttgacttgagatgcttgggtaggttgctgccagaacatagagagcagggtgtgttttccaagtcagaaagttgtccaccaagtcacagcagcagcgaaaattgtcagagaaacaactaattaatctctgctcctttacagctgcttaatgcaatgcataactaaaagtcctgttaaattaattaatgatttcaattatgaacttttcttcaaaatgttatgattcgtatcaggctgataatgcagtgacctgagagtgtgaaatctgtgttaggaagagagtcgccagttaattgattcacaaattatttaaagtttgttgcacccaagggagtgctctgtttcacgacagttatttcttaaagtgcacaaactcctttttcaccttaagaatgtcttgggtgattaggactgataaaacaccagcaagttgctggacactagaatttgtagatgagtatgtacagaaccagtcactcaccaaatctagggttctctcctgtggcagtttgtcactgctctcattttagtaatctgcaattgttttctagctatcactcttttaacttctggaatctgttaaatattgaatgcatttcacatttgaagacaatgtgaactagtacacctcctctgggagccctgaatgggcaataacacaacacaaattgttgtgataattgccaattgacgtttgaagcatttgggttcctagggagtctaagatgccagcctgaagttctggagagggtgctgctttcccagcgcaggcaatgtggataagacagctcaaggcttttgaaaaatagcgtacaagaacaaattaaaagcgccataaacacttgcttccagtttggttacttcacccataagttaagtagaaataaaaatatacatatgtacaagcaggaggggagaatcaataccatcaatattttataatacatttattacagttttcttgcgtttttatgctggacttgggtggataaggaggccttaggagggagaatcctttctgagagacccgggacttactaggttgagggcagggttcttgagcagacagacagtcagggtgaccggaaggtccccggacataagtggcatttattaatagtaggtgcgagatccattcttgttccacctgcatttggacttaatggaaaattgaaaagtcatgtgacttttggttggctgaacagtctccttctcagttttggtccaatttgataagctgtacttgtatttgtatttgtaatttcttatggaaccaaggtttcccctaagcctgtgcttccccgcgctcagtgggcgatgcatttacaggttggagcaggaagtacatcgtggcagactggtcatagcatccccaagtcctggtgactcttaacttcttccattcattttcttgaccccagaaaattacccagagagaagacaaaaagagagagacggttacaaacaataagtttatctttgttgaacttgcttcagggcaaaaaaaaagaaaaaaaaaaggaagaaatggacttgaaaggggagtaaattcctactaattttcccactgtaggaagtgcactattttagaccctgactgactgcttctgttttctagaatcagggagcctataatctcagcaccattaacaagtgctgtcattcagatacacagtgtctggctgatttaaataaaatgaaatgaagatagttgtttctggtcccttggcttcactcattgccataaacatatgctccgcgtcccgcttcttccatcttatttatgactttaatttgttgtgtgggctgcgctagaaattaaatttaatataattctccaagggaccctgtcatataataacatggtaatttctgtgtatccttttgaaaaatgaggaaattaattcttcctgacatgttctaattattccagtgtgaacggcaaatccgtttttcctagcccctgaagtgttataggcaaatggctggtgttcaaagccgaagtgctaacgctgaccagcagtgcgtttaatttgaaacatgagcagacacctttcaacacacctttgtaatattggagtactttacaggaattaattcactacttatttggcagcttagccttggggttatgttttttattcatcaatactgtagccaccgttagcatagtgtctcccattccctttagcgctgaggctctgcctggaacttgctgtgttcagtggggtagctcagctgtgtgaatgcaggattccccagtcactgcagagatatcagttgtatgccaaattgtgtttacactttacagagaggtatagcaaggtctcaagtgctaagcttaattatagtctgtggttagcagctttgaactgaaaccacacagtgtaggaattatcaggacagccctgctgtgggaagataccgttgtttgccctgctgtatgcttcaggtgtgaaaatccagagttttgtgtgggaaatggtaccatgggcagttcattctaagagttgtgaattaggtatctcaagattttgtctctgtcacaaaggaagcagggctaccttggaaaataagggccaagaggcatttttgttgctactgacagagtgggacagtctagctagatcaatcggaagtcctgtgcagcattctgtacaggattttctttatctgtgatcttcattgtaaactggctgctagggtcctttgttttagtgagcagctgataaatgctatcacatgctggccatttattgttatcattaacaagaaaaatgaacgcacaagatactacttaaaacagaagctggaaatacaattaaacttaaataaaagaagcagaattgtgtctggagtgttgtaataaaggctatctgtttttgtaactccacagagcatttcctctaagttttaacttaggagaattggagatgggagcgtaattatcctgaaaaatagcattaatattgcgcatacattttcttctgaccattcagttgctagatacctagtttgattctctctgtcagtctctggaggcttaaacagaacttaaagaggtttgatttctttaagctcaatggatggaaggagtgggcttctgcaggctagagactggggtgagcacaatagcacattcctctctgtacaatgccagggggaggtcactctgtggcttagcctgtggcttggtagcagaagctttgaagacatgctggcaagtaagggggcaacagacctgtgtctctctgcaccacaagctgcaggcctgctaaacctttctcttcatgggcttctcctggtgccttcggaaagggagggtctcttccacttcacttggcttttccttttcctcctttgttgtccattgaaattgcagatagattaacactcaaggcctgcagtaggtcatggtctaaaggacagatccctttcagagtgtgacatcccccttctgtgagctctaagtaaaaccaaggctttcccttctcctgcttattcttccttcctgacagtcttcagggtagagggtccgccatcagttaccgttgcggggattctgtgtctgcccagtttgttttctacaggggaagacgctgcaaatgcttttttgtgtttctatcagtgttcccagaaaaaatgagcaagagagacaaatatcctcctcattgcaatagtttttctttcataatgtcacttacattgctttgttcactttaatctctaaagttctcttattataattaaaacctaatgtcaagaaaatatgttgtttatttctcaatattctttacaggaatcaaagcaacttgaatcatatattaaattttatttaaaaacagataagcgatagtccattatttattctgcatatgtatgcatatataaaatataaatacacacataaatacacacacatattgaggctcagatttaattagtattttctggataatctcatcagtaacttcttttacagcagtatgcttgttttctgagtcaaatccttttttaaaaagtgtttctttgtatttcattagtgatgggagttaacatattcttccctttacttacatctgtatatgtttttgtagcagtcccaacagctaacatttattgagtaccccacaatagcaggcattgtggtgatcattttatatttaacattttcatgtgaaaccagacaaacttctttgaggtagctgtgtctgtatgtgtgcatatagaacattggctacttcagattaatttctacctagttagctttctgttgctttgagaaacaccatgagcaaaagccgcttgtggaggaatgggttatttcaccttaaaggatagagtccatcatcaagggacaggatgccggaacaggacatcaaccagagtagacactcaggaacccagaagcaggaactaacgcagagatgctatgtggaatgctgcttactggctttctctgactgctgcttactgcatacaggttcctgttcaacagccctttttatacctcccaggactacccgtccagagtggtaccatacacagtagtctgggacgggccctctcacattaatcgttagttgaaaaaaatgttccatagacattcacacaggccaatctgatgtaggcaattccttaaatgagatttctttttcttaggtgattctagttcgtgttaagttgataaaaagccaaccagcacagtagctattactagtaacttttgtgatagagtgcttgtgtgtcctgagtttcaaccaatatttgcctactattcattattgtgttaataaaaattattttggtcatagagaaactagactagctgtcctaggatcctagcctgtgaacctagtacttgaggagtttgaatcttaacttgaaactcttctctgaatgctgttgtgaagcttgctttgggtgctacgaggtcagaaagtgcctctgctgctgtgttgtttttagtctcatggaggtgggagtgtggctatgagaaatgatagataatcctgggtagaatgggattagttttatattttagaataatttaggagagaattgccgtggctgttgaccagatgttgtgttttgtttacagatgctagaattctgtgactatttgggggattgagcatgatgtggtgatgtcatacttagaatctagttagactgtaggaagaggtgtcaggcagttgacactgcagcaaggttgaatgtactgaaaacttcccatggaggaggccagaaggagctacttactgctcagaatatgtttcttcatttaattcttccaacaacctagaaacagatattattagtggtaatattatgaggcaggttaaaaaccaacaaatccccaagctagattgatagacataaagtgaggaaagtgaatttgggctcagtctttgaggtttcagcccatggttggttgcttctgttgccctggggcctgggtggaggcagcacagcaaagagggagtgggctgtggggcaaagaccctttgcttaatggctgtgatgtgaaagacaggaaggaagaggactggggtttctatgtctcctctgagggcacatctacagagatctaaaacctcccactatgctctgtctcttaaagtgtctgtcacctctgaataatgccaagcctttaaacatgggagctggggggcatttaaggtccaaaatacagtgcttgtcaacattgcactgtgtgaaagtgtggctgtcaggggactaggtttgggagtcatgtacaaaggattgtagttaaagctatctaatcagaagatatgtcttatgttctctctgtctgtctgtctgtctgtctgtctgtctctctctctctctctctctcacacacacacacacacacacacacacacacacacacacacacacactggggggtgtggagggagaatagagcagagagagggagagaagagacagagaggaagggagagagagagagagaaagacaaggaactaggaggagagaggaggagacagatgagagaagggagaggggaggaaggaaagaaaaagaatcctaaagatggaattatgggggaatagtgaaagggaacaagaggctgtggaagataagaggaaaaacggaaaagtaaattgggactttttaacgtaatggaacacgaaagagactacagaaggggagtgtggctcaagttgcgactgttgatttgataaagtgtgagccctgctgagaatcttagaagaatataaggagaaagcatttgctactctacaacccaatattacctataactgagaaatcatctgctctgccaatgcaattagtcaacagcagtttgttgctaaggccatggatggccaaggactgctgtacaagaatgatggagtcatgacagagatggaatctgctctgaaacaagtgagtgagggtcccttagtggagagtgacatcccctttaaataatttttattaattacttattagtgtgtgtgtgtgtgtgtgtgtgtgtgtgtgtgtgtgtgtgtgtgtgtgtgtgtgtgtgaaggccagaggacaacttttgggaattggttcccttcttccacagtgacctcagggcatctggctcatgcagggtgcatgtttacccactgagccggctcagcaccccttctttttctggtagggaagacccaaacatgtttataaacagatatgaaacaatcaggaagaaagagaggggagggagaaagctgaaagaagacagtggaaagaaaaaaataacacccctgtttttgaaatacttgtacttgaagaagacttctgctaggagtgtgggtgtcctaacaaagcactgagactatgtggcttagaaagatagtcaggctccaaagcctggaggctggaggctcacactcctcaagactttcattgtctgtttctggcttcttacaatttggtggtatcactggtcccagatctaacatttatagttcatgttcttataggaagatgtgtgttagagttcatgtttgtctgttaagcctgcaactcagtgtcttgtctatcattatgtgcaaacagctttaaagataatttggatttttcaaaatatataaaagcaaacaaaaatgtataaattatattttaaagagctagacctgctaatatacacccaacacccaggagggttaaggccagcctggctgtatagtcagattctatctaagaaaacaaaaaccctacaaaaatacaataaaatgaagaagcaacaaaaaaaatttctaagcccaaattttcagttcttgaaaccattaccttttaagaaatttgattacattctaaattatgtgatgtaacagcaataaacacagatataagttgtttataatccatacaaccattggtatttgtgtcattttcaattaatacttagtttgaattatgactattaataagtcatcaatagaacactgaagaattaatatctataattccactggcagagcagaggagctctcagttataaataatatcaaatttgattggggtgaatgctattctttatcctgtatgatggactgggaggcagaatagttaagcacatttagcagctagttcaattttgtaagagagggtgtactatctgacattcagtgtgatatccaatagaaacccaaagattgaaaaacaccaaggaaaatggaaattatctttacatattcatggccatcactttttctgtacttattttatgaattaaatcacgtgacttttctcctaggtattttaatgtttaactcatatggaccataaatacaccacttcagatgaatatttgatgtggttttctataggttaataaaatgtttagtaagtgcttaggaaccaggcattctcctgggctagatcacatctaaatacaagggctttctgtgtcagagttgatgatttagaggggaagatgatctagatatataaatgattgtagtgttatacagtaaaggtctgtctaaagtgacgtgaaagagattatcaaaatgcatttaaatgaaaattgcatcacgaaagccaccactggaatcaggtaatggtcacaaaaatcaaggtctaagataccaaatctttctgtgttctagcttagaattatttcagacacataatcaaagctttagcagcaccgtttgtatctgctgtgagggacatgatcgactaagcttattcccaggggcagaaacatcagtgacagtactcagacatatagacacaagctcactactgtggctggaatgaagtgtagaaggaagtctacaaagtgttacagatgtggaaagaaactttacaattggttctttaagaaaaatacttttcagtctccaaggatgtcagctaggcaagttctttactattgagttacatcctcaggcttagactttgactcttatcttcctcttagatcacgttggggataaagggtcaaatgctgagtgctttcccactttaatatacaaccagtgggtctatcaacagggtttagtggtaggtaaattcacttggtgctaagtgggaagacctgagttcaattcctagaacccacaaagttgaaggagagaactgatgtccataagcactgtagtaaaagataatgcagctagtgataagccgaggaagtagctagctggccaagaccgcatcttgcatgacaagactcatgccacagactggattccattccccacactctagtagccaggcagacatctgtaatccaagtacttcaggggtaaagacaggagggttagcctttgctatataacaactttatagacatcttcctatatgataccctgcctcaaactatttcacaataatttgtttatgtaatatgactaaatggactatctgataatatgtccatccactggaaaaatgatataaaattttgtcagtatttctttcttgatgtggagatgtgatgtgtttgtgactagaaggattcagttggttaaaatgctgaaggaccttgtataacaggaatgcaaactatcctgtttgtgattgggagctgataagtattagttagctccagaactaacatcagcactaaaggaaagggacaaccggtcacatataaagtaaaacttatccttttcatgatgccttattgcacaatcttgccacccccatcctgctcatactgctcagttacttggttgctccctccaaatggggtcagaccgcatgcacttactgccctgattaaacacagtgacctttcctatttgactgttaagggtgtgttgaatagcacatagtaacaatatattttttggtggtgatggggataataaaaaattgaacagctgctatttcgaggactaatgcatcaatgactagaaatataactagatgtgacaagtgaggactgcttggtgggtgactaaatgctgattgaacttttataggccatgttccaaatccggtgtaccaagggaggtcctttaatggccctcaagttgtgggttatacctgtgagcctaacccttcttgcacaatgatttacaagctgtgccttgggtagtccgtggcatgagagcatttcaagaactgcaactattaagtcaaaaatattgttgggtgattggattcaccacaaaaatggagaccctcactgtcttagaaaaaaagactggttaaaatttgagactgtaaaaaaagataaatgtaaaactgaatttcaggtttagacagttttatggccaaatatatctgatataactctgacactgaaatctcacctccttaactactggttgtaaacgtcaacttcttaagcgtgggatggatgttggtcagtggtgctgcgggctctgctaaagctgaaggttcagtccccaacaacagcaatggctagtccccactgtttcagtgttagtcacaaactgctttgaatccttgaaagttcccaccagtctaccttggactataattacattggtgtatgccttttagctaagagcaggagttctgaactctcaagagagctttgaaagtggtgttgattcttttaattgtccttatgtcactgggtgacatatggacaccttatgctagatatttgtcctaaatgaagtggtattaattaaatgtagttctttggttccttcaattaagataactctagaccttcagttgttaggatcagaacaatcagaagcagaggtgccctgaaagcgctgtgaacttaatgccagttgaataaagcagacaggataggtgatggttggtttgctaatggtacttagggaaaattaccaagcaacagcatttcctagtttctaaatatgtctgtctttactttctttcctcccacttctctctctcctccctttctctccctcccttcttaaggtcttattatgtagctcaccttggcatcaaactcatgatcctccagcctcagtctctgagtgctgggattgtgggcatgtaccactatgcccagctttcctcttctttcttgtcccaaattattccctgactacattacaatactacctgtgggaggtatttgatgatgcctgagtggcacattatatttataatagtaaaaatgtgtaatagtaaaaatgtcagagttagaaattctttttttataatccaaaagaatgtagaaaattatctatgatgaatacttaaacataagatctgtgtcacaatgaagcaattaaaacaataggaactttagtaaatttaagctaacagctgttaccatcgacatatgtcacagttgtggaaaggtacacgtgcagtgctaagtgacagtgtgcttgttcagctctcgaaaggccttcagctgccctcgaaccacacccaaagtgcactctagttttcatttataatctcttgttacatgttacacttctttgggtttcctttttatctaactcataaatgtggatttcgttctttcttaggacctgtatcttaattctgtctagaaatgaaattctcaaagggtatcggatttttgtctagctattataaaataactggatctttgttttcagctgtctaaattgtttactttgagaatttatgaggcttattccacagacattatcacggtagatgtacggtctgtggtgtgccaggtactgtttgaagcagggtccctgtatcagcaaagagaagtctttgctctcattatttattctagggttgaggcagcaaaggcattacaaatgacaaacatggaaaagaactgttgtctgtggaagagatgagtgctaacaagaaagaccgaatgggtgaaagaggtcaggaggccaaagtacagactttcctagtttattagagcaaaaacagtactgcctcacagagaaggtggagtttatattgatgctatgagtgaagggatgacttatggccccgaggggagactgtcaggaagggacatagcatcccatcacaggtgtgaactgaggagtgagggtcagagctacagaggtcagcagagttgtgtattgtgaaaggcaaggctgcatatgacttgagccattttgaagaaggatgaagggaaagcagagacaggtgggttcgcagtcttctgtttcaagcaatgtgcactgcctgctgctgactgtggactgcatgatagagataacaaaatgccatagcccaaagggcttatagacaagaagtacttatctctcagagttctgtaacatgggaggaccaaagccaggcacagcccatccataagactaagagcctgcttcctcacacatagctgtcttcttaccctaatctctcatgggggaaggggtaacaagtctctccctgggcttcatatagtaacactctacttaggactgaatcacctctcagagatacccatcttgtaatacagtcaccctagggataagggaggactctatgggagcacaggcattcaagccatagtaggagagttgtgaatgacccaggtaaaagttaatggtgccttagatccttgaatgaatgacccactaaaaagactgtggtccacccctcactgttaacaaatgtaacttgtgtgaattgattgaattaggtaagtcttccctgaagaagtaatgattaagctgtaatctcaaagaataggcaataaataagataaaagggtcaggatagagatagcacaggaacatactgttttacacaaaagaaagggcatatacaaaggtcctgtgctgagaaagtgtaagtcaagttccaagagctgctggatttctggtgagacaaagctcagagtgctgacatctgaatactaatgccttggcatgctccattttttttctcctatatagtctgagggagttcagctctgtttatttttgatttcagagtagaaggaattgaaatgtacaagcataaagcctcttgctcagggtcagatggctaagaaattgaagggccaaacccttgttctctttatcagagtggcaattaaatgagagctgagacattgttcatctgaagttgtgtcctcaggaacaagaacttttgacagatgctcagtatttgtaaatgcgtgaaggagggaaggagggactagatgggaatcgaggtgtatttcctccatgatcataatttgagctgacccatgtctggggccaggccaggatgcacaggcacagagctgagcttttggaccatttcttatagagaagggtttgaaaggggccagtgcctgaggccagagcagtccaaagggggaagcaaagaccttgctggagggggacagagctctgagggatgagcactttcaaagcagcttcctaggagatagagcagaggaagggggtgagagggctctgctcaagaaagcgtcctggggacatgacctgtggacctctctgctgcacagcagcccggcagccagcacagcggcacagcgactcatgactttcactgtctgtcccagctccggtgtgcattttctcaccggtttcctttagcgcttccccttcccccaaatattttccccatcgtgctctctggtatcttgagatgcgcagaactttgacatgtggttcctagccagcatctgaggagtgtggctttacatctgcccaacataagcttttctcaagcaacagatgccggctgcaagcctcctgctctgcttgcttcacctttgcagcacagtcacttcaatatctcagccattttctttcatcttttgtcacagaagaaaaactgtaccctctggttttttgaggagacatctctacttgtgattttacaaattccatccccactggagatgctgttgtgtgtttctgaaattcctgttttgcttctttttggctttggttaaactaatttgtctttttaaactctctagttattttgtttttaattaaaatgtaattatatcatttctccctccctttcctttcttcaacccctcccaatgtccctactttttctctaatccttggcctcttttcctttaatcatattgttatgtatatatgaacaatatacaagtgcaacctgttaagtccatttagtggtgcttgtgtgtgtttacaggacagacagaatggtattggataaccaatcagggatcatcctctgggaagactagttcttcctctcccagcagttattagtggtttgtagcttttcatattggagaagggcctggtgagatttctcccatccacattaggatgtcaactggtgttggaattgttcaggtcttgtttaggcagccatattgtgagctttcatgagtgtagcttctctgccatgaagaacatccaacctcacagcagatttactggtccttggttcaattttctttcttaaataaacatttttcttattattttgtttaaaaaaattctttctgtctttttctcccttcccctttcttcccctctctgcacctgccatggcaagtatggctcaggaatttttgcagaagaggaagcagaaataatttaagagtcacagatggtgtaacatttcaaggcaagagtgttttacagatatggcaatgtaaacacacatatgaactcaaggaggttgaggtcagttctcactcctaccttgtggtttctggggatcaaactcaggtcatcagtcttggccgaaagcgcttgtacctgctaagccattttgctggacctttaacatacaatttttcctgctaaactgacttttgtagtgaatcagttatagcagtgcctatgagtatgctttataagctgaataaacattctggtactggctgaaatcactaaagcacatacgtacaaattattaatattccttaagatagttttcctcacttatgctaactttcagaatattttctttcttccctgtatgattaaaacctcttaaaaattatctctgcattgtatctatatttccttactctctgtcctaaaaatctaactctagagaatctgctaacattaagactactgaatatccctaagttccatatttattgtttttattctcagttctcattcctttaactcagtggttgttgatattattggctaaatgcggctcaacacagtcctcaacgtgtagaagatactcagaaggttttagtaagtgaatgttttaaatgaatttctttatttttttaaatataggccttttccagtttagatctcattccactcttttctctcaatggtcattctcggatctctgatttgtccttgtgccttttaatgctccatgaatgaatctcacacctcctccagcccgagctccagccccagctgcagccccagctccagctccagcctaagcttcagctctacctgctaagggagaaagtcagagtcaatgaaaggaagttggaagtaatatcagagaggtagctggtgccttgaaacgagcccccgactatgaccatgatggcagctttcattctaagtggcataggaagtcactgagggtgttgagagagaaacaagatatgatatatattaaagtaattgtccttttataggaaaaataggctactgaagaacaagtgtgagatttggtctccaagcagcaggaagagacaaatgagtttagatgaaccatcagacgtgtgactggagcaggagcagtaggaaacagtgtgtgctgtgtgtgtatacattagtagaagggaaagaatcccttcttgtggcagacacagtctatcccgttggggttgggtgagttggcaaaatctttcttcccaggcgccttcttccatggtagctaccatccatgccatggttcagtgagcagggtgccagctagatttactactactcccttctttattggaacattctgatatagtagttaagggaactaatgctgtgtaactgtcctgaataggaggaaagtgaatgataagatattcactttacaaggtgtgtgtgtgtgtgcgcgcgcatgtctgagagtgtggagggcagagcatgaaccaggggtcctttctaaggtgctgtacacctagtttttgattttttgtttgtttgttttttaaggagagtctctcactggggtctggatggccagtgaaccccaaggatccatctgtctctacctccccagctctgagattataagtgtataccatcccaactgggttctgggattgaactcaggtcctcatgcttggcaaacaccatacacattgatctatctctatagtctgcaccatacctcaagcatttttttctaccatcatcattctcatccaggcccttctcacttcccatgagtttactatctccagctgtattttatgacaaggatgactccttctttgctttgatagtgtggtggtttgagttaaaatggtccccatagatccataaggagtggcactgctaagaggcatggtcttgttgaaataggtgtggctttgttggaggatgtatgtcactagggggtggtctttgagctcccatatgctcaagctagtttactttctgttgcctgctgatccagatatagatctctcagctctttttccagtatcatgtctatcttcacggtaccatgcttcctgccatgatgataatgcactaaacctctgaactgtcagccagtcccagttataacagttgtcatggccatgattttctttccagaaatagaaaccctaagacaagtagtgtccagcaagatgcacctgttattggtacttcttgatggaaacaaagaccaaattatttcatggcagtctttttacacatatcattatagtcaattcctgaggcctgacagttcattatgccagcagaagctagtcatcacagcttatttctatggctaggagacctgagctagtgcctgtacagccactgagtgacttatataccttgaaagtggatttgggggactttgtacactgttagtgtcatctgagaagctgattgccacaatgtatccatgcttaaatagctaacctaactataaggaaagcttaaaacatccttactcctccattgggggccctgcgttctatccaatagatgactatgagcatccaaatgtaaatgaagaaaatatctaataaaaactgtttaaaaaaatccttactatttcatttgtacttatttcaacaactcagcggtatgttgcaatggtgcagtgttgtggatgaagccagtccaggggctgctgccagctcctcctcagcagcagtacggagttaggaggtcatgggttcctctcgcagtctgcaggccactgtgctaggggcgctttcagaagctctgctaattgccagcttgttttccatatggttctgttttaatgaagcatattcgatacagatggttggaaagtaagccggcgatgtctaaagtgctctgactgatcactaccatgcctccactccagcaccaagtgcctctgtaagctgtctccattcttagcttcttttcaaaagttgaaatggggcccaagttaacaaaaaaaaattttttttttttgaaatttattcttggtctctgaaaaagaaagagggggaagaacaatgacatttctactgattctaagtcaaacccacagtctagctaaggttatctgtggggtctctgcatcattattatggctcttttctttcatgcttaggtgaagtcatggacattttaaaagattgaccattcagactgggtgtgccattgcacccagcacttgggaggcaggggcaggtagatctctgtgagttcaagactagcctggtctatatagagttccaggacagctagggctacatagttaagacactgccttaacaaaacaaaacaacaaaaaaagataacctccaggaatgggaaacccagtaacaaatatggaaattagtgttgttacacgaacacacgttgacattttaagaaaatagatcaattggagtttataagcatattgtacattttcttttaaaatattgtttattttcatgtgtttgagtgtttttgatctcacgcaagtctgcacattgcttgtgtgccttgtgcccaaggaggctggaagaaggcactggttctcctggggttgcatttacagacgaatgtaagctgcttgctgcttggatgctgggaactgaatccaagtgctctggaagtgcagccactggtcctaacacctatacacctcttcaaatcctgtgcattttctatatcatatgcaacaaaattatacttgctaattgttaatattaaattagggatgacttagagatgaaaatagagataaaaacataaactgcccaataatactacaattttttcgctcttctaagacaagaatatcaatatacagacattgtgtatgtgttagagctgtagagaaagttaaaatcttgcttaagactgagaggctgctgttctctgagtcttttattttgggctgtgtataaagtaaaagtgggcaatgatcaggccatatttgctcaggaatatagataatgccctcatcagacttgaggctgaattctgcaaagcaaaagggaagacacggtccaatgggtctgcatccattttgctggtttttttccttcttcttctcacattgtcactaagatattctctttgttatctgaattagacatctgctgactggtggggcctcatcacctgattgtgtgaaaagtcttggctgaagctgttaggccttggaggcccaggaatctgctaagtgccactgagcttgaaagacataatgtccttggtctgttgtctcttcttcttatggatacccttgataaatagcactgaagtatgtatggaataagccaaggatcactatattgtaatcaatatgtagcccaaaggattaattaagtcttactaagaaataactcctcaatttcagagaagttgaaatgcgatacaaatttaaattaattttttgcttggcttgtttttcttggtacagagagaggatcggaacactgaagggaaatcagttagaagattcccctttgcccaagaaacttgtttgtcagaactcttctagagttgcagtcccgactttcgtctaactcttaccgcagctatctttctctagacaggccagatagcatttcctccaaagtacatggacgtgtatggggagctgggccaagcacacccttctgccacagaaactgtcaccttaaataaatgtcagagccaatgttgaaattttatgaggactgagagaaacgtttgcacattttcatgtttttttattttcagacttccctttgaaaaacatagtctgagaaaaacatattgtctcttgttggaagattttactaagttctctttactaagttcccattgaaagaaaatgccatccaaaactagacaagatgaagcagcaaaccactgttcttttaaaaatcttaataatggtggcccaccaggcacactagtcttagtcattttggtttctaccattccctcaatttgcatttactctggagattttctctactcttcttctcttaatcattttatttcaaatatggcttaacttttgctggagccagagcttgagaggtcagagtaagaaaagaacagtcaccccatgacagctgtcagatagctgagccttggtgaagatacagtgcattccctaataatgtttaaaagcagagctggagagtcacttttcagttggatgcaccttgagaaatcccagaaatgttttaaagacccatactgtggcccctttccccgtctggtggaatacttcttaaattcaaagggaattgctcattgctctgtgtagaacaacttttcaggtacagggacctctccactgtgatggggagcttgaaaaaccatcactatcatgcatggcacagtagtaacagggtggggaggactgagatgctgtcttgttcaaacagcaggggaaggaccagagagacgcaacgtttcctcagggtggatgtcaattgccttcaagttgatgttgttgctgttgttgttgtgtgttcctcttacttttagttgactaatactcttgttttagacataacataacatatttggttaacctttgtattgaaaaggttttgtttttgttttttcaaacctaatgctataatttgctctagttcttcaactatatttcctccttctcctcctcctcctcctcctcctcctcctcctcctcctcctcctcctcctcctcctcctcctcttcttcttcttcttcttcttcttcttcttcttcttcttcttcttctgtcttaattttgtcttcaaagaaatagcagagcccagattttactttaattttaataaaatattacctcagagaagaattatgttttatttttactagtttatatggaaacacatataactgcaataatattttaactatagtgtgtatagaccactcatttgaatgctgttcaaatctttgtaattttaaggcaaacaagctacaaaaccataatgtgtggtgtggtgtggtgagcacatgctgtaattggataatcatcctggtgagttcatcgtattataggcagaggagagccacagcatctcacatagagaaatatgcaaataacctagcagcaagcagccctactctagaacacttggtgagggaacatactgaatggcttcattttgtgtggaattgtagtggttgataagtgaggatactaaactaacagagatttacattgtcttactgcattgagttgctagaattccccccctgaacttgcaaagttaatggaaatactccctttatagggtgggaagtgtgatgtgcagactacatgtgttaggccaggctggtttctactgtttagaaatactggagtgggaggatgtcttgagtgaaagtgacaaggggcatttgtttagctggctggcagtataaatatgtcacttagaaaggactgatagtgcatctcatcctggaagcaggtgccagcttgtaaaacatttctgttaaacttcccatgttagttgaaggtgatgagcttaactgccagaagttggccatccagcttccttttctccttgatccttctcctggcctgtcccccaactttatctactttttttttaaagattcacagaaataaatgaaagtgaaagccaaggatatctatctggcccactaaactctgttaagattatgtaaagatatctgtcagttagaagtcaggctggaaccacaaacatttcttccctcctcccaattctcttgctccaggtgccctgttcttaaggtttcttgttatattctgcttgacagtagaagcatctgctttaaggggacaagctccctgtggggctgccttgcggaagttccaagttctcaatattaaactctccagtctctcacaaggtgtttggctctcagctcttttctttccttctcctcttttaacagaagagtggacacaatgaggatcaccacaacttgcctaaaatgattggttttacacattttgatgtaaacaaggcaaagccatgtgctctgttttaggagtgctgaggtgaagaaccctgtataccctgcggggtgtgatttcatctgggcacatcctacattagcagcttaaccaggataaggtgctgtgagagggggaaatggttagaaatgctgatgtagggattgaagactcttggcactcagcaagcatccagtgatgtccaaggaccacctggaagagcagtctggggaatgtacaattttctcattttctttaaaatatagtggcatcgggaatgtttgagtttgtttaaagagccttttagatatttcacgatagtctgcccttttgtgagttaggcaagaacggttggctgcagaatgaactgagcagtgatttttaacgggcaaggctcttgaacattgcttgcccagagagtcaagtgaaggactctctgcccagagaggtggaaaataacttcaaattacaggcaatttctgtgtactaatatctgtacaaggtctagggtattgtgacccaccactatattagtatttcttttatgagaacagttgggatgtttaacattttaaaagaaaaatagattcagatatgataattagcttatactagaatatatcttttctattccaaattaatttgttgtgaattttcagtaaaatctatttcttctctccctcaactgcattctagtcttaatctgagtctatcactctttgggtttgtattggtccttggggatgaggatcattttaaactctgaagaccaagatattgtcaggcaagagcctgagtgtgaatgaactccttaccctaccacagtggaagttaaggtttttctgaatttgtcatattctagcactgtgtctgagcctttcagatagaaagcacaatgtattgccctttgatgggaaaggcagggtgtggatggctaggaggcaatgcaggtacagtctgaatgggatggcaggtacacagtttgccattgtctctcttgatcattagatcatcatggttagtcttagagtgtcaatacctggatttttcaagtgcaattagattgaaagtgtttgctgatttggtctttgcatctctatgatctgtgttctgtgttgttgcttagctccttgtcatcagaagcagccatgacacggaagtagcctatagtgaccaaatacatgtctagcatgtaaggcatcctgggttttatccccaatacttcataaatagatagatgatagatgagtagatggacagacagacagacagaccagctcactttttttttattcaattaggagaattcttcatatttcagagcaagccctacattggggtaggtgagtttgttcattatgaagaagcatcagatttttatagggggcttcaacactttgttgtccagttcagagtaaggcagacagtgttgttcctatattatcttggactccttgtcttccatcctggccacctcgccatcaacttagacgtaaagtgtttggttatttggtagtgtcttattatgatattatgacattctgttatgtagccccccaaaagagaaaaacccaaacaaccctcaaaactctgattctttgttgcttggagtgcttgtcagatagcaagtgtccaataactatgtgatcagtgattgaccaacaagtgagtaaagtgtggaacggtatagaagagtagtgtggcaagttacagaagcagctagtgctgctcacacctgatgtctagattcacaattagctgtcatttattaaaccgaggcagccttttcttttttccatatcttaaataattttattttaaaacttcatatagatgtattgtatttacatcattcccctacctatctcttctctctccaccccattatactctttctcaaatttaagaccccttttaattgattggtgtgcatgtgtgtgtgaacttgtgcatgtatgcaatagtcatgaatacatatataaatacaacctgctaagcccatttaatattgcttgtgtgtatatatttttagggttgattatttggtgttaagtcatcaattagagggttcatctctgaggaagactgattctccctgtctcagcagccattaatttcctagaggtctttatctagaggtgaggccctgtgagattcccccatccacactgtgaagtcagttggtgttgtcattgttccagtcatgtttaggcatccatattattgagatttcatgagtatagcttctctttcataggcacaatctcacaagggaattcctggtcttctggcttttatagtcttcccaccccctttcatgctttcccctgtgccttaggtgtaggggttctggtgtagatatagctccacattttgatcaggtgtagctttctgtaatttgagcaaaattttagacttttcttgatagcacaaattagccacctcttatcccccaggtgttttcagttttccaagtgtgtttatgatcagtgagatcctctagaatgtcataggcagaaccagacacatcttgggaaattctgtataagctactttgcctcccccccaccaaagtgttagagacaggatattggccagtgggaaggtcaccatttcttgtctacaggaaggtttgcaggagttggtggtgagttaattactggtctgcatgtggccacgtggctctcaacagacaggtgggttttcttcaggcttaccattggagggggtcagccagggtgtcatcattacattgacctacctccagtgctcatgggtaagtttggtgacttgctcattgcatatggagaggatgccactttcttcgaagagccacttgttaggacaaataaacagtgaaggttcctgctaagcttcccatcgaatatttaaaaaaatcaaagactgccccaatctctgccatgttcttcatgtttcaactgtttaaatacaacaactggggtacccaggaggcatcttttctttctagattattttcctattattttgcccagtgcaatgccatttaaaccatcagaaaacctggaggttttcgggagttcctcatgatcgatcatttattctgcttacgtagtctgtggtgtatttgtgaaaatggtagatattttatttactggccacaggggaaaagaaatcttgtggacgcccagttatttttatggtgaggcggtatagattttacctgcccagttaagcagataatttatatggcctctcaaatattaaaagtacttcccattatatgtaggagacttacctcatattttattattcatgtactaaaatgtaaataataaagaagaatatatatcttgagtatctttggcatgtaatgttggccagagattgtatatgaaaagttccattctctatatactgcaaatattttgactgccacagcattctagcatgtattatttatagctctcaaaatcttctagttttgaataatacaatgcattaaaaatttaggacattaaaaaagcttatatgttcatggtatcttcatccaaaattctcttgatacttagaaccagctagtatcagaggcttcctgtattttgcaatgtgtttcacactagcacatctttggatatttctgacaaacatgttcattcacttgtagtgatctggtgtgttgtctgaggccagtccctggtagctgcgatcttgctttatctgaacccctgctgtactttctctcttgttgtgttcctcagaactggtcttttttagtgtttttttttccaacagtcctttctttcagtttctgatcaaatttctttctatcaggcaggaatattacatctaatttatcttaaataacatatacatttatataattcctactatataattcctaattcaataagcacacaatttgtaattattgaacaaattaattaagcattattctaagatactcatacgcataaccctttccatatgcaccaaactcaacattgctcatcttacatccagcttggcttacatgcactgcttgctttttcatgttatttcatgtaaagaagtcacttgcagatgaattgagcaaaacgtctgtagatatataaagtgctttatataccatgagatgctgaagaaaatctggggcttgtgatgaagtggggggaggaggggagaggaagaactctcatgtcagtctcacttactattacactcttcatcctgctcgaggatcaggggctgcaccgtgggccatgctgtttgtaccctatcagcaccacagtgtgcactcagtgctttaaacacatgcacaaagtaattgtgggaacagtcttgatgttaatggaaatcttcgctggtccattagcaagcccatccttcaatgactttctattttcctcagactttcttgcagtgcaacattccgtaacacatacctttcttacaaaggacttggaagactgctccaacttaaggtataagcaggcacagtagtttaatgttttacattgcatttttatttcatgtgtgtgccagatggcaacttgctgaaatcagttttctccttttaccatgtgagtcctgggaattgaactcatgttgcctggcttggaggcagacacttttatctgttaaaccatctcactggccctacatgctaacttaatatactgttcttctgtggcatttatattttaaagtgtataagtgtttcaattaaaaattaagataagtgttcaaggccagcctggactacatagtaagttccaggtcagacaaagagacatactgaaaccctgtctcaaagaataaccacaaatggttaggttacatgcactcttcattcattcacagtaaaggtttgcttgacatcagagaagtttctaagaagcttttgtagttcttggagcctatggttagaaaaatttcatgatggcagtctgttgtggtggtgcatggctataatcccagaagaggcaagatgatcaggatttcaatgtcagactaagctatagagccagactctatctcaaacaactctcccacccccaaacaaaaacccaaacccaaactcaagatgaacacacacacctctctgtctgtctgtctatctatctatctatctatctatctatctatctatctatctatctacctacacacgtatggccctgtagatatttgtgttgtataaatctaaacttaggaggacagaagcaagcagttatttggagtgttcatctttgaagccggagcacagaactgaagttatcaaagcaagaactgttggttcatagttgtgttctaaggactttatgacacaactcatagaagccatttctcttttatgataaatagtttgatctgcagtcccactcccattattagaaaggcatactcttatgtactatgttgttccctgaggtttccatccagcatttccctagctttctcctaggaaaaagcctttcatatgctccaggtagctaaagcatagaggtcctgacctgcccaattcctaaggagtgggcattccattccatgtgcctggacacagagattaacacagaaataagcttattgtctaagtcataacagaaggactcaatcttggggtatgttctctaattagtgagaagaaagcactatctttctactgagtttactaacatagagatgcaggtagtcattttttacagagggaaatagggctgaaggagaaaagaggagaggggaagggaggggagggaaaggaaggggaggggannnnnnnnnnnnnnnnnnnnnnnnnnnnnnnnnnnnnnnnnnnnnnnnnnnnnnnnnnnnnnnnnnnnnnnnnnnnnnnnnnnnnnnnnnnnnnnnnnnnnnnnnnnnnnnnnnnnnnnnnnnnnnnnnnnnnnnnnnnnnnnagagagagagagagagagagagagactcttacttagatcatattgggactgaatcccactatcagaagccaggattcctcatttatgtgaacacataggttacttttattaaagccatttgaattggtctcatcacttgaaataaatgcaaccaaagccggcactcctgatgtgggtgaccacttggaacaccgttttggtgttgacatactcaccccatactatggtttatttactctgcttccctttccagcagtgtgagggatgtgggtgatgtaatgaaagtcattactgtttaaacagccactgccagatgattttattagcattgtcaaagaacagaatgcaaacaagatgatatagctagataaatttcagactttcagcttatttgaaaatagaaaagtttatggatttttttccctctttggttaaaagtatactttccctttccttaaggaaaagaagttgaaatttgattatgttttaaatattaatttctgtttcagtttgacatttttgttagctgttgccttctgcaaggatgggagccctgtacttcatctgcctatgtgtgacattttcatatgctaatcctattcattagtatataattctacttgagatgaactgtaatggacttgcttcaagttacagatcttactagtttaaaaaacaaaacaggaataggtgctgtagtacagattttgatgtttgtctggaaaaaataatctgcattcgagaggaaaattactctccacatgttataaactgtatttaaagggggatgcttttaatatatattatttacatagccttttaggagttgtccatttgtgtgttttaataggacctggaacacacatgaaaagaccaggctaatatgtgcttctcttcaacatacactgggccttttgttgtaagattttattgcttaacggttaaaaacatcatcagaaatagcatcctggctttcctgtttgtacattcttaatcaaatttgctctttttttccctgcaagccttcagtgccagtgctgtaggttggccatttcctccctggacctgaaaagcacagccttcagatctgacagtctcagacaaaagtctcagaggtgtagaggctcctctgggacatgatcttacgcagtttggggtgtttagaagacgaacactcacattgaagtgatttaggatagactcattccgttcaaccctcccacagcatatttggaagacattgttcctgagccataggagtgtcttagagacaggggatatgaagctttatttctagccattaagaagaatttaccctttacttaagtgacacagaattttaacccagccctgtgctgacagaagttcttatcctctccattgaagctttttctgttgtttccttttttcttccctcactatttgtcttccttacccacaaactgctgacaggagagactcacatagcaagaccatgccactttattattatctctgtgtaagcattaacactgcaagagcgaggagaaaagaagaaaccttgtgtaccatgccacaagcttccctccaccctcatgtatgtgacactgctgccgcatcctttcttgagacactgtctcaggttcgtaggcccagatgggtcccagattctctgcagtcctcctccttcagctttcaagtgctgggattacagatgggaaccactattccctgctgcaatttctcttttcacaaatcatctagcagtgatgggctatgtctgttactcagcgttgctttttactcaatgttgtacacttttaccagattgttcaccatgctcataccgatgtgcacggggacccacgtgtgtcttaccttatatttaaaaactagataaggtttatatattatttttaaaagtcatttagcttaacaagttatacttctttgcaatttgggagaccatgtcaatatgtatgtacgtgaaatgttagaattaagctagttaacatacctgttaccattcattcttaccacctataccttccacctaggcacaatgtggtcttttgaccaaaaactatttctgcactgcagttctgctctgtgtgcacactgcagtcctgctccgtgtgcacactgcagtcctgctctgtgtgcacactgcagtcctgctccgtgtgcacactgttctgcatctttactctcagtgtcttagattccctgcaaaggagaaagcgcgtgtgggctctgacctagcagtaaggccttcctcttcccaaaggccttggggtattccttccaacaggaatgtgaagattttcctctttttctgagcaaagatactatttctgtcttctgtgggaatacatgttgacattttcctgataactatgaactattataaaggccttttctattttcttagaatttttcttcgatttgtaaatatgccgttactggcagattttctgaaccatgtagcagaaatggcatagaaactaccttctttcagttttagaattggttaaaattgaaaaatgttttgcatctgtattcataaactagattagtcataattttctcttcttatagcatctgcattttgctttagaattaagaacactctagccttgtaaaataagttgagggtaatatatacctgttagcctgcaaaggacacccaggttatctttccttggaggactatgtaactgggagagattattttatccttaaagattttggaaacaccaacttaagatattgttgggcaggggtggtattgtgtaggacacagatatggaggaagttgcaatagagaagatggagatgtctgaatgtctccattggtctaaacaatagcagggttacccgttctgcttttgcctttggttagttcttgtaaggtttttagaacagtcagtggggagtatgagaacagcaggtttagaaatgtcagggaaggttaactgaagagaaggttcctgcactaatgggagttacactgagctcctctgtatacagtggaaacagtacgactttcaggcccttccctcccagctcctggtcattttgagccatatatggcacccaaatccctgcaagtctcttcttggggccattttcaaccctgttttgcctctgtgtttggagatgtagctgtggttcctctacttttgtgaaaaagctaattgatgccaaagttaggaacgctcaggtttgggcttcatgcatgtgtgctgcggccagtggttccttacaaatgagcaaatgtgctcactgtcccgaatcctttcctattctaagagtgtgacagttttaatcagtgcatattggggcttgtgctatatgccaggtactggatactcagaggtgactgttcttccattttccaccttttcctctatggctctctccttttctgataccacaggtttctgtttctcttttacattcccagtctgtcaaaccaaagagccttttaatggaaatttgaagtttaagtcaagctccttcctgctcccagctcatgaacgaggcttgtttgtttgtttagaacccagtgtcagtgagggcataatggcacttgactcctgtggtgactcccttcctcctctattctgtgggcttggattgctgtcccaatgacagaaactcggtgaaggtgagagcagggagaatcagaccatggaaagccagcacaagctgcatgcttgtcccatgctgtccttgttgacaaagagcaaaccagaatttagggctttgatttaaaacaaaatcctcattgaaataagttcttaattgatggaggttcttaattgatggagaacgagaacacttacatgggcttcactgtgctttgctccacttgggtgaacttcagcaagcacttcccttttatttttattttagatgcagcagtgggctttgctggtcttgatgtattctaaataatatcttagttatttatttgagaattttatacaatgtattttgatcatcttcacattccctcttctcctacttgtcctagatccccccttgcctctatgttcagagaagttgtggaaccccacatcttcccctccctcccatattccccatttagtgttggccagctactcttgttgttgttgtttttgtttgtttgttttgttttggtttggtttgttttgttttgttttggatatttgagacagggtttctctgtgtagccctggctgtcctggaactaactatgtagaccaggctggcctcaaactcagaaatccacctgcctctgcctccctagtgctgggattaaaggcatgcgccaccactgcgcagccacccagctactcttaagagtaaggctttcccagaagtgtagtctgttagtcagaagtcacccactaaagaaaacccaatcttcctgtgttacttttctattgttttgataagacatcatggccaagaaaacttagaaatgaaaggtttcagtttgtttggggatttcggttttagagggataggaataatcactgtcatggtgggaagcatggtagcaggcaggaaacagctgagagcttacattccatccacaaacaggaagcagagagtggactggggatggtgggaggcttttgatgccttaaactcttcctaatgtcagatctccaacaaggccacacctcctaatcttttccaaatagttttatcaactggggaccaagtattcaaattatgaacctatgcagacattatcattcagaccaccacattccactcaatgaccccacagtctcatggccatatcatgcaaaatgcatttagttcaacttcaaaaattcttacagtcttttacagttttaacactgtttcaaaatgcaatacctcttctgagactcaatgtagtcctaattacaacccacctgaaaatcaaaaggcaagttatatacttccaacataccatggcacagaatatgtgttgccattccaaaagaaaggggttgggtatgttgtgtgacaaaatgtttcctggggaggcacaacacatatgtctactctttccagctaggaagcttaccacagaccaaagtacaactatcaccaaagttcagcttggtgagtcaatacattttattggagttacttacaggaatatgggtgaggggttacttataggagcagaattgactaaaagacagttgcttcaccaaagcccactgcagcatgggtaacacctcacaaatctgggaacttgggaacatatttgcatctggtaggcatctcaacaggttggagaatgttctttccaggtaccttagttggtctaaccctcttctgggcactaggctagtttctgcttcttctaggcatttggtctggtctcagagtcatctttgcagctttgcttggctgagagtcttctttgcagctcaactccctttcttgttgcagttgtttctttacataaacaagttcctgcactatctcagcctcagatgcatctttaactgcacaggacagaggtcaggcaacctttcctgctgctgccaatactcttgatctttgtatactaatctcgaagactggaagatttcctctaaacctttaactgttttcagggtgtttctgtagtcacaaggtagatcccattcaccaagcagacatgccaccccatacacatagatgaaggctgccgttctgggattctgcccacagatacccctaatcccgatgtttcagctttagctgcatatctcactacccatagtaagatacatgcaactgttgtcaaagcacaaaggcacacgaacatacactatatggaaaagcacaagtctattggaatatctttcatagatgctcttccctcagggtgctcagcaatagcctcagttgctacccataaatgaccaggaccatgtactcacttctctccaattcatctttggttttgttgtgtccctgttcaggtgccaattatgttgtatgacaaaacttttcctaaggagacacaatacatacatctattcaccccagagagtgaaccctggggacttttggtggactagataccaccaaagtacagcttggtgaaccaaagagtgctatttgggttacttaacaggagcaaagatgactaaaagatagctgcttcaccaaagcctagtccaatatgggtgacagttcacaaagtgatcatctgcaggcagctcagcaggttggagaatgtccttatttgatttaaacatcctccaggcaactcagctggtttctgcttcttccacacgtccaatctggcctctcagtcttctttgtagctcgctctgttctactagtttcagaggccctcagcttttacagcttactctgaagagtctagtgaatcatgtcagtttcagggacttcctgaagctattttgacttgtttaccttcctgtttaaggatcttccttgcagtatggaatgtcttaatttttgaggaaactgttaacacaacaggccatagtgtgaaaatagggaccaaagcaagatcaagctaaataataaggcaaattccaaatcctggagctccatgtctgatgtcagagggcttagatagctcttctttccagtattgctgcctacaacacacttctctgtctggggctggttccactctctgtttgcagctctccatggcagacaccccccccacctttgatgtctttgagtctccaacacaatacagggttcactttgacattttcataaaatggcctcttggggcctccatgcagggacttctctgccatatctttggcctcagcagcttttccttaactttggagaaagaatccacaaccccattatcatgttatctcatgactctaaagctataactgcatggagaacattgccaaatttgagatggtgagcccacaccctttatgtcacatttgcaacagcattcattgctgttttttcttttcccaagatgcaagtttagctgggtgtggtcttgcccggagggcgtcctttcctctgtccagtgaagccaggcctatcttagtctccttatcttgttcagcacaagccttggctccaatatcaacttttcttggtgctcttttacttttcaaactgtacactttgtatcctttttgccctgtttgctcttttttattgaagacctatatgagaatgattactaataaccatacaatacagccaatattaagctatcttgaaatctcctctattgaagaaattagtccattgcttttcaatttaacctcaggaaaattgttaggacaagggacagtagatagtcaccttttttcttttttcttttttaaatcaaggaatcatctctagaccagttactgatattgttctcctctaaaaccttttgaactgggcttcaaaccccaccccacaacaagtcttcagcaagcccacacctccttctccatcccccaaagttccaccagctggagactgaatatttaaacatatgagcctatggggaccattcttattcaagctacctccctatctttcacagaagctaccaagtcagtactcctcagggaagggtggggttcattgcccacctcccctgagcctatgctaggattttgtctggcttgagcttacagaaatcttgtacatacttccacaattgtcatacatgcatgtgtctgaaaaatgacattttcttgaagtcatccacagactctggcacgtatagactttctgccccttcttctgtgagtgtccagagccttgaggagaggggaatgatacagatgtcccatttaggtctaagactccaaaggttttgctctctgcatgttgtctaattttggttctctgtttctactataagcttctttgatatgggttgaatgatatattgttctatggatataacagcaagtcattaggagtcattttaatgttatgttcatttagcagagtactagtagcttccccccaaaggcccatgacttatctgatcacaggtgttttttgttttgttttgttttgttttgttttatgtctctgtataacaagtgccagctatgggatccatcttgtgaagaaggctttaaatataggtggaaagtagttggctacctcacagagttcacagctgggtgagattggtgatttcctttcttctttagtagtgtgctcagcccctctcccccagtgctgtgaaggctggctaggagggattatgcttccagtttactacccttttgatttttccatgtttatgactcaagtatgtggtgtctcagcaatagaatctcactgttaacttccagagggtaattaaaaagcactggaaatagcctgtaatgtttggaggactctgggacccaatgggccaagggctcaaaaagaggtaacccattcctggtattggtatttttatttggtagtatgtggtgtttagttgggtattagcctcccattatatggtaactatatctatatctatatctccatctatctatctatctatctatctatctatctatctatctatctaaatttaggaaacttctattgttataggtttccatatgaatttttcaaaatgtcgatagcagtagttatcccacctctgtattctgttttctactcttccatttcattggcttttattcacttatttctggcagcctttatcagcactggctcagagggatcagtgtctggatatgctggatcctcactttgctgttttagttgctcataggagaaagtattcagtaatgctattaggatctgagttcccttgccacagggtttagtaaccctgcatagttatcactcctactactggtaggtatttgtgagtagattgactggtgattggctttaagtatgacactagagttaagtagtgcctcttccagatcaacttgaggaagtgggcacagtcactgtggatacctttcttactctttcacctctaagatcaaaaacagaatttacagagtgccaactcagcttcttctactttttcttttttttagatttttttctttacttacatttcaaatgctatcccaaaggtcccctataccctccccccgccctactcccctacctacccactcccacttcttggccctggtgtttccctgtactggggcatataaagtttgcaagacctaggggcctctcttcccaatgatgtccgactaagccatcttctgctacatatgcagctagagacatgagctccgggggtactggttagttcatattgttgttccacctatagggttgcagaccccttcagctccttgggtactttctctagttccttcattgggggccctgtggtccatcctatagatgactgtgagcatccaactcagcttcttaattgttttcagttgtcttgtgagatgccttaggtcagttctctttgttttcctttatcatagttaaagatgctggaggaacagtaggtttgggagttctatgggctgaggtttaaaagcaattttaaaaaatactatttaattttgatcttgtagttttgaagtactatatagcaaaggactacaatttagtggttatttgtttttttttttcttaatgtggaagaaaactatattttttgagagatgaggaaaatagattcatctactgttaggtcagtgattctcaaacttcctagtactgtagccctttaatacagtcccttatgttgtggagacctgcagctataagattatttttgttgctagttcataactgtaattttgctattgttatgaattacaatgtaaacatgtgtttcctggtggtcttaggagacctctgtgaaggggtacttagatctccaaaggggctacaacaaacaggttgcaacctgagaaccactgtattatatctttccatagatgataatatgtgtagcatgggagattcagatctacagaagtttatagttttgaaatcttcttttattaaggtatagctagttcaagtccatcagaacataaaaatacatattgtataggccacattttaggatttccttcaaattttaagtattcccactgggaatcagtggggacaaatgtgagaggactgtttgttcattgcttttgaagagccttttctcagtatcaaaatggaaattctgtcaattctgagtagctgtctagacaacattagttacaatggaatgagttggaagctccttctgcagagctttaggcataatttaaatgaccttgacttctttgctagtgttgacattttaaagacctgattattttctaatcgtgctcatattcaaagcctttgccttgaaatttcacagtatcctttttctcctgggaagcattagtcatttaactttctttagctaatgggatgagagcaaatgcctcacatgaagaggcttgcagactggtcagatattgctctattaatgaaggatgagatgtagggagtgtagtttagagaccccatttgttcctacagtgccatcctagagcaccaaaaacctagccattcaaggtaagtttatggattcatctaaaattaaatggctgcaaacacatgaattaacttgttttaagctactaagttttgcaatggtcaaaatttttcattgtttttgtagccataaatatttctataatctcagataacccatctctgaagtatgtaactcaactaccatcactaatgatactgagctattcatttcttgttatcccactgacaatttgtttctggttggccgggatgtggtaaaagggaacattatccactgctggacccaggatcttcagagagcaaagcattcggtggtaccagtgtgggaaaaagtagttattctttttgtgaaattttaaaggtactccctccccagtctgtgcatggagccaatgtagagtagctttctagaacatgggattatgtaattttaaagagtgacacaggtaagtcatcaagttgagtacatacaataggacacataacatgagttacaggcttatgatggctgtctgaatagtgggagatcctatgtgtgctagtgtgatgtgtaaccccacgagatgactgtttgtgtacaactatgcaactccatgtccctgtcattgtgtgacacatgactgaacatttttagtcaagagcaactttaaccaagaacaagttttggagagaaaagagagagagagagagagagagagaaaggagagagagagaaaggagagagagtcttagaaaagtaaaacccactttacactttacctctgggccgtttgaagatagcacagtgtagatgaatgctatgactatagactgaacttttaaaacttaactccagacacagcaggtccagcttacccaagagagctaaggttggttgacaagaggcggagcaagttttattgggcacatgactctgctttgcactttgaccttgcaaatcagaaggctattgtttttatgtgttttgtaaagcactgctatttcctctccttttcttttgtttgagaaagaagtctgctttcatttttgtgatgaaataaaagggtgctggctgagagtcctctgaacattggcagagccttgcaggatacttctcagaagctatggctttctgtttctggagctgtgcttgaggagcattggctaggtcctgcccttggtgatttcacccagttccttgggaaggtccttactatttatcctgtagttaactcacccagttctttgggaagggccttgttatttcatgccgcagtgctggtcacctggcggtaggtcattagcatttttagtcttcttttcttcaaaacaatgcacaccatgctaattagaggattctgaaagctaagtaacctgttttaaaatcagacattttaatttgcagctttaatggctgtttttataataactggctttattgggggtaaaagcacttctcatgttccactagcaaggcaaagcataacagaagctgacaaaattaaaaacctcataatgcgacctttgcctgggataaaaggctgtttcataacaatttccttttgttctttgtttaagccattactctaaaaggagcctccgattaatctgagtaaatgcatcattacagtactaatccatgtccttctgtcagtgtctgttttaattaaataagaaatgagtgcaggaagatagcacgcacaaagctgtgattggagaaagaagcaccggttgatgagggaaaagattaaaaagggctttacgttttttgtccatttgcatagccccagatgccactgggtttcaggatgaaaaggaaacttacaaaagtcctgaccacattgcactcatagatttaaaataatgggactgaccagtgcgattctaatcatgcatttatcacatgctagacattccaaagcgaggggcggaacagtgcggggtgtgtcttctcagccttccatgcagcctcacggtgcgttgtgaaaacacacctgccaaatttggaaagtttattttaggtgaaatgtacagtgagacttggttgtcgggtgtgtgtgtgtgtgtgtgtgtgtgtgtgtgtgtgtgtttaaagtatcttgcacctttcagtttagtttttcttttatttggaactatttttcttatgataatatattaaggatttgggtgcttaattgaatgttaactctaaaaggcacaccgaataaatacttacaagagaatcttactacacggatacctagaaactctccctggccctgcagttgcagaattcccgtggcgagggcattctccacatgcccaccattatctgatgtaatgaaaagagaaagtgtgcagcagcgagattgttaattaatttagcctaacaagatgaagacgaatgaagcagagcacaggatgaatgaaggaagaggtcttatttacaatgtaatacatttttatataatacagattttacttggtttaaaaatagatccccccaatactatgaacaaaatcaatccccaccccaccattccacatggagctcctggcctgacctcacagaaagcaagccagggctccatatggaagacacttctccaatgtgtaaacagggcttttcttctgctaagaatcctacagtagttaacctttaactccagggttttattattcctgctgcagacagaggtgagcacaagcacagagacctggaagcttttaggtctcttgtcctccaggttgccccagacatgccgtctctgttgtttaataatcattttattttaattgtctttcactaaaggcaggaatctcaagggctggggggtggggtgggcagggaggaaaaagctgtgtgcttcttacttgcagttacacagggttcttagactcgcattattttaaagtccccccttcagagagtaatgagctttctccgggatctgacctttcgtcattcctgctttctgctcagaagtacttccttccttcctactgtagctagaaaagacagtctcttatctcgagttactgtaggcagtggtgacaggactccacaaatggtggtattatgatcactgtgtttttatctcaggggtcaggaacaaatgcatgcaactgcttctaaggatttcaataaataggacttttttttttttagtccagacaatcgccttttatgttacttttaaacaaagctactagtccatcaagagtttgaaaagaaaacaattccacagagtgccggtatggccacagaccaatcatcatggcacccattctcaagtcctttatttttcaagtccacaacaataggttgttgattcaatggacaagaccagaacaattaagttctctgtttagcagcagtgcagcattttaatgcccttctctaataatgctctcattattgttattctaagactgggcctcaggaggaggaatatttgctggaggtacgtcattattttgcaaatttcgattagctcatcatgttgtctgtagtgtgaaaatcgtagctaattagggcagccagttagacgaccagcttttgagcttatgagttaaaaggtagcatacttgataggccagcgatgtgaaaaaggtggtaaaaaggaggattagagcagttgccttagtaactccaacttccatctgggagggaacaatggacttgtgtttctcccccaccttggtgtaaaaattggttttgttttgaaaggacagggttctttttatgacaatctggaattcagcccaactgagtgcagttttagttgttaggagagaccattgggataggaaagatgaaaaggtcatggtgagcctcaaggacatgaaaggtcgttgtctggggaaacaatggtagattgtgttcttttttctccctctctctaatatttcaagccagccagcccctaagtcaggtgatgggacaaatacctacagtttagtcaggtgaaacaggaggaggggaggatttgggggagagaatttgtactatgccaaagaaagaaaggaagaaagaaggaaagagaaaaagaaagaaagaaagaaagaaagaaaggaagaaagaaagaagaaaagaaaagaaagaaaagaaaagagaagggaaagggctgtccccaacctgcttcagttgagagagtagtatttctttgtcaccgtcctgagatcccagtgtgctctggatgggttgcctctgggccagcacatctctgggaacctctccagcgtgtggagcttgatttaagctttctcttcgagctcccggaggaccagtgatgtgatacttaacaataaatttagttgttgtcgctttcttgcattattggtacccttaaaaggttttccttaaaatgcacacagaataaaatgaatgataaatatgaaagaaatttgtctccgcactccacagggttttaccataaattctatgacttccatcacagaaagtttacaggaaactgtttagatgttgctgcaatagcagttcaatttttttatgtacgtaagaaaatgccacaattttaggatctactagggctttgtatatggggatggtgatagaaaaagactgaatacagcaccatttctttaaaatcctcaaagccaaatcacccttcccagggtcacaatacttgtagttcagtgaaatgaatgacttctcttttccttctatattagtctctctctctctctctctctctctctctctctctctctctctctctccctctccctctccctctccctctccctctccctccccctctccctccccctnnnnnnnnnnnnnnnnnnnncttatcgctctttggatccttgacttcccacaatattctcattcaaataaacaaaacaaaacaagcaacaacaaccaagcatcaagggcctcctgcccagaacctgactctgccttggctgcagctctagctttgttctcagcctttctgatccagctcctgtaccagtttccagttacttcttgtagccaccaatgtaatttcaatttttgaaaacaccacccaccagaggcagtgaaaaagaaaggatagcggggtcggggtggggattggtggggaggacagtggacctgtttagaaaggtttttggagcaactcctgtctgtattgtctggaaatcagcagttcagtttatagttcagcagcagcagcagcagctcaatccacccgctaatacttcatggatacaccagtagtctagtttggtagagtcaagataacacatcagccaggccttgggtcaagtcaacaggagggacccagagggacaccaggaaaagttctcagctgtgcctctctgagcgaatcgagataccaacaagttttgcagctagctctatatgtaagccttgctcagcctctgtcactgtctgtgcactcttatttataccctccaaacatcacatattctcagcatttatgtctgtttcaactgctatcactctgtcaatcagccctagtccgaggaagcagcaagaagccgcagcataccaccaggttttcggttgtttttctttgtggtgtctctacaacaaatgtagctcaactacacagtggaaggcagaccaatatatgcttctcctgtgtctgcttcagtaaaacattccttcacaagtctgccttagccttttacctgtgtaaactttagctaaacattctttcatgtgttttgcccagcaaaactctacccaactgactttccaaagaacccttaagtttccacttcactctcacttatttcctgtcctgaggtctttacagaaggctgtcttctcccctgaactgcacccttccttcnnnnnnnnnnnnnnnnnnnntagagagctaaaaagaataaagaaaggagtgttgcattttataaacaaaaaagactgtttttgatgatctcagacacctttatttttcttctctgttgtctcatcgtgattctctggttgaagctgaacttggtccagggagttggagatttgagactctcccttaatcccaggtctcccattgcccagccaaccatcctccttgtgctaacctttgttctttggaggagctgtattccttttgtttgttgagctgatatagctgagtcatgaaactccagagttgcaagacttttgccactagctagttacacttctacatttgaaacgtgaagaaagatggaagtgactggcccaaggaagtgcaagctctttagagctaaagggttaccatttgctgtattgtctaaatatgaaaacctgaattaaaagaaaaagagagagagagaaagcattattcaaacaggtttaacttgcttcctggttctctgagtggctgagaggtgtggtaaagctaatatctggaatgctagtggtattcagagaaaaattttttgataactattgaagttctatttttacagaaatggaacttcctgtatcaggaacaaaacaaatatggtagtacagtttaggattacatctctataaccctggggagatgagctttggttgggaagcctggttaacagggtcttgagactttcttcatcttgcctttttctgatgtgctttcaagttattagtataatggatggttttaacactttctttacacagtcacagaattattactttttttcttgcttttgtgtctgtaaaaagtgacctgaggttattcaattagctgtttggagacattaaatttgttacatgatttgaaaatgtagtatagattcgggagattatggttagactgtaactttgtgctatattcaaatactcaaaagcaaatatagaatcatgatatttaatatgatcagtataaatgccatagtttatattttgaatcatttggaaagtatttagaaattttaggctgtgtgtggacataaaagggaatgacccatgtccttaccttattatttcatattaaagaaaatttaccccaccatgacattaggtatattttatttcagtcttttttatgcctgagtgtgagaagaaagaacatggatagttatttatgttttgtctctaatgttcaatgtgaaacctgacttatcctaggcacttggcaaatagttattgggtaaaaaaaaaacttgcatgcatggatcatactataggcacatttttaatattggaatcattggattttttcatgttaataattttttaggacatttaaaatgacttcttcacagtccaccatgctgtgttttaccatgaaattaattattttgttaattttcactgtcactcagaagttaatttggaagactctcttctatttatttctaaaacagtggtatttttcattaaggaaacaaacccttcttgattgcagtagctcatgaaatcctatcacttttcccgtcattatttagctgtcacctccctagtaggtctaccttgactatcctgtttgcactacatccctgatttttctggtgctatatatgtttctaggtttcattagttttcagtatctcctgaaattcttaaccttctttcccatagaataccagatttgtgtagcagggggttgtgggtagttgtagtcatccatccttcatgcctagaacaccgtttcagaatctcaatagtaatactgattgaattatgcttatttcaaggatttcaagtcaagcatttattacacacactagcaacacttataaccaattagtacaatgatcaaggacttccttttttccctagtttttaggcttatttttgaatatacgcatatgtatataagtgagcctgcatagtctatgagagtcatatacttgcaggaattccttatcacctggagttacaggcagttatgagctgccaggtgggtgctgggaactgaaccccatccctctgcaaggacaataagcactcttaatgctgagccacctctccagatcctgtttttccagttttgatatatacttattatttaattgagtaccatcattaatatttgtctgtgttgattactgctcaggttttccacgattctccacatgaggtcatctgaactctggcattaggtagatgcttgtgtgtgtcaaatgttcttcctgtcacttcagatcatccctttgttcatcctctgggttctctgagaagactcctaagggttttatctggttgcagtttcagattctctgattaaaaattaggttgatttttactatatcctgctactaagtgatattggttcttttttcaacatttctctacgaagaacattccactagctctttcttagtgtttttactgggttaagtttatacaatccttaaaataatgtaacatcagctaggaagatggctcagttgattacgtgtgtgctgcacaagcttgagagcctaagttcagaagcccaggaaccacatccaaagtcagatgtgataacacatctgtaatttcaaccctagaggaatgggcagagaaaagttgactcttgaaattcattggccagacaacctatcctaataggtgaacttcaggttccgtgagagaccctgtcttaacaaataaagagggagagagattgaaggaagacacctgtgtccacacttgtgcatgctctcacatgtacagatatacgcactcacactaacaagtacatataccacaaacatacatgtatatgaacatatcacactgtgcacacgtaccacatcacaataatactatattaaatatttatcccttttacaatgacagtaatatgagccaacaaaaacaatcctttatgtcctttgtgattatgttaattataatctttttaaatcataaaatatatgaccatttattagctataatagctatatcacatatttatatgatatttgtaatttcaaagttttttcctaacaatgatcatgattccttaatcataaaaatgcaccaaaagatgcaaaagacatggcttattatattaattttgtaggtgacagagaaacagaaaaacagagtctagaccccaaaatttaaatattggtagagaggcatgggaattcatgttacttgggttctactggatcagcactgtttgagtcaatttataaccttttctgtgaattaaatcacttttttttgaccaaccttagtagaccccatgaaaataaaagcaaatgcttataatgaaacaagtttaaagtcttacttgttttttttatttctgagacatgatcttgctatgtccattgagctgtctttgcacccttaatcctgctgcttgagtttctgtcctagcaaggatcacaggcctgggctcaagactcagctcttggcttttattttcatggggtggtcacttcacttcccaagaacattagctgttcttgactgtcatctgtttttattcattcttaccaggcttttatccaccatgtgaaccttggttgcttgtttttcaccttctgagtagttagttgttcatttccatctctggatgtgactatacatgggaacaggtacagaggggcaagctaggcccggaatagccttgtaagtaagttaacacaggaagcacagtgtgtcagctaagagattgggcaatagacaccagcaagtagaccattatggaaatgaggcaaaaagaggagttaaagtgttctataaagcagaccaagaaaaaagcctgtctggagcttagaccactgtcagaccttaagcaccaaacagagctaaaagatagattctagattctgggtggtccacatatggacgactgccaatatcctagaaggaagggtcatggtctcagacagcccatttacacataataaagcaaggtagaatgtcagggtctaaaaccaaggcagaaagtcaaggtcatagggctggagagattgactgctgagtgattaagtatttgtactgttctagcagatgactagagttggtacccaacatccatgtcaggcagcttacaactgcctatgacactggttcaagggggtaccctatgcttttggcctccatggcactcccaatggtatacacaataaaaaaaaaccataaaaataaatcttgaaaaggtcaaagtcaaactaacagcagcaagagtaaataatttaattcttaatcctcagaatttgtattggagtctctgacaggaggtcagtaatggttcctctagagagttttctaagcctttaacatcccatgagaactgcctggcatgttaggactggagacagagggtccaggtgtctacattttcacaagcatctcagatcattcagagtcaagtgtttgcagaccacatttggagaaaattgccctaaattgtcaggaagcacttattgtgggataggggacctagtggctactgctgttgggagaggaaaaaggcatttagaatttgaaagtcagaccttcctgctaaaagaaacatgctcaggagtccagttgtgtttatctgcatgcaagaaagccgtaaacatggactggaatgcactggtctgtggtgctataaaccggctaggtttttcacctctttagcttcctgtgtttatgacccaagtgcttttgtaatccctaacaaacattcataccttttgtgaaaaactggaggcagatgcttctttttgacctaatccaaagtgtcgctcatttttcttttctctttgaactttccatttgtcatctgcatgattaatttttctcttttccttcccacgtcgtaaattggttagcttgagctgggtaggcagactgctgtcgtgctaagggttaaccagaagagaattacaaatgaactatctagaaagttgattattaatccagctggagaagaaatatccttttacttagcaagaatgagtatccgaagagtggataatattggtcaggcggtggggtggcatggcagagcttggtaagtaaaacataagcttttatattcatttctgaacagtagaatgttgatgtatgtaaacaattacgcctaatatgaattcaaaagctgctagaacattctaagaagttccaaatgttcttgttgatgagatagatccctgtacactctgtcagtagaaggtcacggaaagtgtttgcatgagtggataaatatatttaattttgaaaacacacgattagattgatgattaagaacaaggaagtgggcatggaggaatgattagtaagataatcgaagtccaaacctcacctcaagtaacataaactaaagaatccccagtgacaaacgtactttcttctctctctctctctctctctctctctctctctctctctctctctctctctctcttcccctcccttccttccccctcttcctttctgcctttccccctacaaaagcacattctggactctctggcattaaatataatttaaagtataacattcacataaagattcactgagatattttccagacaatgatgcaacaaaaactgtcataggttttgatattttcagggtcccaggactcatttccttgctgtgtttaatttaaagtcctttttaaagacagcttttattgtatctgtgaattggaagggaagagaaatgagaagatctgtgctatttgtacaatgaaaattaagtgaaaaggtaggattttaataatgttcttccaccaaagactgctcccgttgaagaagaaattttgatgtcaatattcaattctataaggttgaaaatttgcctgatactacagaagtaaacctttaaaatgtaacatggagcataatgagtattctaaaaagcttgtataataaataatttgaatatgaggctattattcttagaagtcagacaatttcctcaaattgcagttgtgtccaacaaatgaacacttttgaaagtatgtttttaatgataatgatatcatttcaaattaaaattttatcagttaattcctaaaatgagcacaaaagtcttcttttaaaaattatgaatttcaagttggaagcatatgctgtgtgtgtgcacgtgtctgagtgtatctgaatatgggtaagaagtgtgtgtttagagtgccagaacaccatagagccccacatacttggcttgtgtttatttctcatgtcctggcctatatttagggctggaaacagcagagcataataaatgaaataataatattagttaaatgtgtagttcttagaggtaagtgaatgccttagctcacttaatcctcacattagcactgtggttcttgggacctgctaggattaaggtagatgctaaaacaaaagtcaggctaattaacgattccttagcatctgatagtataagtgtacggagtcagggttcaggaacttgaatatgtaagaggggaaatacctgaatttgacatgcttgtcttgaaattcaggaccactgaagaaggggagggaactaacaatggagttctctgcatttattaattctttgacaaatgttactgtggaatttcagtcaaaaaatgagatcaattatatcgcatagcatattaaatatgctatacatttataagaagtgaaatgtcactccaaagtctaagccttgctcagtcttgccttgtcatgccagaggcagccactttattaagttgatggttcattttgttttcttcctaaacttgactcatatgtcatattcattgtgcagtcgtgagatccccacttatcactctttggatccttgacttcccacaatattctcattcaaagaaacaaaacaaaacaagcaacaacaaccaagtatcaagggcctcctgcccagaacctgattctgccttggctgcagctctagctttgttctcagcctttctgatccagctcctgtaccagtttccagttacttcttgtagccgccaatgtaatttcaatttttgaaaacaccacccaccagaggcagtgaaaaagaaaggatagcggggtcggggtggggattggtggggaggacagtggacctgtttagaaaggtttttggagcaactcctgtctgtattgtctggaaatcagcagttcagtttatagttcagcagcagcagcagctcaatctagtttggtagagtcaagataacacatcagccaggccttgggtcaagtcaacaggagggacccagagggacaccaggaaaagttctcagctgtgcctctctgagcgaatcgagataccaacaagttttgcacagctagctctatatgtaagccttgctcagcctctgtcactgtctgtgcactcttatttataccctccaaacatcacatgttctcagcatttatgtctgtctcaactgctatcactctgtcaatcagccctagtccgaggaagcagcaagaagccgcagcatactaccaggttttcggttgtttttctttgtggtgtctctacaacaaatgaagctcaactacacaatgtaaggcagaccaatatatgcctctcctgtgtctgcttcagttaaacattccttcacaagtctgccttagccttttacctgtgtaaactttagctaaacattctttcatgtgttttgcccagcaaaactctacccaactgactttccaaagaacccttaagtttccacttcactctcacttatttcctgtcctgaggtctttacagaaggctgtcttctcccctgaactgcacccttccttccttccttccttcccttccttccttccttccttccttccttccttccttccttccttccttcccttccttcccttccctcccttccctttctttcttctttctttctttctttctttctttctttctttctttctttctttctttctttctttctttcttccttcctttcttcctttcttcctttcttcctttcttcctttcttctttactttgaaatagcctactttgttgttggatttttttcccctcacatgtagtatatgtagtctggcatatcataggcattctgtaagtacctgttattatctgggaggagaaagagaaagaagaaaaaggaactgggtatgaaggatgacaagtctctgatggtgaagccagtggtctgttgctctgtttggacacactgtgtagaattttgcagtttggtgtcagcaaagaatgaactgaggaggtggtatagacaaaggaacttagctcccacattgtatgctatagggtaactcagcgactataatcctatgtagaagtgctctaagagtcttctgaaatctgggagaacttaagactcaactgaggaaataaaaaaagtctcaaggggagagttgtcatggtacattatacagctttggttttcaggagaattgtaggtaactttttctcttttttaaagaataaagaaaatgaaatcaggaaggtaagacttatcaaatgtcaggacataattatgttgtattctgcataaaactttgctgacatttataattaacgtccaaggctttgagattgtgctcaaatataattgtgatggtgataatagaaaggtaaaataaagatggtaaggagacttaagtcatgtttttaagtaaggttttatgtatcatcttataaaattaaaatttttattcgatttgatatttacttattattttctctctattgttcttttctttaaacagacttttaaatacaatatattctgattatggttttgtttcctgaaactctgctaagatcttccccttattattgtttatttgcttattttgtttgtgcttatgccatagcaaatacttggcggtcagaagatggtgttgggttttgcctgccattgtctggttccctgagatcttttttccttggggtgtcagattggcagcaagcacctttatctatacagccatttttactagcccattttatacaattcttgtgggaaccttgtgacataatgacaggaaggcttttgctgttattgtttcacaagagctcaaacaggatccaagactaaacttattttaaagaaattcctaggcacagctgcctatgcaaaaagaatattcacttaccgctaagcctccctgaaggcttaggtcaaaggatgtgtttagtggctttggtagatgtcttctatacattgtcttgacttgaaaatttctttttcttttcacatttcctagaaatgctaaatggttagcaatttccaacaagtggaaccaaattgtcttgatgcttgtaatcaatgaagattactgagcttcctttatgtgaaggattactgaatgaactttaatggccaggtccctgcctaatatcttagagctccaaaataaggcacaaatgttactggaaaagaatgaagccgtgaaaccttgtgatgtcataggctctcaggtgcacacctaagtgttcagtggcaggtactcatttggatgactttaaagaggacatgaagagtatatgtgtttatgtcacatatacacacacgggcagacaagtgacaagtagcaaatgggtttttttccagacaaattccaggaactatttgtaatgattacctgaaaagctgttgtgcattaagaaggccagacttctgtgtttcagctggacaaaggccgacgataagtgtgtctgctcatgcttgtttgggtttggtggtagaagtttcttgaggtgaagagagccatgcatgctacccctcaaaaacaggatctaagagaatgtaagagtggatggtacagacccatctactctagagcctgcagcaagatcccatgttcaggcctttttgggttactgaatgagttcaaggccagcttaggtgaacctagtgagactgatgcaaaataaaagtagaaaagagggctgtggatatagctcagtgatagaacacttggctagcatatatacctaacatacatgaagtccaggttcagttcctacccacacagagagaaaataagaatatacaatacttagcaaggatgtggctaaggatgagaagcaaggatgagcagtagtgcataccaaggtgtaccagtacacaagtccaagtgagccatggccacagcatgcagaaggaagtttgcaagctatagttgctgaaatacagtagacttccttgctgtggtagtgaagacctggctaccaagagtagaatgactaaaatactgagctatagcaaatgagttcaggattgatccttaacacagcgatcttttgtgagtctcttagctccaaagggaaaagacttgacccaagagacttacatttatgtattctattatgtgaacttcatgatgtctaagtttgccttttgggttgttcaatttatgaataaaaaacatggtatgtatttttacatatagttaggcaggtgatatctgccagtagcccaagtgaggattttagataccaccaaaacacaaaagagtgggcttgagaagtgtgctatgaaaagggggaacaggagagcatgggtctcaggactgggatgcagctcaggggtgtgcaatgaaaagccaggccagaagctcagggagcttaggcctcagcactggcctgaaaacaaccaagagtgcggtttagtctgggggagccagggagattcaaaacagactcctctagttgtgtgttaagtctaaggatcccatttgaagtaccttatattattctgttatttcagcttcccttcataaagaggctattcatagcccagtgagtactatcatagactagatacaacatttccccccaaatcatcagacttctcaaataaataattattcaaaaaaaagaaaaatgtctttaatgtctctcttcagtataatctttctttttttccttccaagagtaactactttctcgtaactgctatttaattttttttttttttggacagggtttctctgtgtagccctggctgtcctggaactcactttgtagaccaggctggcctcgaactcagaaatctgcctgcctctgccttccaagtgctgggattaaagacatgcaccaccacgccctgctgtaactgctattttcaatttgtgcttttcctccagattttttctatataaccatatagagatatgtacttttatttagaaacacacagttttatttgtgggaagataacagtcctctcttttacaggtattggtttattcttttcacatttttatttcatttaaaaattatggctcagagtattgtgtttgtttacaaagctttgcctcttattcttctacacaataatttatgctatgcatataccattgctacacttgagctatccagcttaaagatcctcaaataaaattttagatatttaaaagttgggaaatggtaaagtataagttatctttaaactatgcaagtaaggcatagaagatttagattggaaaggatcaagataatcctaagtatagataagggtaccttggacttgtatactcagggaacatcatctttccctaccacccatctttcctttagtaatttgcattgaaagaatatgggtatgcaattgcccactgtctcacttttattttcctacagatgttgtttgcatgccttattgaatgtctgacccttggtctaaaagttaaggtaatgactcagggccttgttccctcttgaaaccatccattcactcactgaccacacatcaggttgtggctctctatcctaggcatcaaggagatgatcaccactttctatttgtttgtctctgtctctagctctcattctgaggatggaacccaagtctttaaacacatatgtttatagtcaacccctgagctatgtcccctgcccctagactccaggatctagatgacttcagtttataagaatcgcacacatgtgtgggcaagacagacacataaacttatgaatgtagagcaatgtaatagaagactgattaaatcagtgatgagagtaattgacttatatagggtagtcagggaaggtttttacagggtacatgacaattgtggtagagttaaagactcactcttatttaattgaacagacaatagaaaagacatggtaggaatgtaaggtgtaagggctctgagaagtgaataaaacaaggtaccatttaatttctcattgagaaaaataagatgtctttatatagagggtggctggtagtaaggaaagactacttgagcctgcagaaatttgcttagaagctgtgggtaaagagcttgctatgaaaccatgaaaaccagagttcagatagcaggtacccatgtaaatgccaggcagagtgagtacatttgaaaccccagcggagataggtatggggggggggctgtgcgtgtattcacacacacatacgcacacacacacacacacacacacacacacacacacacacacacacacacacggagttcatttgtgttggtcatctttagggggaaggatttgatatagacatttcattacagatgaatactccaagatctctgtctgtatattgtccagttgtgtatttgtatgttaattaccatcaattgtaagaagcagcttcttcgttgagggttgcatatgtcattgggaattgttttattgctatgttcatttcgaacaatagggtacgtttttgtctagggatctctgtagtcgtaggtttttggcctcataaatagtattaggtgtgggtcccatctcttattataggccttatatccaagcaaaaagtggctggttactcacataaaatttgtgccactgttgcaccagtctatactgtaggcaggtagctgctgtatgtcacaaggtttgtagttgttgagactggttaattttctcctctggttgtgtgtgtagagccttccagcactatgagcattagttagtaggggtgaaaataattgagcaccagctaaatttcttaatgtttgatgccatggtaagtggtgtcttcagaaatagggccttgccatcaagatgtaacctattattttgaagttttacttagtagcctataatgtatgtctagttggagtattgtctccaccattgcacatagacttcatttaaattcctttttatatgttcatagttcagggagcttctagagtagtgggtttccacatggatttttaaaaggccttttgtattatccctcccttggagggatgcttaatcttgattgctggtcagcaaatctgaattgataaactccaggttcaataagagatctttcctgagaacacaaggaggaaagcaattgtgagaagacctgggtagcaatcatctagcctgattctcagtcttgactgtgaagaaatctagcaattttgctttctttttgtggtgttaaagattaaacccagggcctcacacatggcaggcaagcggtgcctctgtaccacaactctagatacttgcaatttttaaaaacagtagccccatgcttaggctacccattaaccaagcaaatcaatttttggaaatgagatataggtatcgatatttttaaaggtctttatcttatttcaagatgcaccaacatttgaaactactgagcggtgatgatgtaagatacagagacattgtttaatatgagcacaggtgccaggaagtgagaccagtaaggtagcacccaatcaggtcacacgacataggatgtagatttactaagaggaccttgtatagtagatgatggagagataacgaatctcttaaggcaggaggttaacatacttaggtattgttttgggatcacaatacaggcattaaaataatgtcccccctcacctcttccaacccacccacaagagttctcaacttggaatcaggaaagaaaactttaattttgtatttttaatagacttaaagatttctctaattcttattattatgctacttccaaaagtaaaggcaaatccatatacatgtaagaaccaaataaataaataaaaataattgtaagtaagaaaagcatatccctcccagatccttatgcatacgaatacatgcaatcttccgatgagttttgaattctgctggagatgactttgaagtgaggccaggagcatgagaatcacactcaagggtttgagctgaagaacaatgtgactccagacaccacagagctctgaacacaggaaagccgcccaaggcgacacacacgctgctgacatgaaactctcctctgggttccaatgtgcattagctggtgggagaggaagtcgagagagaaaaactgcaaaaatttaattaaataatgttttacatatttttttcctttggactcaattcagtcacaaatgaaatagcagttgcctgggatttcctcagcattaattaattcaaacaaggaaaaaaatgaatcagaaccagaaacttatttattatgcccttctttcctttaagatctcaaaagtctcagggtctcctgtgatctcaggagtttgcatttctaagacttgggtatatccaatttaaaatggattaaaacagcctcctagacataatagtaaagggaagatatttgttttcattaatttttctttaccattcttttagtagaaactttttatcttttaatcaacagtaataagacttgaaaatggtaacatggccaaggatggagcgcctctgaaaataccttatagataaattgggcttaatcctctttgcaccataaaatgtagatgacctgtgtttagcgatggtgtccatcacctttagtctctgctctggtaaaggagaaaaagaaaggaatacctgtccatattagctgagttggctagagagccgcatatctggggaaagcataaacgagtgaattgaacagtaattggagtggaatacacagattctaagttcagtccatctctactctataccacagtttaaagcaatgttggtgatgtgtcagtatttaaaatcattgaggtttcacagtgtcccacacgttgtttttatttaccttttcattcttattcatttatcctgtattcatgcttttctttctctattcattcatatatctctggataatgaagaagtggaagtgacttgcactttaggaagattcacactttttgaatggaaccatcctctggtgtctgctatgtgtgtctgtgcaatctctgctggttggacaattccaagacctagctgctgtgggtcagaaatgggcactgttgccatggcttcccttctgatagtgcagttcagtttctgatcttctcctttctctgtctccagtacaacatcagagatggatggctgtaccaaaatctgcgaaagcagggtaattttcttttttcttttttctcttttcttttctcttctcttctcttctcttctcttctcttctcttctcttctcttctcttctcttctcttctcttctcttctcttctcttctcttcttcttcttttcttttcttttcttttctttttttggatagccctggctgtcctggtactactttgcagaccaggctggcctcgaactcagaaatccgcctgcctctgcctcccaagtgctgggattaaaggcgttccgtttgtgatgatgaagcctcagctttcccactttattcatatgttttgttctttccctagggttgtttaaacttttttttaaactctcagacagaggcactcacacatgtgccataatctaggctccatactgattttgactgatttttttttttggcactcttttcaagtgaatttgttggataacaatttgttggataacattttttctttcttttcttcttttcttctcatttttaaatgtcactcacactttgattaacctttgttcttctaggcacagtgcaggttatgtgagagaagactaacaggcagagagtaatcgctctgtcattcacgcacatgctccttgagcttctaggactctttaagaatcagccctatgcttcactgtgtaactaagcatgctgatttcctaagcagtaactacaacgagtttgtaaatacagacagttaacagagataattacaatgatctgcaactccagtattaaattggctcctggctggcttgggtggctcagcatgtaagagctccccaagcctgagcactcgagttcgaatcctagagcttccagtggaaggaggagtgtaccaactcctgaaacactgtgaacactgtggtgcgtctgtggagcgtacagttgcacacacaataataacagtgcataacactgaaaaggaagcagccctgtgactgttcggtgtgatttgtgtgcagctgatgtcatatcagttttattttctggtttttcagttccatttcttgctagcttatcataatggctcagagtggtcaccatgaccatccagtcctgaactgtcccctgagctgagggtctgcttgtctctttacttcttgcctctgtaccaaaactgctgtgctttccaaacgtttgtatctgtatttgagtttcctgtatttacctttgtttccagactcaaagttgttatttctctttgattgttattttggcctttaacaagatcagttctcctatactccaagcttctacttacttttgaccatgaactgccaaattagataaaaatagggaaaatatcattaagcgggcttcttccattgccaaacactgacataggtgtttgtacaggaattccatcatttatttttcaatacttaaaccatttatttttatttttcttaattatgcgtgtatgagttcatgtggatatatgtatgagagtgcagtgcctgcagaggccagaagcatcagagaccctacccctgaagctgtagataagtggtgagccacgtagaatggatgctaggaatcttctggaaaaacaagtgctcttaattcccgagccatctctgcagccctgcttttcaattcttaaagttattcttttttttttcaagtagcaaagaactagaactaagaactcagcatatgccagacattgtgctgagcccattgggtttgttcctgcaatagtccagcatggtgtaccatttctacattgtatacatgaaaattcataggttcagagaagttgtacttctgtgaacataacaggactgtgttatgataaatgttagaagcagaatttgaacccagatgtggttctcaagaaaatagaaagaatacagtgacatttaagtagagtaagtagattgtgaaccgagaggactctcctttaaggagagaaataagctctaaccatatgaccgtgagatagttctttgggatctgcatccattctgattctcaccatcagcacagtgttactctggtacagtgtgaaggggtgtcagcagcttggcattcaggacaaacagatcctgaaaggactttcagaaccttggccatgaaggagtaccctcctcctatatgcagcgtgaagctttttaggacttgcggatcccagaatcccaagcacacctttgttgtgtttctcatatcaggcatatgattgatgatttgtgaagaagcagacggtctctagtagcatggtactagccatctcagggaagcaggtgtgagcctctttatatgcatctaaatgagacaggatctcagagagcagtctctgaagttcctctttccaggttcaaatcctagcccacagtgggtgtatactcaggcaagttcatgcatgtatctgacttctcttatggatgaatattaggggtagtggcgataaaccggctcctaggacttactactacatggtttgtttttagaaccaaagaagttaatgtatgcaaaataattagcataaaacttgtataatatgagttacaaatattagctattaagattctaatttgatacacacacacaaaaaacagctgggcagtggtggcacacgcctttaatcctggcagaggcagatggatctctgagttcgaggctggccttgtctatggagtgagttccaggacagcgaggggctacacagagaaaccctgtctcaaaacaaacaaacaaacaaacaaaaaaaaacaaaaaaacaaaaaaaaaaaacaaacaaaaaaaccccaaaaaacccaaaaaacaaaaaaggaaaagattctaatttaaactttaaaccatttttaaaaaactcaatgtttgtgaaaattatgaacagtctctaaaatgctgaagccttcattaatcaatatatttcatttttaatctaacaaataatgaacaccatttcttatttctgtttttcttttccttaaaatctactcttaagttgagagtgaccttactgtgaattttttgttttttcggtctatttcttggacctaaacacagaacaatctaaagctacaagattttgtttagagtggacccaagctccaggtgaagggtcggaaacagcatgtcttcaccttgggataatatcctacatgatgtgagcatctcctgtacgtttcaaagtgtgaccttccattggacaaattggatgagtatagtcttgttcagcagctgacttaagtgttgaaccatcattccttgttcatctgctactctactattggaagaaagtggcaaatagtactgaactactccctcctctgtggtgtgaatgtgcaaaacaaagataaaagctatgttttcttcgtggaagggtgtggaggcagacagtcatttcaaatagaaataatgaggcttccaattgcaactgaggcttccaatgaggacactgtggccatcagaggaagaaggaaagaagttcattcctgaaagagaggtactggagtcaactatagactgtgttgtatgtacaggtgccggggatgctgctgttagtggtgatgtgactgtttgacagagatgctgtctgcatatttccatgatggctccaagaggagcagcacctgcaattagctgagtaaaaatccaatgatttgatagacaaagacttttgctgtttcggtctgttgcttctctgttataccaaataattttgagagttggcttattataatagtgatttatcatttttgactaatggcattgacttagagcaaaagttaccagattctgatgaacatgtatagagctgttttattactcccaccaacctccccttaaccccaacccccaccccaccatgaagaattgttcaatcttgctgtcacctttgggtggcattaaaacatttatttttaggagtttgtctcagtgtgtatataaccgtgggtgttcctgtgcctgcatctgtgtgggcatatgtttggactggggagggatggagagaagtgaaattttgagaggatagaagtcagtgatatttgatacagagcggtggaaaattaaactgaaaaatgaaggttttcaatgttttcttccacagttagaaaatgaaactggtggcatgatgcatatttccacaaagagtatttatgaatataatgtggacattataagggcaatcagactttctagaaatgggagaaaaatatatgattgaaaaaatgaggcagaggtaacgaagacactttttggacctaatttgaagcatagtgctcagctggggtagagttttagcaaaactggcttggccatttatagattacaacacttttaatttcgtcagtcttacaaagtgttgatgttgataaagaatttgttgatgctctatcagtttctccatgtggagaagtgctccagggtgattagcctacttggggctggcagccagaagacagaacctgggaccaggctttctgaagtaggagaaagttgccagtgctgaactttcactctctgtagagaaattcccatgtccaagggtagaagtcctcttcacctttttatttcttttgaaaagtctttagtggtttttgccaacattaacatcttcatgtctggttgattaaattaacactactttcaaagtcatgccagggcctaaagtctccttgctatatacaaatttgggcattaatttaaaagctcaaccatttgatgtgttgttttctgcttcatgtcaaggctctaagacccagaggacctacctggtgttcagggcggcatgcttaggggtcaggccaggactttgaaaagcaaggcctcctgccaaacaactggccctggctgaggtttgctttttgtcccatgtacagtgacctcttgccagcacagtctgtcacctattgcgccatctcacagtagtcttactcatccctctgccttgctgcaggcagttgacatgggcgactgtggctggcctcaccttcttacagcttgatgtagctggaggctccatatgagcatgtacgctgcaccttacgtgaaggtttttgaaataatccttctctgtgttttctgttaccatacaaactaacgtgcttcactgtgtgtactctgttactgtggatctccttccccaacagaacacaccgatacatttctgaactttgctttgcttagaactgtcattttgtggtatcagtcagtgtattatttaatttttgttagaaagtataattatgggcttttaaaagttagttggtggaatagatttgaagaaaaggataaaatacagtctttctcatggattattttccactttaaaaatgttccatgattattagggaaaatcagaaaatataaaaaggaaactaaaaatgagggaactcttagggtgatattgagaaatagtgcagtgtttagtagaatatattttaggagattttatacttatgtattcatatttatagaagaaaataaaatattattgaatattgatattttgtaaatttcttcaattttaaaaataaacattgttctatgcagttactgtgaaagaattataaaatatggtaaaaatgaaaataattttgaaatctaaagttaacctctcagagatttttaatggctatcatgctttatttcttccccttgcaatttgttttaataatttttttataagttgccttggtcaagacaatttatcttttcttttcttttcttttcttttcttttcttttcttttcttttctttccttccctttctttctttctttctttctttctttctttctttctttctttctttctttctttctttctttctttctttctttctttctttctttctttctttctttctttctttctttctttctttctttctttcgacagagtttcctcgtgtagccctgagtgtcctggaactcagagatctgcctacctctgcctcctgagtgctgggattaaaggtgtgcgcactaccaccacccagctccctttgcaaaatttacattaaaaaattcatataacttcatccttaggcgaggtgactgcattgacaccatttcataatcagccaagtcatgattctttgtagttacattactttctaatttatttatttttttgtgaataaaaatgtatccacaagtccactaccatgtccaaggaatagaactttgataacagcacatattgccactaggtgtgagttactttttgaacattagcacctcattagcatttccccacacattactaaaatgctcttcctcacaaatgtcttcttttctaaatgagtgcataatctgtataaaggtaacatgagaagttcagagcaggtataaaaagtcaaggcaaacaacctgcttccttggtcccattataaccatcttcaggcatatacgtgttttgatttgtaaaatttcctacctgtcttatctgtctacctatcaagcccatctgtctatcttctgttattgatcacctatcaatcatttacatttatctatactctatatatttactttaaaaataacaataggatcaagtagtacgaaatgtttcattttcttgttttacttaacaagctattatttccatgatgctacatggtcactagcatgataatagtttttcttctagtaaaataaaattataatttgagaaaagcctcattttatatgtgtgtgtgtgtgtgtgtgtgtgtgtgtgtgtgtgtgtgtgtgtgtgaatatgtcaaggtcagaggacaacctgaaggagttcattctctccctttgccttgtggatctggggaattgcgctcaggttctcatgctcagtggcaagtgcatcacccgctgagccttctctctagccctacttgattgtttttcaatatctcatgctgtcctattgtgtgcattgcacatgtttgctgatagctttagttaaggttatttctaattttctgttgttattagcaacatcttgttaagccctaccacagctcaattgctgcacacacctgcaattatttcttcagtttaaattctcagaaatgcattgctggctgatcctctttaaggaagttagacatatatttgcaaaatgccctccagagaagctcagtcagctcacttttaagcctagtgtgtgaaaccacttcatcatatctctaccaacacactgtcactgttttaaccaaggccagtaaaacatgtagaaaatgacagctcagttttaggataatttacatttgtctgagtagtagttaaatgagtactttttcatttttttggactgtctggatgtctttatttaaaaaaaaatacatgtcctgctcatgtgtgtatgtcattagatatttcaagaatcagctgaataagtacatatatacatatatgtaaatattttggatagctgaacacaaagaaatatgttagtccaacgaacatgagctattgattcttttttgtaagaaatatttacttgtatgttaaatatcttagatggtgaagatggcattgcttttgtttttttcttttggaggaagggtctcactatattcctagatggcctggagtccctgggctcagcagatgtgcccacttcagacttctcagtatctgaaccatagagcatacaatccatgccaatttagaactggttggtggctgatccaaccagattactcctacaatctttttgtttgtttgtttgctttgttttgttttgttttgttttgttttgttttgtttgaaacaaggtctctccatgtagccctggatggcttgagactcactatgtaggccgagtagtcttgaaatcacagagatcctcctggatgctggtattaaagtctgtaccatcattgctagcacaatccatttttgcagggttttcctgtgtagccctggctgtcctggaacccactttgtagaccaggctggcctcaaactcacagagatctgcctgcctctgccttccacgagctgcaattaaaggtgtgccactatgcctaatgtataatccatcttttatgttacattcattataaagttcttagaggcatttggatctacttctcaatttattttgtttaatctgcctactctttgacaaactttaattaatagatttcatattatttgagctgaattaccatcactcatagtttttcatactggagactcaccttaggtcttcagtatgctgggaaaccactaaaccactgagcgatgttcctgtatctgcatgaaccccagtcatgttaccaaatttctttctctggttcccttaaaacaaaacaacaacaacaacaacaacaacaaaaaactgcttcgatttgcaattttggtagaaatgtataaaatttgtaagacaagctgcgatagtaatcttttcaatttaaatgaaaatgaattcttagatatttcaaatctagttccttcttgtaggatgtggtgaagggtctcttttgtgcgtgagttctaggctagcctagattatcgaacagagtagcaaactgactgcctgggtgtctgcagattcatactcttaacagtggtttaagactgaggggctctggccagcttcttatctgtcccccataaacccagtgccactctctaatgagtttggaatttatgtgttttgaaaagaaacatttgtacttttagagtgtgctcatattttctaagtatggaggagatagacgcatgtcaaacttgctgtgaggagagtgaaatcctctctcccttgctacagctgtcagacaaacaatggtgctggggtgaggtgtacccgggtggagtcccatgtgtaatacagcagataacgacaggataaagaaccctacaatttatattttaggatcatgtcttctggggcaggcttttctctgtcttaaattgtttcacagttaaggaggataattgtgatattctggacaaatgttgcttgcttatgaagtttcctccctccacagtgtccccttcccccaaatattccttccctctgcttttgtgacacatctattttgagacctcctttcccttctttttggagttcttgttcccctctcatagttttatgagataagttttgatgaaaccagagtgtaagttctgcatgtgtgaggagccggagtgttcattggtgtgagctagcaaagtctgaagaggttttgaaaagtgtttgttacagtatgtttctttttcatataaatttgagctttccttttcaaataaatcgacagactttttcttaatgaaaactaatgatagcagtaattgtttgaaattccagaatatatttttcaagcttcacccttaaaatctcctgttagtcacaatgttgcactaactttttcattctcatatatatatatatatatatatatatatatatacacacacacacacacatatatataaattaatgtggcataggctgtcttaaacttgtgctcttcctgcctccatcttctcaggtcctgggactgtccatgttgctaccatgctacacccatcctgtatctctgaccatgcttgtctccttttctaaatccaatgacatacaattgacaaacagcagtcattacaaaaaataaggagtggagggaagtatggagaaaaagagaggcaggtacaataggtgaaatagcaatagagataggtcttccctttaaaaaaattgaccccaaacactattttgttttgctgtttcttggatttcaaggttgaataatttttttctgtcacattaggtttttttgttttgttttgttttgttttgtttgccatacacacttatttgtctttaacaatgacttttaaagattgatttatttttattcaatgtgtatgaatgtttgcttgcatgtatgtatgtgcgtcatgtgcatgacttgcttgtgggtgtcaggagaatgtgtcagatcccctgagactggagttataggctgttatgagccacaatgtaggtgctgggaccggaacccaggttctctgcaggggaagctagtttttggatggctgagctgttttcctctagatacccatggtataagtatgtaaagtatttggatcatattgtgacagatttaagcagaggctgagaaataaatcaaagtgctggctgtgaaaaattataacaacattaatactgaattataatttttctgttttaaaaatgtatcccatatgttatttgaagtaccatacattgcgttgctataaagttaattttaaaaattagtttgacatgcataatcacaattttatccgacaaaccactaagaatgaaaaagtttggaaaggaaagctgcagacctgggaataggtgacagtgtaagtcagagtttcggctgtcagaagtgaagatgctcatgaactgagaagtcaggctgagttcctcaggatggcagcatctgaatagttttcctatgttcttgatagacatttgtggggtttcaacattttataagtggacgtctcagatgtgtgcatagcagccttaagacactgagggatgaaagacccataaagagttcagagaagaagggctggctttcttaaggtagtgtgacccagtgtgatgttgtgagagggcttgggaatagatgctggggtggggttgattgagttgaacattggatcagagatgtggtatttacattagtcaatataggtgccctccttccctcccttcccctcctctccctgtccctccctcctctcccctttcctttcctttcctttcctttcctttcctttcctttcctttcctttcctttcctttcctttcctttcctttcctttcctttcctttcctttcctttcctttcctttcctttcctttcctttcctttcctttcctttcctttcctttcctttcctttcctttcctttcctttcctttccttttcccattcatccctccattcccctttccctctttctctccaccctccccttttttgctctcctttttcctctcctttcccttcttattacttcattattgctttcctttcttttctcctcctctcttccatgttccttctacctctccttaaccctctcgttcttctttctctttccttctccccctctcctcttcccactgcccttccttctttcaagcacaattatactatagtacctagggtgttacatatttttgaaaagtgtgtgtgtgtgtgtgtgcatgtagaaatcaaagaaaaatttggaggtgttattagttttctctttccactatgtgggtccagagatagaacccaggttgtcaggattgggattaagtgcttttagctgctaagtcatctctctgtttatatgtatgcatttatttacaattattttgtacatttgggtttgaaattttcaaaattaagcacatttagaccatatagcccaaattcttgagataaaaattagctagttactgggtgtgcttctggaaatggtagaaatccaccgcttaaatgtgcaaagacaaataattacttgtagggctcactattccctagtagaaagagaggttcacagatgacaacagttatgtaagttagattcttaagttatttgggagtgagagagtagcacaaagaaggaagttagacccaagggatgagaaaaatgcattagtggaagagtaggctgtctcctttggacacatctctataatctattggtttgtgtatgaacgaaagaatcatggcttgtccttggaggctgttactgaatacagagactccgaggtttggtgtcgttactaatgttttgtggtgagactgtatttttgtgtcctgctgcttgtggatggcacatgtgctgtcacattgctgggaatgacattctgtacactgtcattctgcccccatcctcacccccactatgaactacatttgtgaagacttttgagaaagtgtttgtgtcataagtaccagcatggcaaatttcaaacatcattcacattactaatgtgcatttttacagcatcaagtgagatacacaaatgaaatatcttcaaagtgatgggcaggacttcacaataagggaatgttagactctaaatttggcaggtgatattctatttatgacgaatctaagctgaacacccctctctcctttttaaattaccattcacagagagttgagggattcctaactctctggtcactgtcccccgcattttccctgccctgagaatgcagtgcccaagcttcttgtgaccaggacctactgctgcttccttagagtcagccactgtttcactacactgggcttatctttcagcagtcttcgaagaagtggtctttccaacaaagttcactcttagttatcagcccaaatctttgttattgtgtgctgtcttttcttacagttgttgcttctgattgattgtccctcgattgaaaagcctgcagtctgatcccacttttctgttctttttgcttcttccttcccatgctattcatttttcaccatttcttctctcttagagcacacacacactattatacaattctcaaaaagtgtttaatatactttggtgtagtttagtacctcacatggtataattagataaggggaccggacttataaacttactttttaaaaagttttgtgttacttactgtggtcattttgagcaatttggcatttgcaatctgtatctttacttgatttaatgatatagattggaggctggggtttatctgttggcaatgtaaacatgagaaaggaattaatcttcagaatccatgtttttatttttgtttttgtttttaaccaccaactgacaaatctcaaaacaaaaacaaaaacaaaaaacctgaaagcgggcatggtggcatctgcttgcaatcccaggttggatctctgggagggtttagcagcctagcctactttgaaagttctaggctagtaaggaagcctattttaaagagcaacgtcagtgcaatgaggtagttcagtgttaccaagcctgagtttgatctttgggacccacatagttggagagaatccacactaatagtgtctctctccaccaaacttgttccaggatacatggatgtgaatgcacacattaaataactagaatgtttaaaaacaaaacaaaacaaacaaggcatgaggagtcacagctgaggttgccttcctcatgctcctaaacagaacaggcacacacatttacacacacacacacacacacacacacacacacacacacacacgctcaccacacaaatagatcaatcaacaattcaatcaaatattattgagttaaagagaattttgtcttaggtaagtttgtaatattgaccaatcaaggaagctatataaaccaattaaagtagtataaatggatgagtttagagtttcatatgtcatttaacaaatactcttgtaataatgatcgctaagatccatacttatctctggacaagataccatgctgaagatgtgtaagcatggtgcatagttgaatcttttatgtaatttccacgagctatgttttattttattttatgatttttgatagagaatataagacacagaggtcaagtacgatctcaaagctagtaggataagaatgcgccatagcaggcaggctgtttagagtgctaggccagagagccctgatggtgttgagttgttaagtgtgagattttggtaggaaaggatgtgtaatgatggcctctattgaagtcaaggccacatgcaggtgaatttaggatgtgtgttgcacagtgtttccatctgtgctgtaaccttgtaaccagtctctctctggaactcagggtttcttatcaggtgttcactgaacacacaccagatgtatgtgtatgtatgtatgtgtatgtgtatgtgtatgtatgtctgccatggccttggggacacatctgtgagcaaaagagaaaaacccagccccaggaggttacattctaacagagagaaacaggcgacaacagaaaggcaagctcagaaagtaaagtaatatcctctatgggacagaataaaacaagaaatgaagacagaaagaggaagtgttcaggcatagtggaagcagagttccaggcagaggagctgccagtgtagcgactccctccctaggaggggtagaaatgaacccagctattccagagcaggggtgagggtcagagggactgcagtcaagtgagtggaaggaactaataggaaccagaataaacagagacatgcaactcaacgtgtggaatttttgttactttaaaatttagtgtgccaaatattagattatactgtaatgattcatatatatatgtattcatatatatatgaatatatgtatatacatatataagaatggtgggcatccttataagaagttttattttatttgtttcactatgtaatggaagtaatcttgagtttctgttattctcctgcctcagccttctaaatgctgggattacagatatatgtcccatgcctaattcctgcctagggctctaagaaggtctaagaaggctctgcactttggtgaaggttgcaggtgttttgatggtctattctctcacactcatcctgaaaacttggtacttgtgttacatttgatcttaggcatggacacgacatgaaagaagctgggctgtggctgtagcccttacctgtgtgtacgccctagcattgcaaactgagaataccaaacccaaagcaatagccacaaaacccagatggagatcttgtaagacagcgacaccagtgtacagaagaacccctgccctgttaatcagtgattcctcaccaagagcacatttccctggtaaatttgtacagtgcctgatgtagaaaggaactgtgataggccgtagcttatgaagtaatttgttctctgagccactgaataataaaaacagcaaatttaggcccagatataaatcttcgtcttgcaatttgcttgcagtgttccttctcagtctcttgtctgcaaattggatataatattccctatagctgtcatagactgggaaagattaagtaagaaatccctttcatttctttctctacttgaattcattctttatgacagaagaagcacttctatatgtgtaggttggtggaattgtatgtagatcattttataattggctctctttgcaggatgtcaggaggtaagaatggagagacctctctagccatcctagcagctgattaaacactgtgtaggagaacggggaagtgggaaggagagcagatgaatccctggcaaagagaacagtctaatcccagaggacatttgcaacaaccgcctgggccctttggctagactcagagcagcccagggcaagaggcctgcccctcagcacaccatccaaactgtgtgtgttaaggcttggctttaatgaagtcatgaccacttgttcagctctgcatatggctggatgtgattcccagctgccctgtgggttaaagtgtaaacaatgagtagattgttatgttcctattaagctcggagtgtgatctcatgtctgtgccacatatgtctaccactagaaatgtccctgctcctgatctcatgaaagggaattaaagctgtgtctgaaaatgtctgaatccattagtctgagggctttttgctcatgtttttactgaaaacaaagactgacgtagaggtataaaaaatcacgaacatcatcaataggtgtcaacatgacaccaaacagataatagacactaggatgaacattttttacctcaggactaagacacccatacatctggcattttctcagaatacaatactcttgtagtctacagtcataaagaaggctgaaaattcccggatctgaaatgtgtaccatgtaacagaaaacacccatccacagaactgattctgtccaattgctagcatgttgattaattagtgtcctagtttttcttgttctatattgatcagaaatgctattgtctgtccttgtgtttacatttgtaagtgtagcatacttgtgctggtcagtgacaactttcaatgtcagccctatagccttctccatggtttgagacaggatcaggtacatccagctgctacatacagaaagctagctagctggctcatcagctccacgggattcagttgtctctgcctcccatttcaccacaggaggtctggaccacagatgcatgcattaccatgtctggctttatgtgtgttgagagaactcaaactcaggtctctacacttggacagccagcactttaccatggagccatctctccaagccctggaatgatgtttgtgctgttactgttttatattacaaatgtttcaaatgttgatataatgagaatactaaatgaaggccagggatttgaagttctctataaggaaatatttatttttgataatgtcaattaacattctggataattcaaggtacctgcctaattttgttacttattctttgtagcagttttaaagtaaagccatcagcattctaccgataaggaaggggaggctgaagaaatttaagtaaccccttaaggttgcaaaagactggtttcttactagggtgatctaatgtctctatgttgatattcttgctgtgccttgctcttaagtctttcctaaattctatgcaagatggcttcgtgatctctaaacttggtagtaggtctgagtaatgatactcaattgctctcactgcttttcccatgtgtgtgcatgcactctgcctttcccattgatattatgtctgttaagctgtgggctctacctggttgccatgaaactgttgtccctatttacagatgggtggaacagacagagacggtgttgattttccaggtcaaacaattctcagagacaaacctagaaatgtcttgtcctcagtttggcaatcttgttcaccctctgctgtgtatatccagggatgctgacttcaacagagaacggtgactgtacaagtgtcaaaatattaccttagccagtctaaggaggagtgttttctttccctaaaaatgcaagtctttggaaatttcccttggggcaggggtggggcttatcctgcaagtcctgcccctgtctccagggaaaggctattcagatagagttattattgttatggattaagtgtaacggattcacttaagggtctgttaggccagggccttggttttagagctctcaaaaattctccagcttaattgaacagagaagttttgggggaggaaaaagagttaagtttgaaagggaaacttttcttataggtaatgattacaaatactgcatgctagaagcattgtatcttttcaaactgtagagtaagaaaaacaattaatccatctacaaatacttcctgctgtctagtaacagggaagcctggttctgtaggtatggttactcttgggtgtttgtgctggggccaccatgaagtagctgtacacttggctcaaattgcttcccttctctgatcagccctcacttggcaaacaagatagtagagtttgacaacttgttttggtttattttgtcttttattgtgatacagggactcatggagattggctttaagtcagctatgtagctgaggctgtcagcttaggtgaattttatgtgtacttttatctctcaatacttatctcctaaagccagttactgaaaacttaaatgttaaaccatgtttctgataagaataagcaaagatatagagacttattaccaaaaataacttttagcatcagaaatccttaaaaataagatcttaacctcttttgaagggaaaaaacaaatgctccccacccccacccccattatgagcttatgaaccagctctaggctggcttcagaccttatctcttcctcgcacctctgtctagccacagggcttttatttaacaatgggaatctgcctctacatctcaaacaacggttgtctctctttacttaaacccttttttcggtcactagaccctctgtctgatcctgaggctggaaggcctttcttccttactgtgaggagcgcctctacgtggactgtgcagttcataaagtgttagtggtggaccacggagctggagaacatctgagacttggcttcgcttggcttgtgacggaagtgactttacccgctttatctctgtactccagagttctgccatgtacatatgtatctatatttactgattaattaataagagaatagtgaggaggatacttgggcttggcagcacttttcttatctacagcctgtgctcacattactggccaggtgcccagcttatagtcatctccgtgtcaagagagataggtgctctgggctgttccatgtggccgttaccactctggcaacttctgaataatatatgtgacatgttgttgctccttacaggaatgtgaaaagttccatattctgagaagagtcgatctgtatattaatctctgctttccagagaatgtttgtggtatagaagacctcagctttgggtagctttctctgctttttctgtcaggttctctcttgatctccctcttccttaagcagggctaggcaccccatagtgtttctgtacatgcttgctgtattttacctccttctagagaatcagcgggccgttccacacacggacgtgcctgcattttcactcttctagtgttctctgagcagagcggtggcggggactctgtgtgtgacactgctgtggtgatgctcggttgccctgctgttccctaagatctgggaaggtaggagtgagttgagggagcagtggggttgtggagcctagacgggagtgtttattgcttgctattgttctctcaaggggaaggcgtggacctgacttggtctggcccctgtgtgcttttcaggctcagtagctttacacagggacccacattcttcttctctcaggaggaccacatggtaaaggagggcggtatttttgttgtttccctttcttttaaggggcatggatttttactctcagctccgcactccacctgtggaggtgtggcattgctaccctctctgaactttgtctggagataatgattttgtagtgagaagtctaaccactgatacaactgggtaaagtagaggaaatagtacatatacgggctgtgaaaattgtaaattataagtttatctaaacacaaagtgcagtcatttttgttttccagcttttgaattcctagggattttgtctgaagtgagaccagtttgctcttcacttttgcaaccaccgcctcaggcagaagcagaagccagttggtgctcagcgctgccccaggatttccttggtgtcttccccaggccacggctctgagcccctcacagctgttgtgttgtgttctgaggagggggccttatgctggtttagggttacagagtctggtattgagtttcagttcttagtgaacaatggctgctcgttctgaggtatgccatatgatttgctgtattcctgagaggatgacatgggtgctttataattcacttgagcaaaaatggcatacttggcatactcttgtccttcttaaagaggaatgtatctcattttctctctctctctctctctttctttctttctttctttctttctttctttctttctttctttctgtctatctttcctttctttctttctttctttctttctttctttctttctttctttctttctttctttctttcttattttcccagcagtttatttgatacctgctgtttatatttcccacccgtcccttcacatctccacactgtgcagcaggagcaaggaatgttttaccattctttcctaaggtataagaactgctcaatgttggaacagtatgttctagcaacatggagctacgatacatagagagagtgttgagaagtagttaaggtcacactgactctggagtgagacgtgtaggcttgtccaatggaacttggacacattacttagctctttttttttcttatttccttcagtttcccgtgtaaaatagggttgaagaacctccatcattgtgttatatgacagatgaatttgtatatatatatacattcatatggagaattagctattatttctgtgatcattctgaaagtcttcttattattaaagtactaaagtcattccacaccttgtttatgtagctaggaacctgtcatttatcttgggtgtcacaccgcaccaggatacaattcttataccctcctgaaagctgagagtgaagtatggtatgtttggatggtacagattgcccaaggatcctgccagggatgtatctcaaagttagctgttgggggtggggtggggtggggggtgggggtaaacatagcacaaatagaagaggaaataaatataagtctatcctgatcaagttaaatggctcttatataaatagttgcaatagaaaagtcactgaaagattgatgctttcctgaaaggcttctggagaatcaagctgtagctgagcttggatggtggatctggaaacagggaggtgtgtggaaagctgagggtgttgggagtggagctgctgccaaattgagcaaggacaggatgctgcatggtacttcctgtgttgttgcagtgaagttacttaagttcctgaagtttcagttttctcatctgtaaagtgggggcaggatacttgcccttgcaaagcaactagtatagcttttggtatgatttgtatttgggaaacgggatcacttgctatccactccaacagctgaaagcgtgggagtaagatcccaggcacataaccacggccaagctcctgagctactttagagcttaacgtggatcatttgaaaatgagttcaattttttctttattgttgttttgagcctgtatagatcagactggccctgaactctgtatcctcctgcctcagacttcccagggctgggaggaaagatgtgtaccacttctctggccctgtaaaagggattgattggtaggtcccttgaaaagttgtttggagacttaatgaggtgctgggaagatagctagtgagcttagagtgcagtaaacgctcaaaccccagccactgcgccagccatttcttctgcagctctgctttctcacagataccttcttggctgttattcgttgtctccttccctctgctcttctctccatctgtcttctttcaacagcgtttatcagcggtggctggagacgctgaacacagaggctggggagaatgtggaggtagagtaactggttggcaccacatgtccagccgagcagtgaggagcagataaggaaagggcagctagacacacataagtacctcagcaggagcataaacacacgtgtgcccctttgaccgagtcatccttattaaggccactgagggattttcttcttacaaggaattttgaccacactggtcccttggttaaatatcttcatcaacatgttatctcccagaggataaatccttactgcgtggaaagcactgaaatcctttctgctttgttgcctgcctgcctttccagactttctcaagacaccctgtatctctgctgctttgaagtttgttttcccagggtgcctttacacatcacggaaccacctttttccaccagacaaattactagtcgtccttcaggagcccactgactgggacttctgtgccacctctgatttcttcagaatatgttattttctcttttgggtttccaccgtgtttctctagaacacctgcctatgtatattatcttatgatgattcatgctctagttctatttcttgctatagtgtaaggcaaaatggtccccaatcacatttgctcagtttacaatctgatatctttattatggcacaaatatgttaatagaaactatattccaagtaccacatgcagatcctcttatccaaggctagcagtctgaggtgtggtgaactctgagcttccctgcatgtcagcaagccacagctcctactcagctgctcagtcacagattccgtaggcagtaccgcacagttgctaagctctgcgacttggtagatgaagtgtataaaatgcagttttgacttgtaagttctcatcatggactcatcgggttaaattctgtcactaggtgaggcacatgtgtaccatatatcacagtgttacatacctctgagtttgggagtcatgacagtacatgatatggagcaggcagtaaagttttgcatgctaaataaaagtggtggtgggctcagggctgatgatttctcagttgctagccaaagtctgaggattactataaagacactgtctcggagatcttgctttgtatgaagtattcagaatggcaagcaataatgtattttcttttctccatcaggtcaaacaatggtccctttccttcagaacacaatgacaaagtttctaccattcacaaagaagcctaattgaaaagtcccactagtcctctttcctctggtggactgtctcccagatcagctcatctatagctgtggcagggctgacggtctgtcagtagtgcctcatctctctttcctctggtggactggctcccagatcagctcatctatagctgtggcagggctgacggtctgtcagtagtgcctcatctctggttttcctccagtgtggagataccctttgctcgaaccatcagcacatttgcaataaaactgactttcctgtaatgtatgccgcttacaataaaacaatataaccatttacctgatactgtatggttnnnnnnnnnnnnnnnnnnnnaggctgatggtctgtcagtagtgcctcatctctggttttcctccagtgtggagataccctttgctcggcagtactgtgtgtcatgggcagaacgaaccatcagcacatttgcaataaaactgactttcctgtaatgtatgccgcttacaataaaacaatataaccatttacctgatactgtatggtttgaaagggatggagagaaggaaaatggcagggtggttagcctcccactcctggtttattagccctgtgctgtgtttaatgctttatcaggatcaaatttctttcagaagaaaactggctaatgtagtcagagacatcttttgttccatctggctctggccattttggggagtaaatcagctcttttctgtatacactctgcttgggagctgtaataagtgagcgcatactgcagagcggtgaccttcagccaaccagagaaagacacctcttctaatcaaaggcaaaagccacgatctttcttgttgtaacttactgttgacacaagaaaggccagagagattgacatcaatctctatagaaaccattaaccaatgctgagtaaatctgcagcattgaatccatatgcatgcttgcttttattattcttgacctatgggcacacgtgagcattttgtgggctttgttttaaaaggaatgtttaaaatgtagctagttattatgggatttcgttggtgaaataaactgtttgggtagtctaaataaaggaatctgtattattttgcatctcctaagcattatttgcttaggtgtggcttggtttgattccagattagtacacggcagcagaggctgttgctttagctgggtgtagcaaaaaccaagtaattttatacatgctttccaaatgatgtgcaagtcctgtgtcatttgattttaactgggactttttttttcttctactcttaaaaaaaattcccttaacaatgactgtgttggctgcaaggacatgtgtgtctaagagtctcttagatgtcccaaactcaggttggtaatacttgccaaacgattggcgaccgtttgcttagcagaaacaggctctgtaagtcagagcttcagtgtttggagctccttttcctgactcccccaccctgaaatctcagctctggttgaggagggcgaggaaacaaaaatgcttttcatttcattctctgctgtacattttccagtttgggtgactaaagctggccagggtgcctatttttggaaagaggaattaagatactttggagaaagtactgcactgtgtgctggcattccagatggccaaactagagtagaaccaagcccaaggtttcgaggctttcgtgccaatgatgacctcatgaggtccagcctggagaaagagagacatagttctccaacaatgatggagaatggcttcttcctttcatatttctattgagtgatctccagtgtccttctcttttcctgtctctgacaaaattagccctttataattaacaattgttagatttttggcttgtctctcagacttctcttagagccctttcaccccatctacccattgtgtcctctctaccacacagaaaaaactgtgatatttttctctttggcattcctgtcttttcctagcaggcttttctagtggggactgtgggcgattttacacttgatttgttgaatctgaactctttgctgtaaactctcacacacagaaggagctatctttataaatgacagaacggacctggcctgaatggcgctttgtttactgtttgcctaaaaggggcccctctatatttcatctgtcaaagttgcttttctttctttcaacaatgcttgattgttttcacaaaaattcaggttccatagacaggagaattctgtattatattttcctgccaaattccgatctctgttttccttcccctgtgctcacaaagggctcataacttactgtcaactgtgaggccgaccacaaagctccactgttgctcagcaaataggctctattgcatgatggcttgactagcttgtaaagtttgcttaactgtagcagcagtggcagaaggcatgtgggtgctgcatctccccacaggccgggaagctttgcttcgcccatccacttttacgctttaaactcttttaattgttgaacaaaactgacactgctttgtttaagcagattagatgctgtttaaagccatggctgcatttggtagcctgggactcaggagaaattagttagtgctttttgtgatttgggaaggtgtcagaggggtacgccctcgagtgctgaagttctggctgatgtggcaagagagagccggattgaagagtggaggaacagctacttcgtgtgagtgatttgtgcctttagctgtcacaggtcttagctgtggtactttactttctaattttctaaacttcaaagcctacctgatcgggtgggaaggtggtgtgtgaggagccgccgctgatgtcacggtaccgaactaataacttgaaaggcatttttgtaggacatttgtaatcttcctagggaattgtaaatttttttttaagatttgatttttctgggggggggttaatacacacaccttttttttgggtagtatttattagattttttaaaacatgcactttcttttccctgtgtactgtaaggtcctggtagataactatataggaagaatcacagaactcgtccaggaactctttgaggaagagtaacctgtgccccaggaatctttgctgttttcaaaggcaggctgcgtctgacaaggggccttatgtgcagcggcaaagataccttctctaatggaaatatttcatcgtaataaacatttcaaagaggcacaactgacaagcaggccaccgggtaatttctggagtgttttagctaaaaaacttaaaaaggtcaatgctcacaaacaattctaacgaagaaaggctgctgctctaccaggattcacagtgtcgaacatcgttaaaggtattttatatgaaacaccagtgagttgaattgacttctgagaaatgcattaccatagtgcttcagtaattcctttcactccaactcgtttaattctgtcacttgtctcttctacattttttttcctccgagtaacacacaccccgagtttgttccctgtactgcttggcaaagttcaaaatatttatttgtttcttttctcatccatctgctgtagagacctctgtgtttatgagcttggtcctcaggcaagtttatcctttccgtacattcagcttcaaataatgcaaataggcacctcaagctgcagtgaattgagtttttgactgagccccagtgaagtacgtctattttgtaataatgaagtcgctaaaactccaaacaggcaggccgattctttaaagtaaatggcggggagaggataaacgttgtgtcttcagccatgaggctgcagcgtagctttttagagcatcagtaggaactgggtcctctacctgatttagaaacagagaaactggcctaagacgagaaacactttggggcctgtcatgtggggacaggtatcactgtgtgctctgaagagcactcatgcattcagggagcacgggtggcttaggcttcctgtgtactctcaaggtaatataagtactgaagatggaagttctgtttaccataagattgttttcatttaaaaatccattcaaaacaagcataaatgggttatgctatccaaattgttggttattgaaaatcaaggaaagagatgaacaggaggtggtccaaatggacatcctgagtcccagactctgctttgtccttgggaaacagctctcagtagtgtggtcagtaggatctggtctctccagtgtaaagactgtcttgtctgtaactctttgtagagatggtgtgtgtgcctgtgtatataaaatgtactttgtcactagcccacttatcattgtgtcacagacagactgagactagtaaactttcattgagtaggactttaaacaatttctaaaatttcagaatttctttaaggattttttattggctttgtttggaccaaaatatttttctgctaagtttcacttgaagtaatttagcattttttctatttctactaaatgctaggttctttcacagtgattagtgcaatagtcacatcaactcttacaggtacacaagttgaccccacttgtacaaatagggatatggtggctcagacagttaaatgacttctcaagtacataagtctatgaaataagaggtctgagatttaaatcccttttcaaaacctgcccaccgtaccacagtcttccatctggcagtagggtcagtcaagacaggtaaggtttttttagttttaggcactgtagatacaaataaatatagcacctctaaaagtcatcctcagaactctctcaagtcaggtttgagaaggtgcaaggcaggctttcatggtgggggcctgtgactgtgagtaacatctagttatttcttacagtgaatactagagcttgggaaagccagaggttcttagcgcagtagatgcagttggacactcaataaagagtctcttaatatgcaaggctgtgggcagccacatttgacttttataatgataagcaaaacagttctgtgcagtgattcatggagacaattggattctcatgttctcctggagctgtttatgataatatgttaccagcaaatgcaagtgagaaatttatagcaaatagctataagggaggtagagagctgtagaggtatggaggggaaaacacaagatagtggcactttagttatctgttaaagcagactattttgtgcatattaaaaatgtggaaatctgtattgctggtaaaatcttccttcagcttctatagacagtgacagtttagaaaaattcacgcccttgtgtttgaaaagctttcctgcctctttctctagaagttagggtatatgcaatgtcacatgcagtaaggttttaggatgttgtttgagttcctgtgccctccttgggatcagctgagacagttgtgtctaaatgaatattgctggagctcccccccccagctcccgcccccgtcccagggctgtctgattccctgcttttgcagctggtatagcagtaagagtcataccttttgaagtgcttccagctctgacctgtgtccagagtagcttgtgaggtcagggctggtgagtagaaattgggtctcatcttcctctaaacctagatatgaataagcagtggtatccttgtatttcaccattgactgtttaaggacatagttacatgtgggtcatcaatgctagtcagaaaatgcacagtagaaaaggatggtttacattaataaacagttcttagacactacagcgcacctcccagtctcctgtattgtatagaagctgtagttagttgctcaagtgattttgctgtcaaagtacctggaatgagagtctggatggccgggtcattgacctcctcttcttccttctccttcctttccgcctcctcttcttccttcttgttttagttactttctattgccaagacaaaacactaagaccaaggcaacttttaaaagaaagcttttaatttggggcttacagttccagagagttagggttcatgacgaccatggcagggagagtagtaacaggcatcaggtattggtgctagagaagtaggcaagagcttacatgttgagacaacaaccatgaggcagagaaagagttaactgggaatggcttaagcccacctcacagtgaaacatctcctctaataagtccacaccccctaatccttcccatacaattctactaactttgtctaaacattcaaatatatgagcctgtggaggccattctcattcaaaccaccacagcttttctcttctttctccttctctttttcttctctctctgcctgtctttatctctatcccttctttcagtagatatctagtaatcaaatacctccaactctaggattagaaattatctttcgtttgttttttgaagtgttagggatcaactccaggactaggaaagcactctgccattgggctatactttaggcctaaaagaaaatagaaaagagtggattaaagttgaactaagtgagcatttagaacacacacacacacacacacacacacacacacacacacacacacacacacacagaatattcataatgatattctatatggagggactatattgtaaggaaggagtcatgtggtaattctagactgccagctttcacactctgtcctctgtttgcttggtatgccctttgggtgagtgctgtttcattttctctttttttgtgagatggaggttttttgctctgtggtcctagctggcctcacagttattatgtagattgaggaagttttgaacctgaagttatcctcctgtttctacctcctgagtgataggattaaggacatgtgtcatctcaattggccttatattttatttttttaataagcataagaataagaataattttattccttggtttcattattaaacaggacagtgatgtctcctaactcctgttgtagtctgagaacatgagctcacactatgtgtagtagcagagcacagggcatggcttttctaagtttttagtgatttttccaatgttcatctgtctaaccatcatctatccatttactatctcatttgtttatctttttaatgttcctggaaaaataaattgattggtttggctttttaattgtatttatgtttaaaatttgaaatgaatttaatggatcagggcgtgagtaaagaggagacatttaatagagtatggaagtttagaagcttcattttaaattttctatcatggctactgtttttctggttagttaatacccttctagtttctccttaattatttaatagcatttaaacaactgggtaatatttactgatgtcgtctttataccaaatattgtactaggttggcaccatggatgcagagaaacatgaaattttgttctctttcttggaaactctatagtctggttggggtaatctatacaattgcttatagtctatcattctttcattagaaaaaggttgtgtggatgaactattgaataaacacgttgtgaggatgacttccttagagcacttcctgagaggaccacagtacctgggatggtccagctggttccacgaagctgagggaagtgacagggccaggtagaacctaacagcaagtgtgaacagagcttgagggtaccagtgtacacagggcagaaagggaaggtacagcccagaaaaggcttaggaaagtcagatgagtctgggtgcagggtcttgaatgcctgggtcaggagtttagatctcactgtgtctcctgaggaaagctactgatgtgttttgattagaacagtggaggcagacagaatggcagcaattcattgaaagaggaaggaactgaaagagataagctagtttagagtaggttgctagagttgagcctgatgcacagaaaaaccctgtcctgaggttattttaagtatggctagcagggagggcctgagagacatcagcagggtggcttgacacagttgaggcaggctggcaaagagcagctgggatgcttctgagactcttctacgtctgtgtaaacaagggaaggtgctgaggaaaactctgatctacctagttttaagttttgttgctatggcattgtaaagtgtatcttcatgttaacagcctgtggttgtttggggcctttcacagaaggaagaaatgttgggaggagacaaaataatcatggggtttagaaataaagcagaaagatgcttgatcaagagtatagggacagaatagaggtgaatgcctcggcacatgagtggtatatttgtatctgttctcttaagtaaaaaagaaagatctatttgctcattgaccccctttcagcttttccttctgcttttctttctagagtcattgagcatctgtaagatgtgatgcatgggtcaggcactaaggagccagcaatgagcagggcaggtgtaagtctgtctgtgggtcacaaaggataaaatcctagaataattcctcctttcctgtacttaacagaagcttgtgacaatgtctactagggccttggaattatttctctgacaaagtataccttttctctcaacattccttattatctctgtattgtaagaaataccatgtgggtgtataatttcagaaatggcttaaattagccatcatcgaagttcaacactcctgattgcatcctctcagctaggaggttgtcactctgtaaggtcacatgtaggatctcttagaaggaaaaagtttgttatattacttaaaaattgcaagatcaaggaaaatgatgttttcactagatgatggcaaatgtattacagatcacagtcaagcttgcccagaatcccgacttctgtcctactctccccgctagagtttctgagcctgtgtgagcacctgtgtctttcttactcttccctgatgatagagagtggagagagtagagtgaaaaggagcctgtctttaagaaagagtttagtctaaagaaattgtcccaacagggagcaagacaccagattgacagcttctgatttgtatgccgacttagggaatcttgagctgttgatggtgcccagtttgtctctttttaacctggtgtaggactttctgctcccctgccaagcctatctcctcatgagttgaatgattagaagtgataattttttagaacagaggtgagaggcaaaagtggaataccagactttagcaacttatgcacatttatcataaaggaaggacactactgaaggaaggacactactgaaggaaggacactactgaaggaaggacactactgaaggaaggacactactgaaggaaggacactactgaaggaaggacactactgaaggaaggaaacaagtcctctgagctgggagcatagggggagttgtttgtctgtttgcttatttatttattttaccatattggaaagaattatatgaatctgagcattttaaattttgagttagacataaaagaacgttactttgctaagagagcttttatgtagcaggtttcctttttatgtgccaggatgctaatgataatagttttacctggaccatggcatcttcagtgtgtgggaaaaccaggtcaaatgttcatagctttaaaaccaaactagtttgtagttaccaaggtctccagaagagtcagtcagtttgggcaccagatttgggcaagaattccagatgctgaaggtctcaaaaacaattgaagagatgtatcctactcatggctatttctaaatttggatagaaataatcaattttggaagataaatttccaatgtaaacaacttagaccaatttagaagacaaaaataaaacatacattttccttctcttttaaggaaaaggtaagtaaaaaactaatgaggttaaattctgttcttttccactttcatggaggattctaaactagaaggaactctctagaggttagactgttttgtgatggacattctgctgagtgtgaggcatataagccactgtggtgtcacctgtaggcttttgtaccatgccagcaaggctgtgtggctcctattcatacttggttcatttcccttaaattggtctttcttattgtttttcatttttatttgatgtaagactaataaacctttctgataaataacagagcatttctgtcgcacaggcagggttaaaatgcaccccttttgggggaagccagataggtgtatttactctgtagagagatttagagttgattttttgttttctttgtggtaattatgtttgcactttgctgatcactagttgtgcattattacaatggaaggtgacaatttgattgtcttcaattggagaaacaagtaattttatattcactaagctgtcaggtaacactaactcacagaactgagagctcctggcaatgcatttggcacctatatttaactgctttgatgcttgcataacctctgctaaatcagaaatgcttctccggctggagatggttttcagggctgtgcaatgaggttttcattaagtagacaaactgaaaatgaactgcaaagccgtgtgtcttgcccctttctctgctcctcccatcactgctctcctcttcctttccttcacaccctcccttttccattctcccctccatctccactttcccatccttcttttacaggagtctaaaatgcatctgatatgtccttaccagagagaattgccccatagctttatgtaactgatgggaacctagaaaatcagcttcttcacataattttgtccagcaaagctatgcttgagatttcatattgggaacaacctcaatagtatcaaattttcatatctctctctctctctctctctctctctctctctctctctctctctctctctctctctctctctccttttctgagtaactgacaatagaggaagaatggaaaaatgtccagggatagcttcctacactttctgtttgagagaatgtagctctggtctgtgatttatttatttatttatttatttatttatttatttatttatttatttatttatttatttgtatgagagaagcagatgagatgttccagaatccgacagtctattagtggatcagtttcagcgcagtggggatgctccttgaaaaagaaagcttttcatcccacgtgaagaggatattctaagtgaccatgtggaaataaattcattatgctgttattttagatggccttctcttatgaaagccacgaagaggtctttcagttgagctgaacagtggctgagcttgattaaaaccctctgagttagggtgtgtatttatagtagccattgttcagttttgatctgactgtcaagccactggttttatttatattctctggtagtggctttatagagcaaaactcccaacagctactgtgagaaaattcagtattattttcaaaagcaaaaagtatagtggttccatgataccaagttgttttgctcttaggaaggaactggatacacagggacaaatgggatcattttaggttttccataggcagtcagccaatcaaaggccagcagttggacgggttgcctgggccttctagcagatactgactagttagacagaggaggttacgtgatgtaacattatcaggagaaacaattcatgagtcaaagcattccaagacatatgagctctagtccaaagaacagacttaagctatataaagtgacagcaacattgtcagctaaatataggctccagagatacagatttgatgacttgagaggaagctgttccaggtagttcctattctgtaagaacctcagagcgcctttggtgacaattctggtgcatctgtatggaaaattagaggccttagaaaaatcaagaccattaatttaatgttaagtgtatttcattgcctcatctctgttaacttgccagcttgctcagatccttgagtatcctgacaggtatcacatcttggtgttctatataaactctgaaagaggagctgaaatgctagaaggaagatggcttctcagctttccagtagctctgacagcgctccccttgcactccctcagttgcttattaagacatggacacggaaagaaaaattggtaaaagcccacaggtatttggaggtggagtggagaggacatgagattgtggcttcaaagaatacagagacccagagagcaagggtggcctctccagtgtgtgtgtgtgtgtgtgtgtgtgtgtgtgtgtgtgtgtgtgtgtgtgtgtgtttgcgtgtgtgtatcctgcaagaggtgtcttcactataagatctattttatatctataggtgttctgcttgcatgtgcatctgtgtaccatacaggtacctaatgaccttacatgtcttcacaaagggacattggatttcctggaactacagttatagaagtttgttagttaccatagaagtggtgggatttgaacccaagtcctctgtaagagcaacagttgttcttcaccaaacaggccatttctccagccctcaagactctcttcacgttaaagtgtagagttaggcgtttccttgcaaccctctcaaatccctgaacgtgggaattggaggcacaggaaaaaggcttggaagtcattctttgccctagcctgggtggactggaatcctttgtgagggttcctgggcattgtgcattttggcagctgaatgtatctgttactcacgctccttaaaatgagaggcagtgttatatttttttggaaaatgaacttatttctcagaatcagatcaagtgcagtgttcaggaaataatgagttatctaaccgagatgagtctatgctgaggttcaaaaaataaatgtaagcattgcactgaactttaatagttttattatcagcaaatgagcttataagtgctgctttgtgttagaacagcatttcttttttatttttagattttattacttcttttatttttgagattatgatataattacatcatttcctcctccctccaagccctcccattcacccctccttgctctcttttaaattcatagcctcttttttcattattgccaccatgtgtatgtgtaggcacagaattcttttgaataagtgtaacatacctaaaaagtgagtgttatttgataataaccaaaataataaaatattagataatagttctgtgccattatattggaaaggttctgtatatcatacttttctgaagcagaggccttagtgtatgtatgtgtccaccatcttcctccttttataaagcccagaccacctcacctgccttgctcaagaacagagtgtacatttaccactgaatcacttggcagtaacctaagcatctggacccttacactggggcttaaggtagagtgcttgtccctttgttggagtagagatggtcctgctggtgttctggaaacagcattgattatggagcattgtccccatcaagctcataaccccaaatcttaagctggaaggtcttctcaatggtccaacatccaaggggagtcacttgatctattgggcagatatagttcaagtgcagggaacatatgatgggaactgagtttcatatgtcccaagacatacaattctttttggaggttttccttgataatagctatgccccagaaaaccatcttgtttaaccagtgtgataagttgacaatgtagttttcctctctgattataatgtgctctgtgtagtcaatacactggtaccatgtgagtgtaatttcctcttttatttgatctccaatgcactgtattataaataaacagttaaaaaaaacaccaaacaaatctgttgcatttccttttaagattgtaccactgtagacacttgttctagtaaagtagaattgggcacatttgattgcatttaaatttttcatgcttcagcagtttggctgggagcacagcaaagaaaaatcccatgagcgaggagagttgagaataatagaacttgattttgtgtattatagcggcaacatttgcgctgctttagtagggttgtgtcagcacttccattataaacccctgttttcaggggctttaactaggaagattttttttaatacaaattaaaaaaacaattcattcgaatgatttttaagttataatagagcaaaaataaaacaaagtaaagtcacataaaattgaccattttcgcaaagattttcattttttgttgctcattagttgtgtgggacatagctaggtgaggtgctacctaatatacagaggtggagtgtatggaaacaccgttgtagtggatagtatataagcatatttaaaacaagtgtgagaattcacacaaagctggcaaaccataattaacaaggtgtattcgattcatggactcctaaagcaggtgacttgggtagagtgatgggaacaagggtttcaccaaagttgattgtctgtgcttcctaaagtacagctcagttgctgtaggaaagtgtcaaggaggattgctaagacgtggaagagtgccaaggtaaggttacctacacatgcttgctgtgcaaacctgacacgagttcgatttccagaatccactcctgaatgttgtcctctggtctccacatacattactcggcaagtggcctcttgcatctttgatacctcttcccaccccaatattaaaaatgaacaataagaaaggataatactaaggaaagaaacaaatgaggacataatcagttaaattgaagactatataatcatttatgtgtaaaaattagtaagcatgatccagtagtaatctatgatttatttaataaactatgtgacagcaagatggctttgcagataaaggtgcttgcagctaagttaaattttaggacctacatagttgaggagagaacctgctccggcaagtagttttctggcctccacatgtgcacgcgcacatgtgcacacaagcgcatgcacatacgcactgatagaaatataacaattaaaaaagctatgcattaaaaataagttgtgtgtatattcatataaaagacaaacaactgccacttagtgtttctcaacctgtgagtcgcaagcccattgggtaatataccaaacattctgcatatcagatatttataatataattcataacagtagcaaaattagagttatgaagtattaatgaaatcatcttatggttggggtcaccacagcatgaggaactgtattaaactgcgttggcaaggttgagaacatatgtcctagactaatgcaacacaacaaccaagctactgctgagaactgaaatagcccaactgtcttatccaaaggaaataccttgatgcgagaacaagaatcccctcctcctctgtggacaacatagcgcagagtgctaataaagcaagcacagagaggatgtcaagcacgatccgaggagcgctcttaggccacagcgtgtcgacctccttaccaaggcatgggctgggagcttctcctacctccccactcctctgcctggttatggtgtgagctgaggatgaacagtcggctttaatatattggcagctgagctggtatttgaaaccttgatacacatttgtgtttgtgggtgtaaaagaaaagacagcttgtgtgccactgtaaataggcttctgatgggtcactagagggttcaccagaagcttgccgatggaggagaggtgaggcctctccccactaattgtattcagcgtgtaatttctaaacttccctctgaattttgattttcaattaacactccccatttgaagataattttctatttaatgtaattgcaggaaataatttattggctgattaagactgagggcccagccttccttaagaaaaacactcaccaacctgcctttaaactcaactcatagctttggacagattgagtctatttttacagctgcagcgttgtttaataaggatcgtaccattgttaaccagcatagtctgtcgtcaaaatgattcttaagagactgtttacattttgcgttttgtgtcatgattaatttatactaaagcaacaatcacagatactgctactggaaggcagcagattactttataataagaggctgcttgttggagagaacctaagtcactctgagttttggattatgactttttcttcacttgcattgaagtgtttctaaaaggtggcagtcaactcattcattcgtttttaatgtgtgtgattacattagggctaactgcccattatctgaacaatgcaaacactcttgctgcctgtgaccgatgcttgataacttacaggacagttataattgcctggttttgcagtggtatttctggggcccgtacagtaggttctgtagtgactttcaatactgagactcatccattggttatgattctccatgtgtgcatgtatttccccatttgttagcaccaacaggagtcactggagaatgtgtctgagtctttgaaacggtgctctttagaacattcggtttctctctttttagggaaatagagctattcatctgcaaactgttctattttctagtctcatctaaagagatgaaagttttggtatttgtacaatgattattataagtaggtatcagcattttattatgtttcaaagcacttcaaaagcccgtaatacttttatttagaactgtgcataattagtttagctgatcttctattaatgtttttcactgtaggatactaactctgagccccctcattaattgtgagaaatttagcattagctgttaaatcctatgtgaaacatgggctgctacataaaaactactgtttaaattggaattaacttaattatttttccttgcacttgatatttccttcactgcaatattcatgaaagcatgtgacagatttgtaaatttaactgttaatctcagatttctagaccctttaatcagtatttatttgtctgtagaaacagtacaggcaagttaatgatttgctaatttgaaaaatgctcatgtggttccctatgttaactgatttgtgcatttaaaaatggtatgaaatcaattaatgttaaagagcaattaaggtggcgattgtattccttccattacacagcagtttcaaaggaaatacaataaataaaaatcaacacgaagctttaggggaaaatggattcttccattaatttgtaaacttttagtgatttggtcactgacccctttactaagaaattcatctttctaaagtgatgctctcagagctctgtaattttgcattacatgctttttgatctcatctgaagcacacaatgaagaccccactacacagtcctttgacagtctctttgtgaagactgccactaatgagagagacgttaaacctctagtaggcacaggaggcattttatattttcatagtagatgctatgagtcatgtgtattctttctgacatgaaatggagatataattattttagaaattcaactaaaatgccacaaagttgctataacatttatctgacactagaagccattcagtcaacatgacacttaaaagttaagaagcaattcttaatgaaaagtttcatataggccattggtgtgcggtctgccactcataatcaatatttaagataggaagtcatgaccagttttattagcatattaaggacaaattatttaatgagtctaatttttttaaacataagcttaaattctcccttcatcactctgtgagagagttaggtattctctctctgaagtctcccctcagagttgttcattagtccgtctactgactcactcggtctttccactgctaaccaccaacccaagtacccttgccaccagaaactcataaagcctggaagaagggcatacaaatacatatattgtacatcatgaaaacgtataaagatcagatttgggggttgtgtaaagcagttagggggcacaggtaaagagaaggaggaggataacaaataagccaattgtcctttgcagtttacactgtcaatttctctgtttcaaagatttttatttttttgctattattttattattagtcaaatacaatagcttctaatttgtttgttcagagtcctctaatccacagtgtttcccttcttctgcagaagaatgtcttccaagcaagccacctctccatttgcctgtacagcggatggagaggaagcaatgacccaggacttgacctcaagggaaaaggaagagggcagtgatcaacacccggcctcccatctgcctctgcaccccataatgcacaacaaacctcactctgaggagctgcctacacttgtcagtaccattcaacaagatgctgactgggacagcgttctgtcatctcagcaaagaatggtgagcaccacaattctagtgcctgctatcagcgatgggatatgttaaggaaaacgaaaatacatggcttcacagtattcctggtcagaccacaaaacaaacatgcggcatacataccgttgttattattctggtaactgggaaaacttggaaagcagtttgtgatctaggctatggctataattaggtctgcttgacaaaagaatattgatttactttttaaacaagcagaagtcagttatcttataccttccattttaatttaatgtgattaatttagtaatgtcacaaaatagatattcgaatgaagtgtgtctgtgtattaacattgaacaattaagcaaataggtccatgtgaatgagatcctagtgtgactacatcttcaataaggacatgcctgtatctatcattttaaatgagaagtcatgtgcctatatattactatcaaaggagcattggagactactgtaccatccaaccagaccacataggttttctctagaagcagaaacaacattccaagtaatgcaggagtagggaactttcccatggtaaattctaccttataaacgtcccaacagaagcctcaggacggacattaattatctagtccaacaacaatcttcttcttttattatcatctagaagaaaccagaaccttgatatgccttaaccctagattgtattttttaacttttgggtgaccaaaaattaagttagtgaaaaatatcttaagtagacaatgagagttttagtcctaaacaaaaaacaagatatcattttaaatgcctttgttaacaaatgaacatactgacataaataactcccagagggagaaaggtttttgtttttcaaatgtttttgtagacacagtataggtgtgggggagggaatcaaaggatgaatggagcatgtcttgaataattttagatttactccatgattaacaaatttcattatgacattttcataatgcatgtagtacttttattacagtttcctgctcttctaccatttcttaaacacccccttcctctactttttctgttctaagttcctgatactcctttcaggtcaatgtttctctcccaccatattcaacttgtttcatctatgggggagggatacttatacttttctttgtgtatttgacttatttctcctaacatgatgatctccagattttcttgcaaatgacatcattttgttcttttatacacggggaatcaagagtgaatagttttctgggctggagaaagggaaggcaaatatatatcgaggcaggaatggagaacattttctgattgaacttaacttgttcattccatgactgcacggtggcatggctgaggtgcatatccactctctgctcctcgctcataggcaggataatgcgactgcttggtctttatttgaacagatatgtatggagcaccttctggatgccacacattccctaactatagctgaattatggtgaagcagaggtgatgcatgcctgcctggaggttgtgttcttggacaggggacagacatgcaaatatgtatatagttgaaggtgtccatgctatgcagaagatcagaatgttgtctgaaagcacaatgaggtgaatctaactttgaatatagatggataggatgccctctccaacctaaggcggacagaaagtagtcagagtagggcaaagaataaatccgtggagagaacagcatgtttagagtgtctgaggtgataaacccagaacttaatttaaggaaatgaaagatggtctttgtggtcagaggataatgaatgaagatacatcagatgcggttggaaaaatagataggagccatatcatacaggccttggagatggcattgtggaggtgagatgtgatctgagtgcagtgggagcagcctttgaagggctgaggaaggcttctcacagataattccaactgtggcccagtgaatggatgggcgggcagcaagagtgaaaggacgggccctggggtttctacttcagaaacctagatgaaagattacagtgacttggattaatgtaaacaaaggggggcacagagagggactggctcaagatagctgtgctttgatgccatgcgcaggcctgaccaagtataagtaactggactggaaatgtatggggagaggcagggacaatacactcaagttctgtttcttctgagggcactttccttatttttcttagaaaaactttatttttggcaagtgctaggttgctttgctgagttagtctgaattttttgttatgtagaacttgtcagaaaatagatactaatgtatatgtaataatttatgttacgtatgatttatggtagtgtaaaatagcttaaggttgcaaacatattatagattagtgtgaaagagaccattctcatagaaatgtttccaaactttcgctatgctttctgctggagcttttgtgttctccaaatgctggaaagccaaaatatttgtttaactcccactctatagcgtttcccagctgtgtacttatatggtgcaataaaaggatttaacaaatgggaaatagcagctgcatgtggaaactttctttgtgttccctcttcaccagatagagtcaacaacatggagcctgtagcctcggacctgaactgacctaggccacagatcaggtcaccaggcagcttctgtttcttgtaaagaaaaacaatggaaggatttttatgttcctgccagacctgcaaatgtgtgtgtgtgtgtgtgtttgtatagcgtgtgtatgtttgggtggagtgtgtgtgtgtgtgtgtgtgtgtgtgtgtgtgtgtgtgtgtgtgtatgtgtttgtatagcatgtgtatgtttgggtggagtgtgtgtgtatgtgtgtgtgtgtgtgtatgtgtgtgtgtgtgttggagtaggaagactgtgactgatgtgaaattttaatttatttcattaactaagaagtataaagcacattgatgaagagcccaggcatttgcagttgtcttctatggatcctgtctgtctgtttgcttgcttgattactatcaactgaatcccatcaaatactgtagagaaatagaagccaagaatgactatacaaactacaacacacatttgtcagggcttcttcagtttctggaatcagtttccacaatggtcctcatcttctggacagcatttggtctaccgaatccagaagggtttcactgggaaatatcaggaacaaaagtagaaaagacaaaaaaattcaccagtccccatgacctgactagaaaaaaagtttcaacttagcatcctggttattttaagtggaaactcaataaagtaagatgccacacagtttccagtaataaaaacaatgcggaggaatctaagcacagaaggaggatagaagttctagggaagggatttcacagaccaatgcgatataaaacagaaaccagaatgtctgattttaaatttagtgtttttttttaatcaactggtgacttttttatggttgaagtgttagtacacataagaatgtctgtctgcttctgtgtacagcacttcttcttgtcatggttttctgggtaccaatacctttttggcataggaacattgacaccatccagagatgtgcattttcattcttattgaccctgtgccattagtaaagaatgcacacacgtaataaaatgtacacagcacatttctttctgatgtcagtgtgaaggaacatctctgtgatagctagtagtgactgatatttgttcttatatgtaattattttccacaaaagttttatgtgtagaaagaacatgtgagcttaggtattgttagtaaacttctctgcaaattacatattttgtggggcagggtgtgttgtgaagattgcatttctgtgtagctattgtatcaaatgaatgagttgagaggtgcatggaatactatgttctcctactagtacaattttattctcttcttctttttttgctttaaaatgtaatttaaagaggtagataaccattggccatggggctttggaatgactactcagttccagatacaaagactacttgtgataatatcaggtttctgttctagtagaatttacatagcaccaggtctcagagtcagacagttcaaacagtgaggaagattcagtgaggggagaatgagaaggaagatctttctaaagaggaaaactttcagctgaaatttggaacaagtcaattgtacagagacttggagatgataaatataaaagtacttacaagtagtaaaaagtaatatagtaagtacaaaaatcttaacaatttctcaattttaacagtgtttggatttaaaatatgtttttatttatctacttcctgcccaccacctctcaccaattccccctgacaaccaacccaacttcttcctgactttatgtcctctttgaaaatttgttactatattaataaataatattaatagttccctgagttcaactagtgctataccgatgtgaaaggatgtaggaccatccactgggggacagaccacctatcagtaggcacattcccacagaagagtgaatcagcagcttctaactctcaataggtcctttgatagagatggagcctcagcagcccctggaattttcactggcttgatattgttaaggtcttatccaagtagatgttgctgatgtgggctgatgtgtataccagccacgtcatgtccaaaaacattccacaactctccttcccatcctatgtctcttacattcttttttcccactcttccatcatgtttcctgaatcttggatatggtgaggttgatatagatgacccatctatggctaagtacctgaagtcagcactttgaccagttattggtctctgcattaactaccatcaactgcaataagaagctcctctgaccaaggttggaagcagcacaattatatggatataaacataatattaggagggcagtttgacaaccctccatttagtataatagcctcaatagacttccctattagactctatgatctttcaagtcatagacctttgaccaggttacagtatcagacaaaaatacctcttatgaaacaagtctctaatccaatcagaaaaaagttggttattatcacaactgtcataccatgatcacactagtggaaacatcttttctggcaggttgatgctatagcatgaagggtccagaactgggaaatgtctttctgccccggtagcctgaacagcaccttctggcactgtgaaagccattaggagagattcctggtcaatttgagatttcttaatgtcctgcaaccaaagtgtctttagcagttagtacaaacatcttttgattagtgtatttgaacaacaaaacacagcagagtgtctggagaggacagaatgatgtggaatgaaatcaagggcaggcagaggatacatatcatagagtctcaaaggttgtaatgaaatgtttgaactttgtttcaagtgcaagaggaagccattgggagattttaagcaagacagtaataacgttttatttaactttctcatagatcgcattgcttactgtgcaggtacaactgggatgaggctgggagaggtaacagtttcagaggttatccattgagaccacgaaggcaggagcttagtcaaaattgggtgaaataaaagaggccaacgtccagggacacagtgatagacatacacattcccgatcaaaccatggtgacttctgtgtgaccatgaaaatgtgatgagacaccaatggtttggctctatctttatgtggagagagagagagagagagagagagagagtgcatgtgtgtgggatcaatgtgtgtagctatatgtgagaatgcacacatgtatatatgtttatagaggtcagaggctgatgttagttgttttcttcaatcaccttccacttgatttactgagacagggtcacttgctgaacccagggcttgccaatttgcctagtctaactaactaacttccccagggtcttaactcaggaattttgtgattacaaactgaccaccttacctgcctgacttttatgtgagtcccagaaattcaaactctgtttactaggaagtcctttatccattgagccacatcccagccaacacagggtccttcttgaaaaatgtacaacgtgacaataaggtttaaagtaggactcatgaacataggcctttgtccatttacactcacaatcatattgatatttattaggcaaagatgttattacatatatctgcgtttgaactactcattaagtagaaaaaaactacattgaaccctcagcccagaatgtctgaagctcttgctttagagaggcaagtggactagctttcttgcttgtagggactgtagcttaggaagtgtaattgatctgctcctgattgcttgcagcctaccagaggactgatgcacagttcttatgacccctggtcaatctatgaaaaactcaaaaaatacagaaaagagcaagatttagatggtgatttttattttttagagaagttttaaggtaagatgcacatcaacaagagatgtgaagattattctttgttataatcaaaagaaataataatgccatgctggaccactcgatagtgaccaggagcaatgcttccttgcttgcaagctgttgggcctctctgcctcttgcttcagccaagcaaaattgctagtcagcactggagtgttttctgtagttcacttggagtcataaaatttctggtgtggactttgtaccatttctcggaacatggctgttgtcattgtgtgataacatagtccaggaattctcactggggatttaatcttctgccacacttcatgttgtgacagacttttagaagatttctcatcttgcttctttttgaaagatttaagaatgttgaattgttgccaaggttttttgtgtgtgtgtgtatgtgtgagagaaagagatttagtaatttaaggtactaggtaccaccccgatgaatttaatttcaatacatttattggggctataattcagtaagtgtggttcacctggtctgactagtattgtcctcatgcccgagggcaggttgatctgtctactgtgtggtgtctgatcaatatctgaaacccatgggaaaaaattcaaactggcaatatttaggcttcttgagaaatttagttacttcttgtcttagttacttttcttctgctgtgacaaatcaccattaccaaggcaacttatagaagaaacagtttcataggagtttcaaaggacaggtctgtgaccatgatagtaggaaacatggcagcaggcaggtactagaatagtagtagctgaaagcctacatctgatccataagcatgtacatgtacatatatatatatatatatatatatacacatatacatacatatatatacatatatatgtatgtacacacatatgtatatatattcatatatatttgtgtgtatatatattgagagagaaagagagagagagagattgaatatgaatggcccctataggttcatatagggtttggaaggtttaggagtgtggcctattttgagtagttgggccttgttggaggtgtggcttcgcaataggagggtttttttgttgtttttgtttttgtttttttaagaagtcccataaagaacgggggagaaagcattcaaacatatgagccttattcaaaccaccacactactattctcattttctaattttgaaaattcattcaacttagaattcaaacttaggtgttgattaggggaagatgtccaactgtagcccaaaagacaccaaacagtattattcccttttcccataactttgaaatcagcatacagcgctgtctctttttataaaaattatttcattaatttaatcacaaacttagttgcagttcatgctgtagagtaaagccccattttgctatgtggaatttgttaaaccttgccgtggcagtgacatgggaaacttgtttgtgtgtttaacacactgatactctactgtaactttaatgcctggatcatgccctatgtttcctttctgttatttttcctccatgatactctaaaagacttcctcaaaccttgactgtttaaataaaaaagaaagaggttattggagtgctcctgaaggaaacttggacacttttggaattctgagtggccatatcctactttgtcctattagtgatgtcatagttctttgtaaagacactttctgaaaaaggttttcttcttacctggcatataatcaaaatctttatcagaagcagaaacactagctgctctgcaatggttgacttccccttgggcacgaagggatcaggtatgcatgctgattagcacaatccagtcattagcatgtgattatgtgggctacatattgaacacctgccaaaatctaagaatcccatactttgctgtatccatgcaaagacttgtatttcgtctgtgttttgacagtttgaggaaaatcagtccctgctatcttttctgtcactataataaaactgtgtgcacagtgtctcttcaaggagctgggctatgccacgctcaactcgggactgtgtctgtataagctccagtggctaggcttgtagaggactgaaccccatcactgatgtcacttgtcattcacacatttctacccaatcatgggtattgttgtttgggtgatttggccatcttttcctaattttttcctaatcaattttatgtgatttgtttccccatgaatagttttcttttctttttctgagtgccactagtgtacatgttgcgctttcctaggttgctggtctaccacagagtgtgtcttgtcatccatgatgccgctcttccctgttgctggtttattgtagagagtgtatcttggagttgcacttctacagagcagaagttgtaccatgataattatataaaacaacatttgattgtatcagaaactggtgtaatctggtatagaagaaacagcttgaacaggatgatcctcaggttttatttttcttatggatgaacatatttgaatgtagaagacttttacttttgaaataatcctgttagaatttgttgtcgttaatcagtgggggactacttcaggacaccaatgcttttctgcttaaagtagaactccatagcgcttccagtctgcaagtggtttgggcccatgtatacacttcttcaaaattcttcacgccatctcttcttgcctggctgtgagcacttcaccagaatgaaaaacaataactgaaataatgaaacctgcatatttgtgatggtctaaggaacgtgctctagaggggagggtatggaccgagtggcatgtagggattttcaggactactttgagctttttaggggagcatgaacttcctctgcagcccctttaaactgatgggatgggatgggatgggatgggatgggacgggatggggaggacagtggtggtcgttcctgctttgtaaccacaagccagtgctgtttgccttccttagggtctgtcttctctaattccaatggagctgggttttccaggaaggcaattgaatctcacctgcaccattcagagcctgaaaggctctgatgaggactcaagcaggagagatctcatcctgctcaccctgttctctccacaaacacatccagttcttcactagacaagccttcaataaatgtgtattaatcactttagtatgcaaattattccaccatttgattgtccttctcaattaaaagttttccttgtttctcaagagaggtgtaaccttttaaaagaacaactctaagctatcattcccttttgttaacatagccttccatgagataacatttattatgttgtaatattaaccttctagctatttttttggtgctactacattcccatgattgctaggcattatttttctaggtgatgcaaattgaattcaatattatatcttttcatgaactacattcttagatccaaagtataatttacaaaccttcactaataaaattttacaatcaggttgaaattagaaatggatatttaggcatttaatttatcttctttatatttccttagtaccctagaaaatggaaaatcttgtttaactaaaatgattggaaattatttgtaaacttttgtttttatcattatttaactccaagttatttctattaccagtgtgttgagagtagcttgaatacaatattctaaaattcatctaatttctgataggacttatgtcttttcaagcacagatagactagagcagtgtcacagaatacactcatgatatgaaatgtcaacaaaatggaaaaggaagaattagaacacttagatgacaattatttttattttggactgcgtgtgtctgtgtgtctgtgtgtaactgtgtgtgtatatgtctctgtgtgtgtcttgtaattattgagatgtagcttggattaaacaaatcaaggataccattactttcctgataaatgaagagctccacaggcatgctttcagtctacaggtggtttgggtttatgcatattttcttgtacagattcttcagttaatttcttcttatctccatgaagaaattgaggaaacttttgcacttgaatttatcagtattatttgactttcagctgttttattttgtactttttcattttgataaaacctgtttcattttgcacaaacacaactatactttgtttataatttgaatgtagtggtttgggctattgttctttttaaaatggcaaaataggttaaggaatgaatcttagttgttggtatttgaaagttccctctcagaaagtgcagactggtgatgtggttgtcaataaaggcttattgcctgaggtgggaaaaggcagagcttcaggcactaggggacctgatggtcaggttagacttcctactgctttgtgtcaatgttgagacatttagtgcctagtttcccccctttctgcaaatacagagataagtttgtagatacatgtatgcatgtatgcatggatggatggatggatggatgtgttttacaacactgtagcatctggaaattatttttagtctgttcatattttgttctccttgtagacattgaaatcagaatgctgaagatgttacatatatttttctagattaacacaagtttcctgttaagctcatcataggtatttgatgtattagaaagccatttaaagacttttgcagtgaaatcctcaaaattggaacatgtactagacagaagccaatgaagagagattgttgggccgaaagaggccttgagactaagtgtgtacagtgtgcaaagtgatctgtccggtctttcttccctagattagcttcgccttgaaaggtcttcactgtttgtagaaaaacatctttattaagaaacaagtggatctaacaaaccctaattgggacctggcactttttaatgttaagatgggtaaggtttgaagaacagagcctgagtagtttgtctaattttaagcataccagttgtcttgctggttataacaatcacaatgataacacatggttaattttcaaaccactcagatgtctctcagataaaggagagagaaaatcatcttcccagagcttagcaggaggaatagacttgacattagagcagactttgagaaaacgactgtggagccttgggcccctccacacagtggacctgtgatctgtaagaacttgtgcaacgtgtacaacttttgcgtaattcttcccacacccagtgcctcggattgtcaacaaaagggggaaaaagactcctttctggagctgttctccctggtgggactgggaggggacccagaaggctgctaccttaccaaaagcctgtgctcatctctgccactgatttgtcatgtgactttaggaaagccactcttaattcttgacttgaatttcttcatctcaaaattgaaagatttgaattgtaattgccaagtctcaaaccacttttaactcccgttttcagagctgaagtagtttgagctggttgagcctggcagcattgttagcacccagtgactttttgagtgagtgactgcctgagatgggagacacatgagtaagccaagggctgagccttgatattctaagctgttggcttggcctctgaggagtttaccattaggcattcctgcctgagaatacttacactccactaccaagaaccctcctgagtatttccatctatgatacttcctgcccatggcactagaacttaaaagcatgatacctctaaggcagtgccgataagggtgacttaattcttgtatagtcaatattcaggttgctcagtacactactctttaggagagagaaaaaacaagctggcatatacttcagggagactaatcagaatatctgaactttttaaaaattttattttatttttctgtgagagggtcttactctgtagatcctagctggcatgtaactcaccatgtaaaccagggtggcttcagacttatggaaatccacctgcctctgtcccgtgagtggtaggaggaaggttctgcaccacctcttctctgtctatgaactatatctttatgaagaagtaagggaagctgggatgtttccccgagtttgctaaaaataaggtagaaagttgctatggtagctgtatggtgtattgaaagtgtttcaatctgaaatttatatggggcagatttatagattgaaataaattttatattcttataaagagaaaatttgtcaactccccagagatgaaagactgctttgggaaatagtgaatcctccatgaacaggaaggtatttgcagagaagcccccgcagttgattgtcagggctttctaccactgccaccaatcctgcaccacctcattagtgcccatataactggcataggtctgagaatcttaggtttagtcatgcacttaataactacccagcgcagccggtcctttattggtggtgctattgctcccattttagagaggaggaaattaaagataaagagtttaattaagttgtctgagcttgaatgaatgaatggtggaaaagctgggagttaaactagaaaaaccttgcccaattgcctgtacctgagttaagtaaggattttatcattccatgtgctgcacagggatccatgcactggctgtgactggaaaactaggattttaaggatgttaatatgaaaggtgactgtatggtgacaacacaggcactcttaagaacttgtctccacaatttgtgcttaaaggatgcatccggcctgcctgcctgcctatgttctccctccttcccttctcccttccctccctcctctcctctgtccctcctttcctaactccccctcttttttctgtgtatacacaaacttccacttatatgtcatgataatgaggtagtttagaaaacttttgggtttcagaagacgttccaacatgtaataaggacacatgctccactctgttcatagcagccttatttataatagccaaaagctggaaagaacccagatgcccctcaacagagggatggatacagaatatgtggtacatttacacaatggagtactactcagctattaaaaacaatgaatttatggaattcttagacaaatggatggatctggaggatatcatcctaagtgatgtaacccaatcacaaaagaacacacatgatatgcactcaccgataagtggatattagcccagaagctcagagtacccaagatataatttgcaaaacacatgaaactcaagaagaagggagaccaaagtgtggatacttccctccttcttagaagggggaacaaaatacccatggaaggagttacagagacaaagtttggagcagagactgaaggaaagaccatccagagactgccccacctggggacccaacccataaacaaccatccaaaccagacactattgtggattccagcaagagcttgctgacaggagcctgatatagctgtctcctgaaaggctctgccagctcctgacaaatacagaagtgaatgctcacagccatccattggacggagcacaggatctccaatgaaggagctagagaaaggaccgaaggagttgaaggggtttgtagccccataggaggaacaacaatatgaactaaccagtacccccagagctccctgggactaaaccgccaatcaaagaaaacaaatggtgggactcatggctctagctgcatatgtagcagaggatggcctagtcggtcatcaatgggaggagagacccttggtcctgtgatggttctatgccccagtataggggaatgccagggccaagaagcaggagtgggtaggttggtgagcagggggatgggagagggggtagggaattttcggaggggaaactaggaaaggggataacatttgaaatgtaaataaagaaaatatctatttaaaaagaaaactttcgggtttgcgaccatttatgaataaacaacctttttcttatgtaaatcttatctttagggagggtgggatatagtgaagataacgctgctgtgactgaagctttagctaactaagcctggtgtatatatagtatatatataaggccactgagtgtaaatggatatgaagatgcatgcaacttatgtaatacaacttgaccatcccactggaacttagaatagatagaagcagggtcgacagagacttgaggtcatggtgggaactttccactttggcagagaagactgaccccctgacacacttgtcaacatgaacacaacttttagtttctttttattatatcaattttagttgatattttattgttttttagcatctttgtaggtactgagtatccataattatctctagactatccagtagttgaatatcaatagaatacccagtgtactttaataagttgggttgattattgatttgggctttcttcaaatgagtctaggtatgggctgagtatagtcactgtatattgagtagtatcagatttcaagaacaagtctatgatttagaatctcaggaaaccttaccttgagtggggcgggactcactcaatagtcataactgctattgcagaggatgcagagaaagaggactcccagctgctgggagtgcaaactggcacagccactatgggaatcagctttggagcctgattaaaaaaaattaaaattagaactatcctatgaccatatttcacttctggacatctgcctagagaactctgcctgtgatggagatatttgcacctccatgtttactgcagctctactcactatagcaggagcttggaaccaatctggtagaccatcagtagatgaacagataatgaaatctgacacattcatgaaacagaatgttattcaactctgaagaaaaataaaatcacgaaaatttcaggaaaatgggtggacttagaatatgtaatattaagtgagatcactcaatcacataaagaaaaatcctgcatgttcttcttcatgtatggatcttaacctatgacacatgcatgtatataagtgaacaagtttgtgtgtagagtataatatttagaaaggagaacaggaaatgatattaaaaaagataaaatgctcactaatgagttcacatgtgtagtatatatagttcctgtaaatccttttcattatctccctaggcataacgcattttcattgcaaaacaattggcatggggaacttaccttaatgtgagctctgattgacattcctattcctgtaggctctcattctccatggtaccaaaccaagtgtctttcactctttaactaagtttagctattcagattatagagtgtgaagattgttagacgtatgtttaataccagaagttaggtaactctgagactaccttagagttctgatttactttttgtgaatctcaaagaataatacaccataaatttgaaaacattgggcaactcgttttgatttttcactgtatgttataattctgattatatcaatgatgtttaataatcacatccttttcatttaaataaacataatctttagggaggctttagtgtgctagaatgaagataaagctgtgactagaaaagttgtacctaaaatggacatcagaatccggggatgtagctagggtggtggagggcttttttagtatacacagagcctgggtccagcactatggaaaacaggcattctcagcactcaggaggtggaggcaggagaatcagaagttcaaggtcatcttgagcacgttaaaggacagcctggaatatatgtagccacatttcaaaagaaaaaatagaaagcacattaaattggcaatgtgtaaagcacaaaaatggatgcatttcattgaattttgcttatgtgctcaagaaagggtaagagaggctaatactttgtcttgacaatcagattgggcagctagtcactgagttgactggtacagtgacttaggccatttctcaagcctttctttcagtggcaatgacttcaacctgtttatgggtctccactccaggatacagacaaaaccccattcctgatctctgctcttccgctcccacctctggcaccatgtttgacatttgtagcactagtccactgcactccctctgcctgtgtactgctgcccattcacattcctcacagaggtgtggcagccgcccagccttgaattagggaggagatagctcacttgcatgtgtaggataagtgctcgctgataacattcctagagaaaatctaattgctaaggtttctggagctttgtgaggagccagtacttagtggattcagcttgggagcaaagggtataatgtagtttaggctcattactccactctgatgaattagtatgaataaaatcctaaaaatagtgccagtagctatcatgacagtatgttgaagagacaagtgacacaaagcacatggacaaaggactcagtaataaagagttcctgaatagctagtagtgggtaccatatgaaatgctttataaatgattgacttctcgcagcaactacttaaggatataattatagctctatcctataaaaaggtagtctagcttccatcctcaagactgtgggcaagctccatgactcaaggattgactagaaagctgggactgacttacagggtgtcagcgatagccagcctccaactctccctgaggaaccaggctagagggcagacacaatatggagaagtcacacagtaatagaggaaggaatgtgtccttgaaactctagccattccaacccagagtttgaaatgttcctgcttaggtgccgcacctctaagcaggtctcaaatgtgagccggccaccatacagctttaactacggcttccctgggagaccctgagacagaaccagcagttctgaatgttgctataagtacttgagtttggaaggattttttatggaatggcatgtaagcaccgcaacttctgtttgctaattctcgggtaagattagtatcaaaaatacaattgcagccttttagtggggaagtcttccttctggagagagatgtgtggaaacagaaaggtttacaaggtgggcttgtttggaattacagcattatactgttgaggtgactgttttgtgggtgtgtgagtagaaagagctctgggtttggggtcagaaatcctgtgtttagatgttcacctgagagctccatccaagtggcatggcagagatactcttgctgagggctggcttgcttcccactcagaaagaagactgggaattcactatttagtggagtatttttagagatatatagatgttgggaatttaaaagggggcccaggggatgccctggggacggggaggggctcaggggatgcccaggggaaggggagacccacatcctgccagagttttacctattctctggtctgtcaggagtgggagagctgccatacacttttcactcatccccaggcgagaattccgctgacccactcttcaggggttggcaaaggggcagccctacctgggaaccccggagctactttgctaaagccaccagggttataggagagagggatgagggaagaggttcccaacactgaccagagtgagtgcagcggatcttgatgagatctctctctatatatggttttagagctttattgtagaaaggcaggggaaaagagagaaggtaggagagagaggagagagagaaagagagaaagagagagagagagaaggctagagagaaagagagtaagagagaggagaggagaagacagaggggagagagggtgagagtgaggggtaagaagagagtgagaagtaagagcataagagagtgaggtgggggcctatcagccccttttatggtctttactgttgctaggtaactggggaggagtttagcctgaaggtcagaagcttgggccattgcctaagtgacttctagccatgcttctcttgtgggggctggaggggggtggtaacttaggcaggagctagagttccaggagcatgagggaatgcctactgtgtcataaaggtgaattatcaccattttcagggttcagacctcagctcaactggagaccagcctgcaattccccacatacagagattacagtgtacaggggtctgggatttatgttaaatgagaagtgagaggggaaaggtagacagagcacacttagatactattatttgatctcttaagatatttcaacaactttaatatggacgaggacatcaattggtgtttcatacttttggagcacaaacaggaaatgatgtaatagagtcagttattttgctgctacaacaaaattttattgactaaagaactaaaatagtagaaatctattaatagtgcagagttctgaaggcaggtgctgtggtttggtggagtgtccccagtgtccatgttttaaaggttaactcttagcatgaagtgatgttgtgaggtgttgagaggtggaacctagtgggaaattttaggtattggagttgtgcccttgaaagtaattgtggagaattacaattctcctccctcttctcactctctctttggtcaggcttttcctgttaatatgctttcattgtgatatgtaccacaggcccatagtagggttggggttcatagttcatagaccaaaaccactaaagttataaggcaaaacgatgctttctttcttatgaattgatttatctcaggtatttgttatagtactaaaaacctaaagtactcaggaagtctaaagtcaagttaccagtagtttcagtctggtgagactttccccaggctcaagatggttagagggtgtccattactgcaccttctagaaagaaggagctaattaacaatgtccttccttattgttgaaagggaaggatgacaaaaagggcctaactaagttgccaacaggctttttgggtcacaaatttcatccatgagggctttaatccccatcagtaattatctcctcagggccccctctttatgtgtgtgtgtgtgtgtgtgtgtgtgtgtgtgtgatatttgcataaatatatacaaatgcagatatataattttagcccatgaggattctcttgtataatctgaaattcttcagttgaaggttgaagctggtcttctctgggtaagttcagggagatcataaccaagaggctctgaagaccccacagagcaggctctgggctcacagacaaagctctgccacttctgttaagtgtccaactccaaagtaacttttgtctttctgtattagagaaagaatctgttcatagatagagaaattagaagaccagataaacaaatgtttgctatttcttttttttaaactgatacttttggtgggaccatcgagaagaaaggccaagaggaagcaagtccgttgtaaatttctgtagtatgtgacagtggtctgctcactgcgctcctcactcccggctttttgtggtgcttctgtgatcactcatgtgacttagtaattgttttccaaagaaagatcaaaggaagggagtcatctcctgtcttgttttttttatgaaaatctcaaaactcactagtttatttatttatttttttatatccacattgcaatgttaaggccaagaaaattttaaaattttacaaaactgtttttttgtggtgtgtgtgttgtggtgtgtgtgtgtgtgtgtgtgtgtgtgtgtgtgtgtgtatccttccataggtcatactgagtgtcttcttctatctctttccacctttatttctagatggggtcccaaattgtatctatagctcacccatttgtataaaatggttggccaatcagctgcagggattggcttgtctctgcttccttagcagttggattgtgactgtctaacaacaccatgtccaccttttatgtcagggcaaggttctgaattcaggtcttcacgtttgcacagcagacaccttatagaatgaggcagctctccagtctccacatagacttattttactctcttctccttatgtccacagggaggtcaggacttatatctcagagttaccatacttttttgttcctgaggtgatgctagggatacagaaaaatcattgcacatatttctcagttggtctgacttagaacctgtcttgtctttttacaaaataaagtatgcttttattccttaagagcatttccataaaatgatgtaactctctagagtggtttgaaatcttttgtctaagtttgtttgctgctctcactctgtatttcctctctattttgactatattttctttgttaagttcacacagaaatatagtattttgagactataacttttcccaaccccccaactcctctctcgcccatcctccttccagattcatgtcatgtactttttaaaaatttttaaaaatgcttatgttacgtggctgtccatcctgttaaaggaaactgactccccttccttcaacagtaattccttgccaagtaccctttcctgtctatgccacagtgttgacggcttgatctcgtgcagaccttgtgcagtgccacagctgctctgagtgctgtgcttgtattctacccagcaggcactgtgctgcagctgtccttcccggtccctggctcttacactctttccaccctcccttccacgatgttttctgagtcttcctgggaggggccgtgatagattccccccacatctgtctctgtctctgtctctccctcctctcctcctccctccctctcttgctgtccctcccttactcccttccatcctctcttttggggttgctgacatcctacgagacaaaattttaaagatagcttgtcagttttactgacatgaattaggggcatatctctgttcatgaaaatcccagtgcttatgaaactttattaagtttaaaactgataagcacatcccccttccgagttcccaaaggccaggctaagcacttttgtttctacctcagcctctcatgaatttactcagtgcctgtgttggtgccttggcaacataggagtagttcttgtggcaatcatgactttgcagcctcatgttctgtactttttagtgtagaggcaccttgtacagatcatgggacagaggacagcataggtcatcactgaagtaaaggagcccatggttgttgtctttggtataggatgatggtaattacattccgcgaccataaaataaagaacacagtctaacagataagtgataaccagcttacagggctgcttgaacttgagcctgagggacaactggctctccatgcatggactgctagtctggagtgcctctccagagcctttcagtctccatctgacacctgtgagaggacctccattctgctcaatagagtcacctgtcagcgagcaggtccctgggccagatttgtcattcagctcctcttagcttgtgccagggctttcgtttttatttttgcgctatatgagcttattttgcatctgagggaaagtgaaggataaagaagctagtaatcattaccaatatcacagtcacagtggcactgcaatgatgtttctgggaactttgtttatacaacttggagactgaaccacgtatgctaaggaatcaaggcctaagcccagtaggcattgcacagagggctttctcagcctctctccacagaatgcttacagatgttacagatgctgagatgccaagtcttctgtgggttgtctaggggcaagataaagaactctagaccatacctcacccatttactttgtcctttcagatttcagcattgtacacagcccctctggcattgtgctagcaataatatgaaggcagggagcagaagactcatctcacactgttttaaactgttttattgaaattcaaaccatacagtttatctattaacacaaaccattcagtagagtttccagtaatcacagtatttaagttaatcgagggtcacatcaatgcctctagtcccagtgctatatctcttccttccctcagacattatctcccctctgggggctctgcactgtgcccaggggcttttcaagtgctgtgccattctctggtccctttctccgtgggaacggtggcagcagtactattgagcgcagccattgtttcattcagtggagactcgctgatttagccccaacacctccatgtactgatgctgtctccccagcctcccatttcttccagcactaatttatttctgttacatgttctaggagaccaaagctggtgtttttgtatggcaggccagtgctctgcctctgactcagctccagccctcctttgctcaagctggcagggttggttacctttgcaagaaaagagactaggagccattagaattttgatgtttctcaacagtttttcttgtttttaatcaggaaaagaatatttttgttcagacagatatatggagggctacagctatgtaacagttgcctctaacccttggttcttgatttttataattattattttactttaagttacgtgtgtgtgtgggtttgtgattgtgactatatgaacacaggtgcccacagaagccacagacatcaagtaccttggaaatggaactgtagaactgccatatgaaccacgtgggtgctgggaagtgaactctggtcctctgcaaaagcagtgcactctgaacagctgagacatttctctccctgcttctcagttcttattcagagatgcaaaacaatttcctcttccaaaagctttaacacggtgtttgtattttaacctaagatttgctccctctctgtagctagagatgagcctcctagtagttagcaaactcttgtatactgggaagtaattcctgtgcaaacatttctgcaatgaacaatttactgttgttcaagatagtttttaaatgccacgtggatggcatgctacagctggggcatcaggagcaaggctgagggtggacaggagcttctgggactatgggcatgtgtgtagcttgaaacaagctggtgtcctacaaaccccagcatttggagaattgagatcgctgactctctggctcaggtttagacattttatctaatttctagtgagtagtgaatgttgggcattgaaactaaattccactatttttaaagtttctaaatgggagaaagcagtttttgtttgtttgtttgtttggttgttgttttgggtttttttgttttttgctatgtacatattttggtcagtgggaagagtgctgctgatgaaaggacccagttagggagaaagacttcaccagttctcatcctgggtcacagaaactgaatgctcacaagtgcacagcatgtgtgaatgagaagccaagctgtccagttttgttttcttacctcaaaaatgacacagcttgaacctgggctttgcgtttgtttcctttgataattaactgctactttaaagttcagcattgcttataagacaagcagttctgtttgtctcactgatttattttattttgttaatataatttatttgatctagtgataatcataagctattcaacaattaggttttcttctttcccttttctttttctttttctttttggagtggctggaaaagaaacctacatattaatgacttttatacaatctcattttattttttctaggagtcagagaataataagttatgttccctatattccttccgaaatacgtctacctcaccacataagcctgacgaagggagtcgggagcgtgaaataatgaacagtgttacttttggaaccccggaacgccgcaaagggagccttgccgatgtggtggatacgctgaagcagaagaagctggaggagatgactcggacagaacaagagggtatgtggacttcctctctgggctttttcccctcggcaatagcaaaataaccaggattccaagggccagaagtgcctaagaaagctgggaatagtcactcagaggttactatggtgacagctgactgaagtccattatgagtgctaagcagatagccccagttttctcaaaatctgtgcgttttgtttgtttcttacaacaataccccaaggattagaactgatgttaaccatcaccctggaaaaagatagcaagggaatttccctatctaacagttttagtgatttttttcttatttccttttgacagatagttttttgataatatgtcccatttaaaaatgaagtaaactttttttctaatgtgtttcccttccattttctgactgttacacatttaaaatttcacatccacccctaaatgctggactagggtggagagctgctaaagcctccaagcgtgggaggcggtgcctgccacagccttctgtgctcagctcctctacaggagcctccagtggactctgtatttaaacaaaatgcgctgtgggcttatcacagtgagtgtgtacatgagttctttatctgtgtgcttcagccctgacctagccctggatttttcactagtttttgagatttagaccttagtgacactctaggggactttgactgacaggtagttcccgtctaattgaatttattcttataaagacttaatgttcgtcttttattgatgtttgtggaagtctgactaaagagtcttgctcacgttcttgtcatgctaatcagattgctggcacgtagttgatgcttttgatgatccaggctacccagcagtaacttaggaactgtagccctgtctgatacactcagtttttccaaaccacaggattcaaaagttgctgtggtctttgtatttaacatggcaattgaaatattttgagaaataacccaaacaatgaatatgaaagtctcttataaactgcaaactatgtggatctgagatgtttctgaaggtgatcacattataaatgttaataattccactgtgtttccatgtactgatgcctctggagaccactgaggtgattggataatcaactttaccattatttctctttagttacagacctttagaattcttgtgcttgcttgatgcatatatcacatatttctttttacacatccatgtgtatgattgatcctttttgtcacctgagggtatgtgtgcatgtgtactcgtgaatactgattgcctcttcaatactgggtttcaagctctttatatctttcccaattgtcagtaatttctaatatgtttcttacattcatctttagattgtgaaagatgatgattggtacattctgatctatatttaaaacatgaacaagtatgctctagaggggccgatgagcaattatggatagcacatgtgatcattagtgtgtgaactctgagctgactgactcttctgctctttcagagctttatcttctctatgactcccttcaacagtctagtgaagtctgtaactccttagcactatggtaaactcagaaaataaaatctatagaccttcagagaagtgaattatattaaatacccaagtaatttttaaaatgtggtaagggagaatgtgatatcctttactcgtggtaagataaagtttaaggtaggctcagccactcccttctagtgcagcagtgctataactgacatgtgcaggtgttttaacgattgcagtgagatggagaactgtctcttgttaatgtgataataccacagccacggcagatgttgctttcacccatcacttgaggaacggcaaaaatcgcagtatgagctagttggggaaaggttgctttcccatctgagttctgtctatcagtcttttggggtcttttggactcaaggttaagaaggctgttgcaagattacatgctgtgctcacaatgcatgagggagtagtctcaaacttttaaaggcttcgtagtctagtaaaaggcataggacacatagcgaatgaaacccagtctgaagtctaacagtgacaggttccatgaaagctgaacagatcaaatgttttgggagtttacaaggtaaggttgctcctgcctaggaagccaccggagggttctatggggaatgagtcctaactagtctggagaatgaaagtattgctttggtggaatgcagggaaagacattgtaggctgaggaagggcataaaacagccagccttcaggttctaacttgaggtgaatttgcatagggaatattaaaatagaaaaactagaccgtggttccgggactcagcagaacttaggaaattagtctgaacaggttagagggtgcgccacagaaccggacagcttctgggacgggcagaagcacagagccgctgaggcagcactcttggcgggccgcagacagccggccaccgtccggaccagaggacaggtgtccgcctggctcgggagacagcctcagcctcagcagcagcggtcgccatcttggttccaggactccctggaacttaggaatttactctgcacaggtgagagtctgcaccacagaagctgacagcttctgggaactgccaaagcaacacagcttctgagagaggccctgttttgggccttcttcttcgaccaggaggaggtccaaaaacaagatatctgcgcaccttccctgtaagagagcttgccagcagagagtgctctgagcactgaaactcagaagagagaatctgtcttcccaggtctgctgagagacggtaacagaatcaccagaagaacaatgctctaaacagagtcaactataactactaactccagagattaccagannnnnnnnnnnnnnnnnnnnccactccccttctagtgcagcagtgctataactgacatgtgcaggtgttttaacgattgcagtgagatggagaactgtctcttgttaatgtgataataccacagccacggcagatgttgctttcacccatcacttgaggaacggcaaaaatcgcagtatgagctagttggggaaaggttgctttcccatctgagttctgtctatcagtcttttggggtcttttggactcaaggttaagaaggctattgcaagattacatgctgtgctcacaatgcatgagggagtagtctcaaacttttaaaggcttcgtagtctagtaaaaggcataggacacatagcgaatgaaacccagtctgaagtctaacagtgacaggttccatgaaagctgaacagatcaaatgttttgggagtttacaaggtaaggttgctcctgcctaggaagccaccggagggttctatggggaatgagtcctaactagtctggagaatgaaagtattgctttggtggaatgcagggaaagacattgtaggctgaggaagggcataaaacagccagccttcaggttctaacttgaggtgaatttgcatagggaatattaagatagaaaaactaggctgtgtttggatcctgacaggtcttgccattctggctagaaaattcaaatgcaatattggaagtgatggaggaactgctaactgctctgttcttcatggcaaaggattagacctttgctctgagaaagcaaatccggcagttcagtgtggggtggatgggagcagggacaagtattcaggaaatagttccaggctagagaggataagggccttaacgaagacagcacaagtgagaaaggagggctgtatagggagatggagtcgggagaggaattgtgaagatgtgtgagtgtgcaaaccaaggttttattgttgtttattttgttttttaaactctgggcaaataggaggatagtgatacaatcaataaaataaagagtgcaaatatggtttgcaaatgggagcaatacatggtttcctagttttataatgctatannnnnnnnnnnnnnnnnnnntgatggaggaactgctaactgctctgttcttcatggcaaaggattagacctttgctctgagaaagcaaatccggcagttcagtgtggggtggatgggagcagggacaagtattcaggaaatagttccaggctagagaggataagggccttaacgaagacagcacaagtgagaaaggagggctgtatagggagatggagtcgggagaggaattgtgaagatgtgtgagtgtgcaaaccaaggttttattgttgtttattttgttttttaaactctgggcaaataggaggatagtgatacaatcaataaaataaagagtgcaaatatggtttgcaaatgggagcaatacatggtttctagttttataatgctatagtttgaatcccatttttaagtgtgtgcatgtgtacacatataggcacatgtacatgcccacatgcccacatatgtgtatgcaacaccctgccttagcaactgtgtgaaggccaaagaacaacttcaatcgtcagccctccctttgcatcctgttgaaggcagtgtttattatttattctttgccactgcatacactaggctaactgccctgtcccttccagggattgtcccatctccactctcttttctcataagcatgctgggattacagatgcacaccactgtgtccagcatcacaaaggtactaggatcctaaattcaggccttggcactcttacagccagggctttagccactcagtcagtcacctcctcaagcctgaatactaatttcatttgtcttctggtaacaatagaaggcagtgggagaccaaggagctatagaaagatcattaaagtttaggatagatttctgattctaaaatgatcacagacaatcctcccagtatctccttggctttggctctttaaagccttgggcctggttcctcaggtggaacaggacagctcacggggcatgtaagaactgttcacatatatcatttcccctccacatcatggtttgagggccatattttaggatcaactgattggcaagcctgtatggataacagaataaatgaagatctttcttgagtcattcccagaaaatgttttgactctttatcaaattaaaaagaccttcactctcattcctcttaatgcagaaactcatctgtgtgaaatttatcattgtccatttaaaatcgttgcttacataataaaacagcaacttttcaggcagatgcattgatccactatatcactcttctccctgagcattgctctgactaaattgcagagaatctgatgaacaatggcattctgtcagaagcaccccctcccaacagtgaagctgatgggaagatgaacaagggttctgccttttgtgaatttaactttgatttagtgtcataagtagatgaatgactatgtggcacttagggaaatgatgggtgagtagagacacagagtatattgaatgactaaatcttagaatcttctttataaagtcctgttgatactggtgggtagagtgtgcagaaaggctgtgattaatagagccaggttagaatgcttccaagataaaaatccttcagcttcgattaaatgatgaatcctagttatcccgtgttacccatcttgttgccagcatagctgggtcctaacataagcgacagttgtcagaaaatgaacactttaaaaaggacttctatatctaaatacatatatttaatcagagagccctttggcttctgaaaataggttgtctaatgagaatttcatttgagcagctgcgactgaggaggtcaacaggcagcgctaggagaatatggcccagctggttaaatgtggtggctgtcgtgatttaaacggtcaagtgctgcttgtaatccaggaccgtctgtttgtggagggaagagtgagtgcttcagcataatgtacagctgttttcatctctctttaataatagtgctccaaccgctgtcatgtcttgtgtatcatactactgagtatatggtcccaggccgctggggtgggttgcagtcagcattgggactcacgtgaggaacagggacacaagaggaaaacccttgggtgtcagataagactttctgactctcagacttttcaagattctcttttgggtaataattaccaccattgtgaggaagcagcagtgcttggaattaagtacaaatatcagagtagatgtagttttttttgggagagtgtggagaagacacagcttagtcagggttccatagacacttctgggtcagagacataagagtatgaatttgccccctggtgtaccttaggccatcagggtgatacaagcacacagatacaccatgttgtgcccctcgacaaagggcagtaagcttggacttctgacaaagcaagcttcttaaaggatgctatagctgttggaagtaccatgtatgtgtttctgtgtatgacaggcacactggtatcatttacatctctaaacagtcatctgctctgtgttcccattgaaatgtaccaatgttgtatgtttttgtgtaataaagttgttgtctagtatagctgaaatgaggagaaaactctgtttcaaaagtcatgtcctagattgacgtagatctggatttgaatccaagtttcagaactcatgacagcacttttacaaactggcatgtgggctggagctagagcaaggtgttatagtttggtagttactcagtatttaccacaaaaactctatagcacaaattactaaatttcttgctgttttagtttttttaaaatccaaaatgtgcataagtattgtcttagttacttttctatcttttcaccatgaccaaagcaataaaagtaagcatttcattccacttgaagttccacggttagagtccatggtagtgaagtgaggaacagctgagggctcacatcttcatctatagccaggagagagagcttgcccccaatgacacacctccattaaggccacactcatccttcccaaacagtttcaccaactgggacattcccatatatgagcctatgggcagtttctttcaaactaccaaaattatagtgctgttatgaaagtcaaccattggtcagtgcactaagtcatgtggaccattgtgggcatacaggatagcactcaataaattgagccaaagttatctcctggccatgagaccttgcgtgtatgacttaacccttctgtgcttcagttccttcatctatgaagctgggttttggggactggatatcacttttctcatcacagctattattgctattattattgtaactactattacagtgttgttatttgaagaaacttttcaaagagaaatgttataaaaatctccttgcatgcgggcaggctgtaggaaatgccccagggtgttaagggatttagcatttggcggcaatggtgttcttgtgttctggaagagcaattcagttttgctggcctttcaggccttctggaaaagctgatagtaaagtttccccactggaagccagtcttccctgctgtgaaatgtggaatgcagtgttgtcagccactgaggttggtggagctttggatgaggtttcagactcctgtcaggaacaatgtgttcttgttgcaatgaaatctatgaaatcctgtgtagtaataacaagagcaccttgacattcccgctatgctgtagcatccaaacaattttatggcagaatgtgtgaatattaaggttttactatattttgattgatttgattgttgaagtcttagcatgtctaaaccttttctggttatcatttgtgagatttgtacataaaaacacattagaaagactcagagatatggcttcttcagtgaagtgcttgcctctcacacatgagggcatgagtttgatactcagaacctacttaaaaggccactccagtactgtgagttaggcccaggaggatcctgggcacttgacaaattggtgagctccagatgcagtctcaaaaactaagaggggagagattgaagaagacaccctatgcagacctcaggccacgcacatgtatgtatgtctgccccaaacctgtacacatacgtattacacccatacacgtcaacgggctttgattattcactgttgccctgccaagtatcatctcaagcaattggaaatgagtacttaggctccgcagtctgctcacagttaggtgaggagacaggtagttagccagaacaatgctaatacagctttatttaaattctattctccttttttttcctaaaatttattttctcctaataatatttatattcttggtgctatattggattatttagtgtgggaattatgcttagtgcattttcaagttaggtatatttgcttttcaatttctggaaactggccaatctctcttgtaactttaggaatcacagaatgagtgagagttccatggcccgtggccttttggacaagtcactcgttctatctgcagctgtttcatggcccctgttacagtccaggtagctcaactgtgcagctgagtcctctccttgacttctctttgtttggcttttgctttgaaaaggtactgtagattcttggcccatttctagctcctcagatttaaaggttagtttttttcctggctcttttcactaatagcgttagcagacacacacagttgtttcaggtttgtcttttgctgaacggggagggggttgagggtgctctaggcattttgttgtttacaaagaggcagcttcctaatggctcactggaaaggcacagtaccctctgccttttgcgtttgggaagtttgcgttttcccttgaaaacccagtacattttcttcagatttttttttttctgtgagtttcaagaaatgagcagaggaaactttggatctttagtgttttttttttaatagttgaaagagaaaatgagcagataaggaagtgggtcatttggcatgttaggtgaagaccaagcctatgaccacagagacaaatgctcatggccttgtggatgaggctgtgtactggtgactgcccatggcttttctcttgggcagcccttgctctggacatgcggggactttgctgttctctttcattttgttttgaaatagttttgaattagtttttaaataatacttttaggactttataaaaatgacggcaccctgtagcttctgagccctggttgtatcctcacccccttttctaaaaaggctagcgattatggaaaaaacccaaaaactaaaaacaaaactgtaagagcagttgaggaagatagaccaaagagatctagacagtgacagctttcggagaacacacacatgcacacaggaaacagagtgggaaacagagagagagagagagagagagagagagagagagagagagagagaagcgtgtttgtcagtatcagtatcaatactagtgctgcttgttctgaagggaggcctctcactcacttgtgcatcatacgagtgcaagatgttccctgacactattggctgctgactactgaaaattgtgaaaaattcaaatgtctagagacaggacagtagaacagactgtcatatgtcacaccttccagtagtgtgtgaaatattagacagaagagatgatttttgctgtgtagtattatgcattttcacttcttatagttttgtttttagtttttgtttttttctataatcactaaccttttcagaaactcaacaagagtcttcaatgggccctttgctgcaatttcccttttgttgtgtggtaataaaatgtcttcggccctttcaacaatggccaagcgcaggtgccttgttctcatgctggactgtgattactgggtttgttaggaaacacactgtttcccttttgatcgtctttattcatgttcccatcttaagatgtggttttgggattagaataattactgacctctaattatcttgggttcacaacctacattttcctgaaatactttaaatttaaaattacaaaccttttgattattgctcaatcctattgtttatattgaaatagacaacattttttgggtagtcaattgacctgttatatggaaatctttgcttttctctaagaatatcatagaccaataattccagttaccaggaagctgaggcaggaagatcacaagtacaaggccattctgggctatatagtaagttcaaaaactggacaaacctgtttaaaaataaaattaaaaaaaaaaggaaaaagcgaaaggaaaaggaaaaaggcatatcactcagtgtttgcgtgcgtgctttgcatacatggatagtctgggtctcatccttagcagttcaaaattatttaagaatcctttcaggagggaggctggggtgatggcttcgtggttcagatccccagcaccaggaaggttggaggcctgcctatactcctagcattcgggaggtgggataggctctttggcgcaaggtggctagctagactagccagacctataaactttgggttcaagtgagactctgtttcaatatttagagtggagtcttatcatgaaagagacccaaagtcaacctctagtctcccaaagtctactatatatgttcataaatgtgaatatgtgcttactaggcatgcgcccaccacaccccctaataaaaataaaaaagaggacttctttcagatgttggcttggaattgatatgcaatcttttataaccctaggagcttgatagtaaattaactaattgatttgagttttagttttttaaaatttataaaatgatgttgatatataagatatttttgtgtgtgtattatatatatatatatgtacacacatatatatatatattatacacacacaaagaatcaattctaaaattctataattctatgctattttgattttttaaaaatttgcaactaaacttcagagtccactaatcaggttgcccctctcccaaaatgtttttgaaataaatcactcatttcaaccaatctcatagttccttttcttttactcttgaaagtgttcatgattgtctcttctttttgatctgggaatatttatgtagtgagtgataaaagcagctatgcagttttgatgtctgaagaagacattgtccaatgaaatccttacaaagccatggcttcaaggccccaacttagtgctgatagcttagctctgagttatctggtggcacaaaggtggatgccctttctcagttgatgtcttttgagtttaggtctgaggagcccacactgcagcacaagtccagacaaatgccccacagtgaagtcagaggatgcaggctgtctactaccactgagaacagcagagttagaggcttatgtgtttgcataattgcttgcagtatgttaaaaacaagtaaatactaatgatgaaggtatgctgaatagctatggcactatggtaaatattgaatcgtgctaagaaaagccacagcagcaacaacagcaagatcaatcacaccattgcttattttttagcgaatgggaacaagagtcaaagggaagtcttagaagaggcccaacacactgtgctctgaaattccatcatattccagaatgccatcccagcttaaacagaactcacttagaattgtttatttatttactcaattaattaattaattaatgtgtatgtgtgtgtatgagcatgccatggtgcatgtgtggaggtcagactgtgacttctttcaggagtcctaagtctccttccaccttgtttccaaggcactggtctctcctgctgttcctgcatagcatattccagactaggtggccagccagcttccagttggttctactctctctgccttcctttgtctctctctgccttcctttgtctctctctgcctttctctgtctctctaggagtgcttggattacatacgcatgccaccatgtccacatatggctttttatgtctcccttcatcaaactgatcccacagggactattttacccttgcgtcatctccctcactctctttggccttttaaaaggatgatcccttagctctcagtttctaccttctacatacttagatttcagttccaggcaagcctggatggctcagtggataaaggagcccactgctaaacctgagttcaattcccaggaccagtgtgtgtgtgtgtgtgtgtgtgtgtgtgtgtgtgtgtgtgtgtgtgtgtgtgtgtgtgtgacagagagagagagagagacttattcctgcggagtgtcgtttaacccccatacacataatggaatgtgtgtttctcatattacacacaaataaatataataggaaatatcaaaactaaatttcctcttcttcggagaagtcttataagcttgtgatcctagcatccaggaatcctatggacatatatgtgtacttcattttaacagacttactgcctgtgacttcctcacttgtcttttgtattgtcacccacttcatttaggtagagaatcaaccagggcttgtccaggcctgtttcccagcacttgtaactcctaataaatgtttattgattgaaaaaaacaaatgaaacttatcttgactaatgcttctagtttctccttctgcctcccctaccttgcatttacctcactctcacagttagacttttaagtataactttaatggcaatgcaggccagtggagacaaaaacaattttttcttttagtgacattacttgcccctctttttagctatatgagacctatttaaaagtctttctgccaatgagaatgtgacttttggtatgataccatttttcatcatcccttggattggaattacactctctattctgaaaccacaaccctatgcagttatggccaattggttctcagtttaccatggacatatgcaaaatctcaagtctttctatgcagccacatcatgaacctctctcatccatccatgttgatctcacactggtggaaactgagttcactgtctccctgactgtgcctgctgtgtcgacagcgtctgggagaagaagctgcattcttgtttgccaggtggaaaatagcttctgtgactttttttcagcctagattttcttctattacttcattaattttgctttgaatatgaatagttcttatattctcaatcctgtagtatgaatacattccctggtcaaggacctccatataggtttcagtttggtgatatcacaaaaaaattctatgaaatttataaaatttaccactttttgtctgaaaagaagtttctatttctctatcatcagtattcagaataatgactgggttagatggtggtttcagtcttagtttgataaaaagctgctacacagctttagagtccccatgcaatgtttctttcccactagccactgaggagtgacttagtgtctctgtacctttgtcagtagctggctttctaactttccttttagccattctaatggatatgttgtgatgttttatggtgagttaatctgtatttcttttattacgagtgttacccattgtatatgctgtttggtgtctgtgtgtccttgttcatgaactgtctttcagaccttggcccttttgtaggaaaccagattttcttttgctattatatttggcatctctttgttagtctaggtagtaggcctacattagagatatggtttggaagtatcttcttcagtcgttagcttgcctttccatgtgcctacacaactgcaagtttagagtcttaatgaggactagatgaacaatgttttgctttatagactatatttttgatataaaattttagaacaacttccaagtcatggattttaaacattgttttctactttctcctctaaaggatgtatagaattgtacactttacagttaagtccgcatatactttggaggtaacttttgtataaggtgtgagatttaagtcagaattcatttgtatatgtttagctaatggatagtttccacttcttttgaaaagccctgtctgcctctattgattcatattgtaaatggcaggcttggctacataggatgcccctagaagtcaggaacaaaatggcacagcaaaacaccagcagcaaaacaccagcagcaaaacaccagcagcaaaacaccagcagcaaaacaccagcagctgcagtcgtggctagaacagaggtcatgtgggatggtgactcactggtcaggggcaagattaccagagattcattgcacttctccacagcactaggggcatgtcagtccacacaggctgccacagtaaagtgctgcaagctgggaaacaaagacccattgctcacgtgcccaaagtcaaggaatcccaagacctaattgctcccttcttcttagttgataccatgtcttcaaatgttgttagggacaagcaagcactcatagtcctttctcataaggtcactaacttcattcatcacccagccatcaaatctttacctcttgacaccaccatacttgggattctattctagcatgtgggtttgggaggacagaaacatttggactgtagtaatacttgaaaacaaaatttaaaacaatattgttataatttttctcaataaagtaaattcttttgatatacacctatcacatttttacagaatctgcatatgaaattgcaaaatgctcataaaaagcaacaatctaaatttaagagcatgtacttgaaaacttgctgtgttgaagatgtacaaatgatatacatatttaatccagtttctgttaaaatctggtaagacctagtaagtaatatgtacaccatcatatttgaattttttttataagcagacttacaggcacatccaacctttcaacattataacagatagtcattgacaggttcattcctgagaactgcaatcaagttatgaaatagattattaagatctcatacatcttaaaaggcatctatgattgtgtgttggaccacattcacagcaatctttgactgcatgtggccctgataattctacaaggcatttatttattaagctctttcaaatctattgtagtagagcaaggtgggggcagtaaaggtgggaaggaggaaaagaaggcaaatataagaatagatactcttcttagtggcttaaggtttggtgggagaaaagtggcatgagtaaaggctgtctatgctgtaataggaagaggctggtagcacgcggcagggcagaagacagaacccttattttgtctcaggctagaaatttatgtatacaatttgagctggattttaagtaattataagctgaatatcctgaacaagggataagttggaatctgaggtagaaaagaaatgtacataaaatgtcagtgttatgaatgaacttctcaggatgtttgttgtgtctaattcaggtgatctgagtgaaagtaaaaaataggtcgaaggtatgctgaaaagatggaatttgattgtttagtgctggaaaacagatgagaactttaaatatgaggatgaatgacagaataggattttttttaaaatgggaagtaactattggcattctgaccatcagtagcaaaaagacaatgggcaacgaacgacagtctgctgtaggctattgtaatggcctaggcatatactgttaacagtaaaatatcagtagaggatatataggaaccagattttagagaaacagttgaagttgctaattggctatggtgtatgcagttggagagacaactggaagagagatctgagactattgagatgatctgtctcccatggatgagaagtttcagggaaatgtttagttctagatgcactaagtttgagtcttctctctgtggatggaaaatgcacccagcatgcagatgtgtgaggaactatacaagaaaaataagaacatgctctcgaggtccttgtctctcgttgccatggagtaaatttcttttttcttagtcaactcattttgatgggtcacagttctagatggagggaagtcactacacctggccctttggtgccatcaaaaaatgcagtagacacaagatgagttacatcttgtgtagaaaggatgctgactgcatagctggcatgctgccttatagtaaactttttgttaactccaaaaacactcaagaaaaaaaattagtacattaatggcacagtggcttgctgtcactaccaagtgttacatgcaccacacagttgcatttggcaattgctgactcttggaaactggtgggacagtgggtttgtttatgccagggtcagtaaaaatacctgagaagggagctacattatggcaacatggtcaatatagtgatctaaacttttaactccactatcatctggtacctaagtgctatgtgttctagatttgaccaaagcatgatgacatggcctatgacagtggtatactatagcattaacttcaaacaggataatacagatccatgatcaatttcctaacaatttgttaaataattgatcatagttttaagtagtaggttaaaaatactagctgtgggggagctaggtcaataaatatagatgtcaactctccatttgattacttattctgtaggtttgcatttccacatagcttaacatttgaacttatattacagcataaagataaatgaaatctgaatcggccttaatagtttaatgactggcaagggtgctggtgttaggggcttgtcagggaaagcacattgtcaaagcaaagaagaaaagttattgtgtggtttcaaatgtatttatttgcattccaattttatttttgtttttgtaccttattcaaagatatagacagaggtcacaacatgactctctatggtgcttcaggaataccactaactgatgaagctataagtaatacagaaaacaaagcctaccaccacacatcttagccttaacaagatagacatttaattactaaaggaaatcctgtattctccttagacaagcaggtctagaggtgtggaggtggcctgggcagaagtgaatttttgtagtgtttaggtgaacagcctcaggtttctctggtgaagaacttgagttttcgtcagccccactcactttgccagtcctgctgttttgcaacagggcttaaaagtgctttaagtgcttgtgaccgtggtaatgaatgaaaatgtcttcctagcacggagaggattgcattagactgaatagtcacctcccttgtaaaagcactattagagtggggcagctgtaagtaaggataacgatttgtgtccactgcttatttactgaaaattgtcaatgtattatttattgagagctctccagacagtgcttgtcagaataaaaatgtcagctctgagcaaaatgttataatacataataaaaatgctaggtacgcattttaggaagacaactaattagacccactttttctttaggaagggacagtaaagatgtctaatatcagagactttctccatttgtatacggtcttttctttcttccctgctcagcttggtatttgttttaaaaacttaaccatgtctgagaaataatttgacaactttctgtggttgccattagactccccaagtagtgggagtcttgctcaaggaggaagacctggcttgcctccccacagtgagcagccgccctcaccgccatgttttgtctggaattagatgtcacttcctccctgagcagtgctctcggaaaactgcctccagtgtaaacaagataaaattattaagcttattcctcagccgtgctaattaaccccaaacaaatttcacattaaggaaacagaattcaatcaatgtaaatgttattgccgtgtattactgtaagcaataatagagtggctaaaataattaattattttgattttttttaaaaaagaaagtattccttctctattttaaaaatgctgttgcaaaatattgtgtgggtttattctgcctttctttggatctcctggcatagaatatgaaagactcaactggcaaagcaggagtaacacaaacatttcttccgaacactgactattttttccttctctcacaattggattatagaaggggagagtatgctttggagagcttcacatctacttggtctaatgtgttttcattggcagtcccgcggaggccaggctgatttcctcggacctggtccagttgacagctcatcatggcggtctcctctccgttcccagcacgctttagtcaaatgcacatggcagtgcgggaagggcactgatataatttatatctgggaggagaagagaaaatacagttttgcagcatttcagggtttcagaagcccctacccctcccccttttaaagaaaaatctgggttcacacaggaagtcaaattatcctcttcatggtaattttctaacatcaaaccccgagatttcaacgtgattgcttggttttgcctttgagaacttggataaaatttgttattaccattttcatcatcctcaaaggcctttcactacacaaagtacagatgccatatgacatataacttatttctcattcaggagaatgtgtatctgattaatacagagtaatttatcaattataaatagcacattctgtggcaaatagaacataaatcaaacatcgtcatattaagattattctgaaaattagtatgcgacttcaccaatatataccatcaaacattaaattaactttgaaatttaaagtaatttagttgaattatacaataaggaatatgtgactgtaaattgaaccctagcattttttctgtaatttttccattgtcaagcagttgcctctgctgttgctgcccaattacttgggtgtcttgtgtaagggtgccgctgagcacctcccccttctctattaaagctgtcctcaccttggtagggagagttaatcctttaatgatatcttaaatatctaacaagcaggttgctgctaactatgcacagtgatgccaaagtgaataacaagaacataggtgttccaagaaaaagctggcgtgtgccactaacgaccataaataaataaaagccagtcctcatagcagagatatgaaaagattaaactctccaagtgctttaaaatcatacctgggctgaccattttttacttgactgtatattttgatttcaaataatttgttttagacaattatttaaattttagtctatacctttagtttctagttccagatagttggttatagttttgtcatttctttggacatttatttttacttttccaaatagaaaacaactttagtttttatttcttcacagtctataagtatctgttgatgccccgcacattattagaagctacgttcagtaattttaaaaaatggagacaataaaaatttgtattgagcatgtcttcattttagatgtttatgtatgtaaacatattttaggcaaaaatgtttaagtagtatgcatgctatagcagagaatataggggtgctaaatatgataaccagctctcccatagcttctgctagtcagagaacttataaaatgctaaactgcacgatttctatgattctaatattcctagacttaaaagttatactataattccaagtgaataaatgcaataaaatctaaaaataaggatcctcgttagaagaacctgtattagtgtatttttaaatgagatgcaaaagcctgcatctgccgttttattccttgtaagacagtaattgacaaactgcagtcagcacgctttcatgtgtttttcttcctttgctgaattcatttttttttaaaaatgaaagttaaaaagggaaaaggggactccaggattttgaaactcactggtcctgaagtgatgggaaaataggcgaggtgtcacagctaatttctggccctgttttatgagttctgctcttccttattctccctgtcagctcaggaatccccgaggctgtgcaaactggctgaacatcactcaatccgagttttatatccccttttaataatgttgagtctattctgtccaactttgattcagacaacctgcttgtcttgaaaaagtgatatatttaatcagtggcgctgtccccagcctagctcccactgcgtgtgactgcagccggggagtggtgcagtgctctgtcactgctgtttgaatgggtaatgtggagcccatcagctgagaagacaggagctggaactgcatgttaggacacacgatcaaaagccactctccactttctgccaatcaaacctcatgttgccttgtggggcagacattaaatagattttttttccagccttatactgtgggcactttgccagtttgacatgtgaactgttacaaaaagatagcagagttttgactgcttgctgactgcctaaaaatattactgaacacttgtcagaaagaaatgttcataatgctatattatagaaagccagtgaaatgtttgttactcttatggtatactatgggtttttgttgttgttccagaagtgattggggcagaacaaggccagacagttgcttctcgggagaaagtaaaaggacaagctgaatgagctgggcataaagctaacactcagtatgaccaacagttcagctggggtgatagtcactgtgtggaaataatatcagtaaatgaaatattgttttacattcttccctggtgttttaaaaattatttactcttctgaaatcaaaataggagaggctgttagtagttatattttgagcaaaaccagcatttgaaacttgaaattgtgactgacatgggcatctccacctttctgtttattgaggcaataagcccatttctgaattccaagtcagtctctggtttgtgtttgtcccgtggctgttttcaggggcctctttctttttgttctgccctgaggatttccccattatattcctgcctcaccctgtgcctgtatcagtctagtaacgatgatggcctaactactaagcttttataaacaacaacgaatagaaagtacttttaattttaaaagcgccttgggactggcatttctgaccatttccaagctcccagataaccgtcccaaagctgttaaatctcggtgttttgattcttccaaacttgcctcttggtacttgctgtcgtctcttctctaatgatcattttaaaaggagttaaacattttcaccaaaacataccatggcagtctagtgagctgcacataaacagctgctccttcaataagccattctttataatacccttattaccttccagtgtctcaaattctgattagtcaacagagctgattgctgcacacattccattgcccgtcttctctgctcagctgctcatgtctgagtaatcacaacacaacttgggcattgtttctctcaagttgctgttcatattgtgccttgaaaaactctggattatccaggaaaactgccgtggtgtggctgtgagtgactttcctaacttgcatttaaattgtttgcaaaaagcactccataaaaaaaaatcatgtaactgtgcaactcttaggttagagagaatatctgtaacttaaaactgttcctgcgatccgattatgaaacaggcagggcatgtggctgtgttttaaaaatgagtcctttataaatgtgtagttataaaattgttatgcgacagctattacatttcagtcagctctggacgagataattgtgtggagaacctcacaggaagggtccaaaggacctccacgtttgcttaagatgagataactttagtccagttactgcaggccaccactggtgcccaccagatagggcagcgcagtggcggctccagttaggacaaaataagtagggtgggaaaagtgtcttctctgaagctagaatttcagcgattcctctgttgtgaccccctggaatttactctctgtgaggaggaaatgctgacacactggaaatgcaacctcagccaaggccctaaatctgtcattgtgctctggagtctgctctgaaaatagcggagctcttttggtaaattaaaatcggtgtgaatgggaacagatgtcgccatgcttcccctatcttcagggatgcccagtagaaaggggagggtcagcggggttacagggtggagcactcaggagtatgcaaacagggtccacacagggagtactactgacatgttctggaatagatttggactgagtgtgaacttacctacattgctacacctagaggaaaaggaaggggcagtgtttatttctgggagactcttggatagtccctgtgcttgtatcttttcttcagcaagctacacggtccctggataccattagcttcttactttctggaattctcttgccatatgctcctaaagtatttgttacactctaaggctatagtagagtctttgtactgatatttgtcaaaaataatgaaaacggtttgtgctctaaaactgtacaatttatcaaatagcatatgtagccaatttaaataagtctcatcgaagtttcagtcttgatttgaaaaaatagcataggatgaatttatttataagaaccttaatagtttctctcaattccttttacattttagattaccttataattttctaaatctacatgaacaataatgatcaattttgtcagcattattcacaccttttattaatttaacatagatgaataaatgtgagtgttgtgaagagttgattgggaatagattttaaatctgacagttagattacagggtacctaagaaaaaatggctctttcactaggtacctagtaatttaattcttgtttgaaattattataatttattacagtgtgtgggtcctaatgaatgtctactattaaatgaaaaggagaaattgaaattaagattatgaaattcttttaactcatatctttaaatcctcttaaacaattccaaagacattaataagctatgtaggtttctttccatatgctacaatgacagatagaaacattttttcaacatttaaatattctaggaaatgttgagtgccctacaactctacgcttgcaatcttgggattttagaaaatgggaaaagccattacaagaacattgaacttggcaactctatttagatctttattcggacttgactgagacttttctagcatttgtgttttgcagaaatgactatttcctacttttaaacctttaatgtaaggcaatttgagctttcatggagttatagacagcaccacattaatgtttaaaaaataccaagtactaaggaggctcctaaaactgtgaattagtaaaatccacacacacagtgaggatgagtgaacgctggcggacagtgaaggctgctgtaccccgatattggcagagccaaactggtcccaaaaatgatcagatatttataaataataatttctgagaaaaactagcactatcataggccattgttatatcctgacatactgccaaatgactgcttgaaaagcccactgggtatttttccatctgggattcagcctcagtttacaaacatggcctttcttgtttgaaattcttttaagaattagaaactggctctttgaagtttaagctaaggctttaaaactcccgaggcagtgtttgctaatttctagaccttcccttttctttctacctttcttttttaatttggagctgctgtgactagtttgggtgtaaagagggaaaaatcagagcaagcgtgctgggcatggcttagctcacctttgagtgcagagagtaggcctgttcaggcttcctcagcttcagagcagtgctgaactgaaggcctggctgtttctcatcttggcaaactcctgtgaccaaccctgaagtaaagtgactcaggagtgcgactgcttggttaggtttctgattgttgggtggtttctgcatgggtttcttttaaggtctgggaacatacctttgggctcccaagaactgcatttcccatcttcatcaagcacaatttgctgtggaccacaatactgccccccattaggtaaagaagacagtgggcatagctagctgcttttacacgagaaagtgatctgtggcctctactgttgtgcttgttgagctccagttagctgagttcctggtagaaacagttattatccggacaagacacaggacccacagcagtgcttaactgctcttttaagaggagagggataattaggtgctccatgttctaagtttccataaataataaagccctttcccatccatcagtcatatccatgtggttgctgttttgtattgcagcttgtccacttatgttcaatgtcatctttcatatactattacagaaggttgaaatccactctggcccagaggtggcacagaacttgttggtgtgagttacatggtgtgagaacacgaggatcctgcaatgaaaacagcctcttcacattattcttttgccaattgtgatgccataactgtaaaaaaacgttcattttgaaagcatcgacaatttacaaacccctacctactgtcatctgtttaattagatttccccccttggtacctatttaaactctaaatgaaagatggaaatatgtttgctctaaatatttgatatgattgagatgagattaaggggtttaaatgatttaaaaattatatttactttagtgcaatctgttagattcagtgttaatctgccatttggtttgctttacagcaaagcaagctccaagggttaaagtgcccagctcactggtacagttaaaaccgcttcccaggcacagagttcttcaggcgcagttgagtttcgctcagaccttcagtgtgctgctcagcaatgaccttgcgggatggagaagcatggcacagtggctctttccagctgtacgcagcctatccgttggggtataatcatgcttggtcccagcaccgcaggcttggacatatgttgaggtttatttctttcttctgacattaatcctattcaccagctgttctgccagctgccattcttcagtttggagattacattttgggggataccaacaaaggtctgattgaccactgctttctctttccttttttctcctgtattccttagaaatgactggacctggggaaaggaggattcaatatttttccactatgacctcactttttatatatttttttgcttctagacattaacatgatttatgatcactcagcatgctgtagataagcttcctcagtgcaggttaccaccttatttataaatccctttccataaaaaggttttaagtttacattgaaggatataattaatgtttcttatgctactatataaacaacattaattagggacaatttctttgatgttctaaaacatattccagatgaagatatgtttttcattatttctttgtctccccatctcaggtttgagagtttatctcagttgagatgccctcccccttttccccctgagctatggtcccactaatcttatttgaatgggctattaaatctctgttacacttataatatatactaataagtagtatagatttctcactttgtattccagatgatctgtctataagcaggatgttaaacatctgtagtttaagcctctgggactaacagatgcattaatgccagaaagaaaagtagcctggacaataaggtcacagaccatgtggtgaagctgcatccccaatattattaagtccacacattcttttcaacactaatccttccattttcataaaggcaagaagattaatagacttaagttgtaatcatttacagtacatgtttattacattaataccaacaaatacacaaaatcccatatgtgttataattctctgagctgatatttggaagttgtttaaatactctacatgcctcacagtagcaccctcttacccaggaatgtatttcaaaagatctaccaaaaattggatgtttatctacatgattctacctttgtcttctaactttgtgatatgttaaaactgtatcttatggtaaataactcaatctgaagagcaccttaaaccaaggtcattaaaattaaaaattaactctagattaaaacaaactaaagagtaatatgctttggaaggtagttttgtttagtcagtctttcaattgtccatccatccatccatccatccatccatccccactttcatccagccattcattccatggagatagatgctacttattgaaccatgtaatagaaaacacaacatcttgtgtctacgaaagcagttcaagttttcacgtgtacagaaatctacagaaaaaggagtttataaactgccagctgaaaaaaactattgattccataccatcttcctatgtccccccaaagcttcaacagtactgaaccccacttgctaaatatgggcattctatttatagaaatatcatatttttattggtggccaaagcagtgcttataggcaaacctacaggtgactaataggagttgctcactaagtggaataatgaatagtattaggtgtcaattaaatcaagcttccccgaggtgcaggtgctccacaatgtactgacacatttcaagtagcagtgccacttcacccatgcatatgaacaagcacatttgcatattaaaaagctgaaaattatttaactgaagcaaaagtcttttagagatgatggaggttattaaaactgttgacaagaaagaaggtaattgcctgaaaatgagagatgacattctgctatacacagggaacgctgtttttgttgtattgtgcagcagtgcctgggtgtataacctattacattgagattgctcctatgcaattagaccctttttgtcctcacttcaataaggctatgattatgagggattgaagaacacttggcatattgaatgtctgttgtttttataacttcgtcagaaatgacaaaacacgttttgtgtcctgttttttctttgtaggcttattgattctgtgattataatattcataaaagacaatgtgttcatggttgaacactctgtcatttatacaggttttattttttctgtctcagcatcacatttgtttgaatgccaaggtgttagtcataagatgagcagatttttaaagtaaaagatgaataggtgagaagtttatcatgctaataatcccaaatattactattaaaatgtcataaaaatggatgatttcccaagtttcagatgcagatagttcacccaccgaggaaacttggaagtgattttattttctcttcgactctgggctgtttattttcactttgatttttgagagatcttgtgctttgctttcgtttgtcaggagggagattcatggcctagagggaggctcttcctgccactggaaggcagtgcttctggcttgactcaccccagtctgcaggtagcagccgaaacaactacagtgaatgcagcaaatgaagttgaaacccgcaaatcattgcaggtggaggaaatttcagggtttatgctttattaaaattatgcttgttaaaagattttaatcaccctaattagacttcggctctcagaagtaccattgtggcaatgtatgaagtccattgccatcattattatactctttacttgaggatggtgttctttgggacatagtatcatagcatattcagttagacttcaggcttccgataaatccatttttctcttgggacaatcagctcctgcctttattttttatgtgaatttaaatcaaagtctagattgtcagacatagaatagataggttctgaataatgcccaaatgtatccaaaaagttttctgtgggcttgccctttatgggtctttcagtctttgatttggctgcatctgggctttaggaagctaagaggcacacctagggttttgttaacaactatctagtgatttatctaatctgacgcattcatttctttaagttgaagagggaaaatgtctttaggcattgcaatctgactctcgattaaaaagataaaagtgaaataccctagttcttttcaaacattatttactgcttgttgaaaacttggcttttggatgatgaaaattccaatgtagctatgctttaaaaattacagaataaaagatctacacactaaaactaacaagtagaagatagatgtcccccaaactcaagaatagaaaatagagatttcctcattcaactcaggaatagaaaatagaaacacactctcatgccaatctcaggacgggaagtcagatccccccactccccaggtcagtgttcagtcgcttcagaatgtgtctagtcgtaggccccgagcctcagtttttattcacatgaccctagttctatgtaattaagttattttgtattctaatcacttttaggtgaccttgttttaaaaagttaagaattgtaatctatcttcatttgactggttttagtgagacaaatcattgcttttagctatacagttgatagaaatttcttcagtggttttttgtttgtttgtttgtttgtttaattttttgtaatttgttttgatactgttacttaaagtttccccccaccccagctaagtccatcaatttgaagctattcagcactcagaagccttgataacaccattggcttttatattcaatcagcttatagattggaatattaaaaagtattggttaaaaattagttttaattttaacttgtaagaaattacactgaatgtattaatgtcaaggaagaattgtttaatagaaatgagaaacttagatatagaatcatagatctgtgcacttgttctgtaaaacaaaaaccttccctttgtcatatgtggagctctctgtgaagctatcacaccacagtcctgtgataactaaggtgcaccttctgacagatgcatggctatgaagctccctacttgctgcaccattgacattgacgttgtaggctttcacatcctgggcatccataagagttctctgagatgctttgaaatgaaggagttatttgaagtaaactttagcttccaattgcttatgctttctctacactaatacccactttcccttattcttagtacacttactgttcaagtaaatgagcaaagtgcttattagccatcatgctgtaaagtttgaaatgacgaaaatgagaccaaagacagattaaagaacaaaacaacaaaatagatgcatgaggccacatgtataaaaatggagctagctatttatgtgactattgcaataggaacattgaaaattcaaataccttggcatgatctggacttaggcaaagccttgaagaaattggttgtgagtcaaagattttcttctgcattcagagacttttctaggatattggacactggggaaatcatactgtattcctacctcagtcccttaaccaagctttttgttgttgttgttgttgttccagtaaaatctggttaatgaatagccattgagtccatgaagaatgaaagacagcctgaagccagaaaggtgaatggcaaagtactaggagcagtctctgtagattcagtgcacacaagcttaaagatactaaattcaactccccaaatatgtcttgtttcttactcactatttattttaaagtatgtgagaaacttaggaacccagtattggtacttgagatccacacacactcccacattgcataagggagcacaccatgaaatttccctaccttagtttgttaggttgataatcctttaattgtatgcatgtctttagagtttacatagttaagttttctaatgcatcattcaaatcccatacaagtttggagtgggaagatgaacaggacattattcttgtgctgttctagaaggaggataatgatgagttatcgattacccaggaaacaaggagctggagtgaaaattcaggtcacttacatcttctggatactgcttagtctcctatgttgtgttgcacatgttaagtgtggtgtcatgtggatgtgatgaagccaccaggtaaggagtgagaggctcacctgcttaggagctgctctgtgcaggagaagaggtggctccttcaaggaaagtcagtttatgaggagtatgaatgtgtgcatgtatgtgtatctatgtgcacatgcgtgtgtttgagactctgtgtgtatgtgtaactctgtgtgagacaatatgtgtgtgtgtgcgcacatgttgtatgtgtgacaggaagaggggagaaggggagaagagagcagaatctgaaagaatggcaccgacagaatagtgcatttcccttcacctttggacttccactgttgtcctttccatgaacgattggtctcaacagagcatatacacactgcagtgatccacccacacaactgcatgaactacagtggcaaaagagacatatgcattttcatgttgtttgaagaactgtcaggtttatacatctttcttgaaaatttcagcatactcataatcagtttttaaacaaaataaacacacttttgtttaaaaaaaaatcaaagaaataaagcaaaatatcagagaatggtatgattccttatgggccctttatctaacataaacattataaatatttcacctaactcactattttttttgattaaagtttaatttaaaatgtaaattacaaaaaatgccaagcatctagaaaatctagtacatgcactcaaatttccaccactattagtcagcacacattatttttgtgtgtcaaacatgataatgagctgcaataattgaaagattgaaaatagacacagagcacacaaactaagaagggtgtaataaaagcatcttgtaatttaccagaacttgcttgctaccatgcctttaacaatagaattctgcataacaatttgtgtgactgctgaataaatgtcttcttgaacacagtgacagccacatgtcaggtgacagaactctaactgaggtgctctgacttgcagttgtaccagaggcattgctggaacactgtctgccttagtgtgcacccacaatttcctgctgttagatatgtccattgggaagtctgtgacatctgttcacacttccttaaattactgagtctgtgctctgccattaggtccagccaagttaatccacaattacactgagccacctctggcaccttcttcttagaatcagtctaagcccttaggtctagaacactcttttgttggagaaatcacctctagacatacaaagtacagcaacaacttatttttcaaaatctatgacactattttaaggatttgttagaaaactcatttttttgcacatctattaaggatatttataaaggcttttggtaattttcctcccatcgcagttcagtataggtaacataattagagaaagtttttattgatgtaggctctggctatatctcagaggtaccattgagtctttgagtgatagacacagaacattgagagaattatttgtttctttagaaacatttgctgagttcctgctgtatgccacaacacaatggaggtctttaaaaactgctctcgtttttttttttccttataatttgtgaatgtgtatgtgagtgctcatatacaggtaagtgcatgcagatgcttatatgtgagattgtttgtcacatatattcacatacgtgtgtagaaagggcgacttggctgtcattcctcaggtacatccttttcttgttgcttttgagccagggttgctaactgacctgggggcttaccaagtggctagagcggctgccagtgagttctagggatgcacggcttctgcccctccttgctgggactgcggatctgcactacgctcagctttgttacatggattcacagacctaacccagatcctaactagcacaacctatgcctctgttttaaaacccttcttcttcttcttcttcttcttcttcttcttcttcttcttcttcttcttcttcttcttcttcttcttcttcttcttcttcttcttcttcttcttcttcttcttcttcttctcctcctcctcctcctnnnnnnnnnnnnnnnnnnnncctcctcctcctcctcctcctcttccttctccttctcctcctcctcctgcttcttcccttttcttttcctcctcctcctcctctacctcctcccatctttttttttctgagatagggtttctctgtgtatccttggctgtcctgtagatatccatctgcctcagtctccctagtgctgggattaaaggcataccccactactgcctggccacaacattatatttgttgtaatctattaactgaaaaatactttgatttactctggttttctatttactaatagcgtactggcagatgtgtctaacagtcaacattgcttaactatacctctttactgaataaacatagaaataacctgcttcccacaacaaaacaaaatgtatactgtatatgttcaaaggttatccttttaagactaaattgataaaattctgaaatagtgatcctattaactcttgagtatgctgtatcaactttataaggaaaaagaagaaagagaaattgtgtaagagaaaagacagcttaagaagtaaactttaaacattgtttaaacattagacattgcttgaatatatacatacgtcaaatgcagagatttcatgtttttgagggtaataaatgcctttttaaaacactaaaaaagtataccttataatctatcttgcagctgtagcatatgtgatgtgccttttaagttatgagtgattattaacaatcataaatagcaagaggtaagtgagtgtttagagtttacaagatgttttgtcattctttaaaaacaactcaaaatactaaaaatccaagagaccatagcaatacatacatatgaaaaaagtttggacaaaacagatgttctccagagaggaaggaagggaaggtagtatgagtgggttttgttgttgttgttgttgttttcatggaaggaggttggctagactatgtcacctgggtttctatagcaacaacaccacccctatcttagcacttctacaggcttttgaaatttgctcattatgtgcctagtatttcctatgactgaagcccaaccagacagcaccttatttttaaaatgttcccctttcttcctgtaacctagtctagtacccacgtggacataaagagttgtaatataaagtaggaagttctgtacctgacattttttcatacagaatattctaattatggctttccctcccctgactcctcccagatcctccccaactacccacccatccaaatctacacactttcttccttaattagaatataaacagacatctaaaaaaatgataaaatactaataaaccagaataggataaaaaaaaaaacagacagaagaaaaagatccaaagaaaaagaatgagaaacctataggtgcagagacatgtgtttgggcacaaagaaattccatgaaaatacaacactagaaatcataatatatacccaaaagacttgtaagggagggtgggaagaaaatatttttaaagaaaagaataaaaatattgccaagataaagcatgagacaaagaatctccaacagtaccactgaaattgtcttgtgttgaccttgaactgttgggcatggggtctgtccttaagagtgacttgcatacccaagtgagactgttagaaaaaactttttctttgtgatcaattgtcaactggagatatcttttggattaggagtgggctcccctcccaaaccaacaccctgcttctctcaacactaggattcatctggtccagacccatgcagactctgtgtatgctgcactgagttcctttgtgtgatatcctgcttgtttggaatgccttgtttctaacctataagcccttccatttacaaaactgtcttctctaaaagcaaatgtgaaagttttctatacctggatgcagttcaaacacttttttttgtgagaatactcttttagtagatattttggcctattgagaaatgaaaatggtattttaaaattctgcaagaattcctaaagcaataaaaattaagttatttatagtagtagcacccaaattctataaaactagtgtcccacatgttataaatatagtacctgctgattagattattggattaacaagaacaccccgttttgactacaatagatacccaaaatcaagttggtacacttgatggaggggtatctatttacaagtatttggatttaacatttttgggtggaaaaaatccctcttcatgttaagtattagtgtaaaaatgaacatttcatcctgtgaggtatgaggtcagcatttacatactgaggtgtagcaactgtggttgaatttggtcatagttacacttcacagcaaaaattttctttcattgtatcaggaatactttagcaacgttaagccatggccatttaaaaggatgccaaggacctaggggactccatgaggaatggagattctgaacattaccaatgagatgtttcctttttggaaaaaacaagacattaggcaaacaatcattcttgtagtagggtctttgtggcttgttttcatgtatctgtccctttgcatttatttgagacactgaatatccttttgcacagtgtgcaatcataaccaaatttttaaacattttaagcaagttttattagattcaatggaaatgaaatcaaagccagtccgttttttttttttttccagaaaggttcagtgctggtgtgtgcatgcttctggtctcctttgtaaactatggttaaagataatcatttgctactaaattctctatgtgtatactgtctgtggtgataggttttttttttaaagtatggtataagacatttgtatttcataatacaaactcatcagttcttgtagcaaacaccttacgaattccatgcaatgactttagtgttatagttctattttaatattttaaatcaaactttcttttaaaagttggcatattttcttatttatacataataatattatctatttcttttttaaatgtatttttctctcatttatcatgtcctgactgcagtttcccctccctcctttcctcccagttcccccaccctcttagatccactcctcccccattttcctttggaaagggcaggcctccgagggatatcaatcaagcatgctttgcttgcttcttgcacaggttctatttgaacctgttacctacgacttgctatcttgaggtagacactcagaaacttagagctccaagcggccccatgtggatggctcctattttcctttctttgtcttctttttcagggttctcattcttgagcataaacattaaatgaattttaattctacctctttgtcttgtgttgcttatttttatttactttttagacaaggtcttactttgtagcccaggttagactataacttgctaaatcgctcaggttcttcctaccttagactcctgagtatcgggattgcaggattagaatagagcaccctactaattctgtcataatttatagaattatatttgttactgtgccaaaagttctctctcttcctctttctttccttttttctgtctgcctgtttctctgtctctctctctgtctctgtctctctctctctctctctctctctctcatacacacacaggcatgaataatcagacttcaagtagtgaaagtactttattttaataaaatactttaaaaatactttattttaataaagtgggattaaaatacctattagaaattaataaatgtgtagtatcttaggtatatagattatttttaggtatatacatagtttggcattttttatttgccttgtaacttctataattattctcaaaatttatatatttactataaataaagatggaaattaatgtcttaataataataaattatatatatttaaaattaaatataaacctaaaaaactgctcaaactcaaagattctaattatggaaatatgcttttcccatagctattttcttaaaaaggaaattgagtgggtggtagccttaactaaaatactttctatatttaattttggactttatgtgaggaaatcagagcaattataaacattattttcacaattggattttattctaaaataaatgactcttaaaaccatctttaaaacaatctatgctatttcagccacacacacttcaattagtgctgattgagttttgagcattttgcattgctgcattggctttctccttaaaatttcattgtggggagcaattgatcaagaacagactccaagtaaatgaatgtattagtgtttaatttgatgaggggatccttttgtgttaacatatgagcaggggatttggtcttgaaaaactaatctgagggagggagtcagtttaaaacaaaagcatcagaaagcagtggtagtcagtcagtctgaagagttaggtgccccgtgcatgccactctcctatcaacatgatgtgaatgaaagtttctctatgagatatagatcgtgggagttaatatatgctgtgtattttaaagtatacaatgtgtatactttatatgtatatatataatatatgcagctaaggtagtaacagtacatatgacctgcttgtatttcacatattaaacttgcttgcatattaatttttatttttatatttgcatatgagtccatgtaggcaccatgggtttcttagcatctggagcaggtatttgtggttgttctatgtgctttggaacgcttcttaacgtctgaagcttctaaatgttgggttattcgtatcatgtaattgatacatctaagtaccagtaaatgaaggctaagaatagtgtaaagtactgaaatcaaacacgtgtattattgttgatttgttgttgttgttgttattgtttaagactatccttctgtagactaggctagactggaattccctatgtacccagtctagccttgaacttgagatacagacgagtatcaccagatttaagtactctgttatagatattaacatggggtctatatttggtttggtcaccaaaatagctagtaaaaatgtgtatgttattgatggatgagagccagtaaagatttactgtatttagagattttgtccatatgattctggtaaaagttagtaccatggagaaacctactatgcaaactatgtatatttgtgttgacaatataaaaacaatgtggatgtatgtgaggatttttctgtctcacaggtagaagatcctcatttctttgctacagtagctcatgtatctcattcaaataataaacacagaaacttttttgatgtagcatttggggtggtggagagagagagagagagagagagagagagagagagagannnnnnnnnnnnnnnnnnnnataagaagaaaggagagaggagacaggaagacacttaggaaaggtgaccatggatgtggcaattctcgtcctcccttcctcctcctcccaccttcctcctccttccacccccttgcttatatatgtacataaccaaaaccaatggaaaaacttaggccttctgaatatttgacatgtcagatccaatttttttttatcagtgggtttgttctgtagtctcattatagcatttgtatgtctgacacggagactattttttgcagtgaataagagagccatcacttaattcttctttgatggtggcttaaggtattaacaccactctttcctccatgctcctcttcaggtgctgcctttccagattataagaatgatttaaatcaattatcattgaactagctactgggattccagaatgaattttgttctttctgaaacaggtttggtttctctccatgcatttagccagagaatgatggttaaggaaaagaaacttaaaaaatagaacactaaaatagccagccttccaggcacttaagaataggacatttaaatcttcatacatatagccaagcaaaatgtgcacatctctttgtttttagacgagcatactactaatattctactgtagaataaatctgtggttcccttgaaggaccagtatagtcagtcacttggtgagaaagtagctaacagtctatagaggagcaggacaattccatttgtggttttaagcgagtcattgtttcatttggagaatgtaaaagtagctaacagtctatagaggagcaggacaattccatttgtggttttaagcgagtcattgtttcatttggagaatgtaaaatcggtgactgagcttgttccctttgtaagggacacacagtgacacacggaagcttatgagtgcttctgacagatgtgttggcggtttgccacaagctaagggtgcggtcctgactgacagcttgcaattatgttatgatgaatggttctgatgtgtgttcaagagaaaaccactttctagagagtgaaagtcatacatacggttcctataaaatcagctcaaataaagtatggtaactctctattttgtttagcattttggtgggctaaccaatttgagcattcctctttccacagaagtctctgtttttgataaaacaaggatgcaatccaattttttttttgtgggtggaaataaatttgatacctttttttggcaccagaaatactttatctgcatttttgacaaagctgacatgtccaaggaaatctttacctctcacataaactcttaaaatatatatatgttctgtggtgtgcctataagacttttgagtcaagcattcaaaaagaagttgcctcttcggaccaactaactttttaataagttctgctgtttgtatttcattgaagttactgtgatcaaatgatgtggggaggctggctttctgggtcattcttatctaatctgatttaagtcagatcagactctagtttacagtgtagatttttctagagttaatatacttattggtatagaattttactactcaatgataagactataatatttaaaatgtcttgattaaactagctgttattttccccatatattgacaaaaagttgacaggtttcccaaaattaagtcaaataaaaatattaaattaagttgaggtggagttttaaaaaaataaattaagtggttaaatttgttgcttattttgaaaaagttaagtttcagtttgattctctgagaagctcaaaacacaatattcttgaagctaagaaggaatctctgttaagaaaattaaaaagcaacataaaaatgatgaaatttcagtaagtgctttaccatgtaagagaaggtagcacaatagttaaaatcttcacaaagtcagactacaactaaggcttaaacactgaaatttccaaaggtcagggaaaaaaaaagaaagagggataattcatttatcccaaatttcctaaaacggattgcattatcttacttcagagaagctagttaggattgtatagatctgatgcaatctcaaagaaaattcttaagaatttaaatatttcagctttgcagtagccagcttttgtcctttgaacttgtttttctccaagtctctttgtgtggattaaggtgtgccatctctagtattgcaggagtgaccttccattgtaactgaaattaattcttccacaatgaaaggaggggcatgtcgcaactgtagcaatctgattccagaatcctacattgcatcatccatagagcaaatgggtgagaagttctgtaagcttggctttagctgggagctgccttctttccctcctgctactcactaatcactcaccattcacacttggtcctatgcctaagtgcagcagtgtgcaaccttagatcactaggacttttctgtctaggtttccatctttggaggtctctgattttccctttcctgttaattctaaacctgtattttaggcacggttgttcatctgttaaaatgttatcatttaggtcttgataaagttgtttgtcattcttatgtttatccaggctccaatggatgactattatttttattttctagcctgtctcttcttctctcacctccttcttcaatgtttctccccctcttcctttccctcatgtctctccctcttcctgtcccccctcttttcatctcctttgttttcctctccaacctctccaacattgaaactccgaggcctcagatcctcagatctccttgtttgattttgtctttacctggaagaggaacattcaccaatccctttgcaggtgcgagttaaggcctgctgcaaagcttggcatctgagctccaagctctgagtaatagcttctagcatatagttttgatcagatggggtgtgcagttgtgggggaaagtagattgtattattttgagttgtaccgtaggtcataattattagtgtttataggatacactcattaggcaattatatcttgttgtgaattcgaaacatatttgtttgtaacttgaaagttttctggtaggtaataattagatcccatttgggatattttatttaaatgaaaagtacttggaataaactgcacattttctttcttaaaacattattttccaatcctctggcattttggaaacaatctagcataagcagtagaaggcacagagatatctgtcctggttagtgcctaaggttaggtgcctaaatgtttaattggatttgggaaattttctggaccacctgtaattaattctttcactgatactttgttgtttttgtgatacttatcagataagttcataatgccagatacactgtttaatgtgattttagcaagcatgatctctgtgtgtgccctaatcaagaccacaaagttaaaaattagcagaactggatattccaaagcacatgtagtcctcgaaaacccagtgtgaaccactctgtgctctgtagtaagctgtactgggaagtgcaggaaaacctgactgctgagggagttttcagcccctctcccagctggaaggacaggaaaagaagtgccctggcttcttttcccccacacctgatccagccagtgttggatcctttgaagcagtcacaggttgggggtgtttggaaggtagatagtctacaaagaagacttatcttttattaagtacttgtgggagaagtacttaagccatgtgctttcccccactttgtaacttctctgcttatttatgcctttttttttctttttgtttttgttttctagacagggtctcactacatagctctggatgtcttggaactcatcctctagaccaagctggcctcaaactcacagagatctacctgtctctgtcttctgagcactgggattaaaggcttaggtcacaataagcatgtctgagtatttctaagaggagcttagtcacctagtttctcagtcaatttgggttgctttctatcacaaaataccatagaccggatggcttgaacaatcgaaatgggtttcttgtagttccagagtctaagaagtccaagattcctagtgagggcttttcctgctggcaggtgttcatattctcctggatcttcacatagcaaagggtgagaggcataggagtgaggggagaagaaagctcacgggcgtctcttcttttacaacactcatcccattttgagagccctgtctttaggatctcattttcacgtgactactcctggaatatgctctgagttccatgaatctggttgtcagggcttcaatgtgtacagtttggggacataattcagttctagtacatagtcctcccagaccttaggtgctcagccctagggcatgggtgtctggtgaccatagtatttacttctgtttcctcctggagcatgtgtgatgacagatataacaactgtttatctcttagataaaacctttttaccatgcagttatggtgtataagaggtttagtgtttcttgaatgtaccttcatttaatttgtgcagcacttgaggaaactgtggcttagccatacttcacatggcacaattaagtgataaaacttgtgttttgggaatgtgttaggctacaagcatgaataaccaaaaaagagaaagcaagctgtataaaatttccagcacactgtagctcagggtatcagtaacagctggaggcaggcaagaggcaggctgaggggagtcagagggaggacctgctggatgaataagagcataagaacaaataaaccgttaaaaacaaatgggtatttagctcttttgcataacacgcattctggagaggtgagatgctggtgttagtgcaggaggctagaatttagggacatggtcctgcatacctacaaatcttacagctttcccttagccacagtaggcccatagtctgggagtggggacagaaagtagtgcatagatgaatgagtccacatgttccctttctttgcagggggagggtagagtgactcaaaacaagggagactgttcaatagtcccattgcagatgtcttcccatgtctcgtctagaattaggttatatggccgattaccgcagctgcgaaggagacaaaagcaaatggcttgtttgtccagcttttccagtagaggcggtggagaaggaaaagggttatgaacgggctaaaagtgtcttacaggaaagagatcctaggtttagtcctttgatttcatttgctttctaactctcgagctttgctgaagcaggtattacatacctttaaaaaatatgagcagtcatattttagtatattttcacaaagaattttggtacatttatagaaaatagcaggaacacacttgattaaccttagcgagggcctgactcggaccaggttcaaatgtttcttccacacattagaactctatcatccagaaagtttctggacttctctatagcataacgcatatcaggtgtagtcaaatgtgatcatgtaaggatttaacagctgtaaataattgtttacacgatgagtagaaagaaaaatttcagagtccaagatttgtgaagtacagcatgaatccctttgtatttatcacagtttgaaggacaagatcaatgatgattctgactctattctgagccaagtttagacagtacatgaagcaagatttaaagagtaggctgttttttaaagaagacagaagccatttctgggttctttgtagttactacctgtctcgaactctttcctatctctggctgggtgggctttaacaccccctcactatggtcactcttgcttcctctccacttgttggactgacactttgtgtaagtgatccgaggtgataggaggagaaagagatttgattaaacatttgattgaaataactcataacaagatgttaatgaccaattggttcattaactccttaaaggaagtggtaattttgttctgagatgagcttgtatattgcaaagaatccatagtttgggtaacatataaaagaggatttaagaaagtgtgttataaggtaatcttgatcatgcaaaaatagaaaatgttataataaactcatatgtatctttacttaggttctaaacatttcaagattttgccattctatatttattttagcatttattttctctttctcataaataatggggagattttaaaaagtaagccttagcctgcaatcctcagcccagatcatgcatacaccattgtgctctcaccagtccaggtgctcatttgtttctaagagctggaagtctcatgcatgcgctataggcaagaggtgactcagcagagactcagctatgatctagggttaactgtgtaaaaatacttgaggacaaaagcatagctgtgggctttgtgttagctttctagggattagctttaggttggggcaacatgaggaattgtagccctttaaatcttaaatttttaacttatttttaacaagttaaaaaactacaaagggaaatagtcaattgttttcataccaatcagaattaaacatatttgctttagtttattttgataagaaaaataagtgtaatttactaagacatatgtatcatttgaagtaaaaattcaacatgaaaaagtttgaaaatagaagagtcagagctgccacgtaggaactgacattaatactaggcatatacgatttgtatgtgattacaaaagtagaagattagtatggaatgatagtcagtgggtaagacagaaagacatgtgaatactggtcatagtgtggaacgtttgtgaacccaatgtctttctgttatgctaatagaaaagaaagtgaactggaggttgctaaattctaaataactattttatttcaaccaccagataagatattcaatcaaagatttccctttagctttaaaaccattatgaacaatttggaggtgtttttgacagctagctggctttcctgctactttctccgctgtgcttgtgtgtgctgttannnnnnnnnnnnnnnnnnnntttgattaaacatttgattgaaataactcataacaagatgttaatgaccaattggttcattaactccttaaaggaagtggtaattttgttctgagatgagcttgtatattgcaaagaatccatagtttgggtaacatataaaagaggatttaagaaagtgtgttataaggtaatcttgatcatgcaaaaatagaaaatgttataataaactcatatgtatctttacttaggttctaaacatttcaagattttgccattctatatttattttagcatttatttcctctttctcataaaataatggggagattttaaagagtaagccttagcctgcaatcctcagcccagatcatgcatacaccattgtgctctcctaggccaggtgctcatttgtttctaggagctggaagcctcatgcatgcgctataggcaagaggtaactcagcagagactcagctatgatctagggttaactgtgtaaaaatacttgaggacaaaagcatagctgtgggctttgtgttagctttctagggattagctttaggttggggcaacatgaggaattgtagccctttaaatcttaaatttttaatttatttttaacaagttaaaaaactacaaagggaaatagtcaattgttttcataccaatcagaattaaacatatttgctttagtttattttgataagaaaaataagtataatttactaagccaggcagtggtggcgcatgcctttaatcccagcacttgggaggcagaggcaggtggatttctgagttcaaggccagccagggttatacagagaaaccctgtctcaaaaaacaacaacaacaacaacaaaaaaaaaaaacaaataaaaaaaccatatgtattgtttgaagtaaaaattcaacatgaaaaagtttgaaaatagaagagtcagagctgccacttaggaactgacattaatactaggcatatacgatttgtatgtgattacaaaagtagaagattagtatggaatgatagtcagtgggtaagacagaaagacatgtgaatactggtcatagtgtggaacgtttgtgaacccaatgtctttctgttatgctaatagaaaagaaagtgaactggaggttgctaaattctaaataactattttatttcaaccaccagataagatattcgatcaaagatttccctttagctttaaaaccattatgaacaatttggaggtgtttttgacagctagctggctttcctgctactttctccgctgtgcttgtgtgtgctctgttactgctctcccaattctgctcccctctcttctcattagcctgttggtggacagtggccctaagccctacgaaaggagaattaattgctcttaattcaggcagtcaaagaaagggaagcaaagtcagaagaaaggagatgcattcagaggagcaggaaagggtactggagtcatgtannnnnnnnnnnnnnnnnnnntattgtttgaagtaaaaattcaacatgaaaaagtttgaaaatagaagagtcagagctgccacttaggaactgacattaatactaggcatatacgatttgtatgtgattacaaaagtagaagattagtatggaatgatagtcagtgggtaagacagaaagacatgtgaatactggtcatagtgtggaacgtttgtgaacccaatgtctttctgttatgctaatagaaaagaaagtgaactggaggttgctaaattctaaataactattttatttcaaccaccagataagatattcgatcaaagatttccctttagctttaaaaccattatgaacaatttggaggtgtttttgacagctagctggctttcctgctactttctccgctgtgcttgtgtgtgctctgttactgctctcccaattctgctcccctctcttctcattagcctgttggtggacagtggccctaagccctacgaaaggagaattaattgctcttaattcaggcagtcaaagaaagggaagcaaagtcagaagaaaggagatgcattcagaggagcaggaaagggtactggagtcatgtacctatggggacagctgagtgaccccaagcaatggcggaaaggctgtcagcgtcatcactggcagagcagtaacggcccagtcctgtatgccccagcatgcacagatcagggtccaccattccttgaggtggacattcttgggacccctctccacatttactgtgtagacctggaatggccatgtttagaagccaaaagggcttgttggccttctctcagtcccccactggcttgcttgtatgctttagtttgggctgaagatggaaaggccaccaaagttcacttgattgcattccagatgtgtgatgagcagtggtagagcttaacattttactgactcatgacttttgacatgttatgtatgtttagttattttattctgcttatttgtgtgctcttggtgagataaaaacaaaacaaaacaagccattggtttttttaattagtaaatgcagtagcaaaatgtgtggcctagtatttcttaaatatttatattaattctttgagagagccctacatgttttggtcacatttacctctaactcttttctctttcctctcctagtaaaccttccttctctgccccctaacttcctgtccgttttcctttcttctaaaaaaagaacatattgactccaatttgtactgactttacacttctgggtgttgagcactggatgtggacgcactggagcatgcacatagctttgttaatcataatccatcccctttgtattgggagaatgtaacgccgtatgcatatctaactttttttttttttttggtaaagaaaaacttgttggtaaaaggtatgatggtatgatagagcaagaaagacaggatagattatttaaaaacaaatatgaaatacctctaaagaccatgccaagggcccaggagacagccctgtgagcaaaggtcctcactgccaagccggaagattaaagctcagtccctggtacccacatgatgcaaggcgagaactggtctgcaagttgacacccacttctcacctccacaggccaggggacacacaggccctgttcctggcacacatacatatagaaatgtaggaagaaagactgtgaagagctcctactataaaattgtgagaaatgaagtttgaagcctctgacttttaattgtgggtttttcttttcctcttacacattggccagttgtcaaactattcacacactattgcaggaaccacaagcattcttctattttcttttctcgagtttgccctgatactatacattttaattataccgattgcagaaatcctacaatgtgtaatatatttattacttttctcattgctgaggacaagtgcctggcaaagaaagaatggtttcttttggatccagtgtgagggtacaacctatcaagaggagagggcatggtttcagatacatccttctatctggaggtcaggaggtgtggaggaatgggtatctgaacagctgatcgggtctctctctaactttatttggccaggttcttagcccatggaatggttctacccacatgctgggctacttctctttttcaggtgaacttttctggaaaactcccacagatgtgccagtgccaaacagtgtgtttcccaggtgattcctcatccagctagttccacaaggaagactaaccatcacacattgatgtgtctgtctctgtgtgtgtaaattattttaaaataataattatgtagtaagaaaacttatatcctgctactcctattcctgtcaccctaaattccactgagtggatccagattccccagtacaagtttcttctacttgaagaatcccctcgaacatttcttggagtggagatctgctatgactaatcccatcagttttgtatggtcaaaacatcttatttcatttttgcttctgaaagacatttttgctgggtcaaggttttagatagatcattttctctttcttcctatgtgaaaatgttgcacaatagtctttggtccttgtttttgtttgggaattggttctcacattactgtgcttccaaggtttgctgcaggcttgtcaaggcttctctatctcaaggtgtaaacagtgtgattaggggtgtcttcatgtaataggggaacagggctcccctattcatcagacatggatttccctgggattcttgctctatagttgtgtggtttgtatcacatttagctagacgtagttgtaccttacaggtgtttattgtcgttgtccttaggctttttttcctgtatactgttaggtcgcttgaaagcaatatgatcctttcaggtcttatttttaagttttcacagcaggacaaagtggcatttatctggttgtagagtagattgtcatagagagttgtgattctttccagcttggatcctaaagtcagtgggaactgccctgggttattaattatgatcgtttcttctcatcattacaggcagtcttcctctgtcttctctgagtgcatgttctcatttttactcaatagaagtgcaggtcgctctgccaacagacagtgctagctttttctgagtgtgtggtgccctctcttccagccagcccagagcccaggactctgcaatactatttcttttcaggaatgtaggcagccttcacctggactctttccctctgggtcaggtagtaagctagaccaacttaggacttacttattttccttccatctcctagggaatactgtctctgtcaccagatatctgtgaaatattattcaaaaggcttgttttccttttgaacataatttaggaagcagagtaacttcagtgtctaccatatccagaaatgaagtgggtactactctagtatataaagttactgaaagttaaacctgtgaccactttttaacttttttttttgtaagccaatgaagaaaaatgaagaaaggggcactttttttttttttttttttttttttggtgaatgaaaattggcacaattatttggaagggaaatttagtgtttccagcttctgactctgaccttctgttggctccctagtccttgtgactagaggaaagaattcagaggggacacagagcacagtatagaggatgagaagagtctatgagagcaaagcactttccagaccaacagcagacaatggccaagaggccagcgtacagacttacagtgaaggcaggcaatgcactccctgcccaggtggttgacaggcccctcctgaggaacaggatagtggtgtagcttgggttttacagaaagccttcagctcgatagcaattttagaacctgtggggcaactcaaaatgtcttgtccccaactagggccagagataccctcaaatccagtcataaccagtaacctcaatcctgtagtttcagttcctgcttttccaagctgctggttatgaggaagaacttcatccccaaagacactcaagccagctgcccagaaacactgcatatcaatgctacaggtagattttctcatgatctatcagtgcccttcttgtaatctaccctagagtcacctctgaacgactcaaggatataaatactcaaaataagtcactgtgatgttaatgacaaggggaacagcctaaatagtcacacatcagaatgactgaatcaactaatgaacaaccacagaatggaataccatgtagctgtataaaaggctgaagaggctaaactgacttggagttactagtataatataaagtataatatatttcctttagaaatatatttaagaaacactatattttgggtacaaacaaatgttcaacacatagagtgaaacagatataaaatagaaagatctatgagcaggatactaggcacaaacagaataggagagctgggagtgattgagtagatcagagtggctggagcagggagcagaggccactgggagaggcaaggatggatgccttccctgtcagtggctcagcaacggtttgtatcactgtgccagttgcaaccattgtccatattctgaacacaaagcaaataggcaggaagaaccaaaatggatggaagaataatgaggaatgtcactgaactgcaaatgacatagctgcagtggcatagggttggaggtagctcagtcgaactgacctcagtagcttcatgttagtgaatatttggactgcatagcacaggtctaaagaaaaggacacactcttaagagacacacaactatacagctgcctgcttaacatttgagtctaggtaaagtatgggtaaagattcctccccttctgtctttctctctcatgtgtattcaaagttaaaaaaacaccatacttcctaagtgaaaacatgtttccctgataagcattaggtgattgtaagactgttggcagttatatagacctgtagtctcatgatactcagtaattattggaaagccaagagcccaggagctggtaattgagaactttaagaacacaaatctataaatgaccaagctctcagggaccatttcttcctcgttgtctgatgaacggtttgcttgaagatgtatcaagcatcctgctcagagtctcccagccattcttctgacagttttggataagaggctcagagtgtgttccctttccatagcacagtggaaacataataagctgagtataatttactcctgagattttgtttggcagtaggggtgattgagactcagtgttgtatctagaagaaccccaggctctctgggaaactataaattaagatgaaatcaagactataagtctttttcactcctgtctgaggctctttcaagtatgtcatcaccttgactgttattaatatttttattgctattgctatcctccatagaagccacttgaaataaaaccctgatcataaagttcatagtttacttgcaaacgtgaaagctttggagtttgagaactttttacaaagagtgtgttaggcaacttcaagggagtaatgtcatttgtcagcaggtcacttgacagggcttgtgggaggtgtgagatcagggtagctgccagtgggatttgccatttttctagggatggatgcatcacacagcccacactaatgtttttgtccacactaattattttgtcatttatgattcctacctcagaattcctctcagtgctttgatcttaatgcttcattgatccgaccctgagatgctagtgcagggtttctctctatgctgattaacaagggactttttttttttttttttgcagtgaaggcaatgcttatattttttaagcatgtacagagaacagagttttatatgtaaaaaggatgttattatctgtttaaaagatctgccataacatctgtctattaatactatagcctgtgaaatgtatggcagaccagagcctatggcctttggttgctgtggtgttacaccctcttttatacacatctcactagtttgtggctgtgttcagtagtttgcagagtttgcactctgagacattatctttgcttttaaagtgcactttgaggcctattctgtgttttgcttatttgatgaaacatttagaccaataactgtgcacaacctttgagtcttgacacttgcatgatttagctgttaattgtctatgtgctggatgcatgtgtttttgtggttagaaactgctcagtactcgtacctgatgcacacacagagcctagactctcaggcatgcagtatcaccagcttcgagctcagctcatagctggactccctttgataccactaactgttgccaagtttgaatagaggattaagaggcacatgtagtccatcttcaagctgtgcaggggaactgttgaaagagcctttgtgctctgtgtaatcaagagaactggtcagtgtttggaatccacacaggacaatagtcagttgagaatttgttgtcattcttcctgttctctctcaaagtaaaaagaaaggggaatttatttagatttcagttgggctttttgttctttaacattcttcttctcaaaaatataattttagctttgagcctcctttagctcaaaatgtaaatgttgaaaactaagccagattaaaactgggcatggggaagcatatttaggtagacgcttttacagtctggatggttacttaatttattgtcttctctctgagagacgggagtctgtgaagagctaataatagacaggctcaccctgctgtgaattcccaagttcccattcctgtgccggtcattttctcatataaatgcggaacatttggttatttaaggggaaaaaaccctgacaaaaacttgagggtggagagtatttgtgggaagcttccctgaagagaagcaacatcacagtcacagtggtttttgctctccagattgtgcctccctacctggggttcttcctgatctctcctgcagtggctgagcattcaggatccctggcaccttttacacatagtaacaaaacaactgaagtctaagacggagaaaaaggcaagcaatttcagaaagtctactactggtgtagttgtacataactataatctcagccctagggagggagagacaggccagtcacaagctcaaggacagtctggactacataagggtcacatcaaaagcaagcaaaaggaaagtatattgaatactgtttgctcactcagtggatcccatggaggatttgggccccaactctcactcttcattcaactttactagcattaagtatgaggctttagttatttctcatttgctttgtggaacagtgagggtgtgctagggagctgatagatgggctgattgatttgacagagatcaatgaggaagtaatacaataatgtgttgagtggcaagatgtaggcagccttgtactctagtggagtctatcagtggtactcctgaggaaatgattttgattttcttttataaaaaattacattttgtgtgagtgtgtgtgtgtatgtgtgtgtgtgtgtgtgtgtgtgtgtgtatgtgttgtgtgtgacttgccacaatgtgcatctagaggtgataggataacttacaggaatcagttctttgcttccatcatgtgagacctggtcatcaggtttggtggcaagtgccttgagccactgagccatcctactggctcagacatgtcactaaatagcagtctagctgaaatctttagatatgttttggcagggcttaatcttaacatgtctttcaaaatcgtagcacaacatccttctacttgaaatttaagaaatttattttattactatcttatagggtttttactgtgtatgtgtagaaattctgtatattttataaattcattgcttttatttttctatatttttcaaatatatagaaatatattatattaaccacatagtcaattatctttctaatatatttattaattcttataacttatttcaggcttatatttctttccttgtacatgatcaaatggtagtgtatattattcattttctgcagaatttttgtaggctgataaacatatttcacagcagttctgtaggtttgcaacaaggttggctgggcagtactgggcatgctcatgtagtcttttttcctgtcctatatacagctttcccagctgtcaacatacagcacatcttactaatggaccagtgtcaacatcatggactccccaaagtccacagtccactaaggttccttctgcatgtttgatggtgtgtctgtgtgtcacaccatggctggttttactcttctgtcaactctctttgtcctgctcactcatcctctcttctcagtgattaccatagttttcccttttctagaatgttgtgtgttaagacactataatgtaagtatagtatgcaaccttttcagattggctccctttacttgctattatgatatacattaatgttccctccatgtatcttcatgacttgatgacttagttatttttagtgttgaataacattctactgtttgaatctactactggttatctatttacttgccaaatggcagcttgcctggtgcctagtttgagcgactgtgagtgaagctgctctaaacatttacatacaggttttgggcatatcttttagtttgtacgagcgaaaaaaagctacactgtgttattagatagtgtttagtttggggacaaactgttatgtgttactcacactggctgtactactcttcattcctgtgccacactgtgctggtatttggtgccacactcccagttttggccattctaataggtgtgaagtgcctatctcatgctcagtgactaaggtttttcacatactcccataggttttaccatctgtgtgtttctatggtgtctattcaggtagctttggcactttaaatggcattgtctcgctatcttattgtcaccttaaagttcaatctcaaaagttttaatcttgaagatataaatttagctttcaaaggttgactttgtcattgactctggagtatgtctttggtgtgctgattacaaagtcatcatcacaacacagtcctcaagatctattgacccctcgcggcctcctgtgaattcagtagttctgtgtgttgtactgaggactactatcggtccatagtaatatgtaccatgggtgtgaggtttgtttagctgccttatttgcatctggttgtccagtttccttgctccatttattgggaagacttatcttttcacaagcccatgatgactctgtcatcagtgatcaggtttagaagggtcaagttttcttttatatcttgatctattcatagattcttttctgatatcaagtggtcttgtttgctgtcatttaataaggccttgacttgtgttagtcctctgactgaggtctccttcaattacagggtgggtataggctcttttatgtctctctcagtatgaactttaaccttaactttgttgatgttcttggggcagttgtttgagattttaattgggactgtaatcaatctacagaccagattgggagaactcacattttttgatattatatattagagttcttcagtctttaaatgtggaatagtttgaatttatttaatttttggtatcatttatcagagtttcttttttctatacattttgggcatactgtattggattcaggtccaaatattgcattttgtgggggacactgattcaaactgcaatgtgttttaaatgacagattgcacttgttgctgatagaaaaatgcttgacttttgtgtgttaattttatatccttcagcattgttgtagccacataatgaaactcatgctaatgttatgctttggttagtgttttggtatcttcaacatagatgatcaaaatatctcattattcatactctgctatcctttgcctttcttttgttgacatattcattgactaggacctacagtctggtactgaagagcatcagtgagaaggggcttctgtggcttgttgcttgtctcgccgggacaggcttgagtcccacaacttaagtttgtgatttctttttattctgtatttcttttcttaaatgttctttatgaagctgtttcttgtttgttttatcagtaattgacactgaactctttcaagtgacctttctttgtttattggtataatcatgtggttttccttctttggcgtgctggtgtgatattaaatgattattttaaaatctgaaccacctttgcatatcttggacaatctcacttgattgttgtgaatgatttctttcaagcattgttggcttgagttcatagtgttttgggttataattttcttagtataccttggtttggttttgacatttgggaattgctgccttatacaataagctaggagattttccttttgtttctaccctctgaaaggaatcaaagaaaaattggtgtcatgtctccctgaaatatgtgttagaattcacctgcatctgatgaatccaactcggtgttttcaatggaaataagtttaggtctttcaaacctctcatgctttttgaaggcctagcagattgtgcctttttttacttactggtttctgtttcatctaggacaggtatttacatgtgtgggtataaaagtttaataacattcttttagtctccctttatacattgcaagatctgcaacaatgtctttcttcatagcttctgaactcagtggtttagtaagtttgttgttgttgttgttgttttctcttctttttcttagtttgtttagaaacttacctattttactaacattttcaaagaagtacctttcagtctattgatttcctatttcctttttccttttccctctccttccctctgttcccttcgcttcccccttcccccttccccttccctccaagcctctttcatctccccttctcctcccctnnnnnnnnnnnnnnnnnnnnctcccctcccctcctcctctcccctccgtattccctctatcttccctcctcttttatttttgagacaaaatcacattctgtagctggtctcaaagtcctttaactcataacaatcctcctgcctcagtgttgcaaatgttgggataacaaatatgagttggagttaccacacctgagctgttttcagtgtcattcacattaattattatttcttttcttcttctacttgtagattaatttttccttcttttaatgtcataaaacagaaactaggcttgctaattttagataaatgctatacatttccctctaagcaccacgtttgttacttctgaagaattttgataacctgtacttttatttcatttagcacaaaaatattttaacattttccttgaggtttctttgttgtctcaggaatgtacagaagcatgttgttaatacctatgcatttgacatttccctattattggttaataccctaattccactttagtctaagagaactgtacagatctcttctttttaatttgcctgctgtagtttacagctcacagcatgctcattttttccctcttcactatgagtttaaagactattctgttgggtgggggtaatccataggcatcaattatgtccagttgattgatggtgttaaggtcacccattccttactgatttttatgcctgctggctctgtccattttatgacaaaaggatgttaaaatattcagctatgagagtggatccatctatttctccaagcaaatcttgcccagtgtgttgggatgttctcttgctggtgtatgcatatcaaggatggtcatgtcttgtagagttgctaaggaagatgatcccctaaccctgataacgttctctgctctgaagtatgatcagtctgaacttcttacagctgctcccatttcttctgcacagtggtagcatagcaaaccttcctctacctcattccttaatctatgtatctttatatcaacagtgctttcttttagacaaactatagttgggtgttctgtgattggccccactacccctgtaacttggtgcattcagacctttgattgtgtatggtttccatagagttggactgagatgcaccactgtgctgctattgttggtgcttaacctgtgttctcagtcctactttagcctttgataccttttctacctgatgtggatctattagaattaattttgtagtttgcaaacagtaatagatttgtcatggaacctttacaaataggtatcactaccatgtcttcgcatgtatttctctgcccactcctcctgtggtctaaatctagcattttatgtgatttcatttcctcttctctcttagataatcagttatagttttgttaggacatttctcagtcactgcctagagtttgcagacgagatttatagcaaatccaagtgaactttccagtagttcacgtctaggacgagagccatataatagtggcttttgtctctaagtctttctgctcagccttccttccctcacacctttactcagacatagccaccattagaaagggcagccatgttgagatatgcacaccattatacatactgctttcactcactgttgctatcgttttttaactaagtggttcagtagagcccaagaccaggtgaggcaccacctcttccctacgtctgagccactgatagcactattggcctctctctgaagaacagcttttacttttcttatgaggctgcttttgtctaaggaaatctttcttttccactttgtttttaaaaggtaacttcacagcatacagagtcccaagtgatttttcttgtgtgttttgttcacctggtggtgtggcttgaatgtgttcctcagctttagcttcaatgcagtggtggtgaagtgggatctttatcaagtaattagagtatgtgaatgctccctcatggacagactctaccattgtggtgggatgacatgtcagctactttcctgttactaggctaagacccatggccaagagcagcttaaagaaagagttgttcagaattgtaagaccagggtgtttaaaatcacacttaatgtgttaaaggtttttgtggagaaagtcagcagcatgcagaagtagacaagcaacataagcaaagcgataggaattccaagaattgaaagaaaccaatatagtgaaataaaatatacgtttgatggttttctgagcaggtgctataggtatctgatcatctctgagcttgagtgcacattggtagaaatcgccaaagcagaatatcaagcagcagggggtggggaggataatactttaaaacaaagaatccaaacagtaattgttgataatttagtgtcaaaggccaaatcgcagaaagaggacatgcagaaaacaccaaagcacatatgtaaaaaacacaaaaatggcaaatacatgttagtcatcttgggtgttctttgtatctgtcttgtgagttttgcttatgtccacctgtattgtgaattgtggttcattatgggcccatctgtgttgtgagctgggtttgtttgtccctatgcttgagttgtggttctttgtgtgtttgtctgcgcagtgagttgtggttgtttgggtgttcctgtgtgtgagttgtgattctttgtgcaaatctcccatttggggacagcagcttgtcacatgatctctttttctctaaaggacgtaggaagagttgtcaactttcagtctgttgagcattttacttgtaattggggtggaatggtgacttctgaactccttatactgctggattggaagtcagaagttgattatatagactataactttttccttatctctctgttgctatttctctttcctacatctgattagagtcttcagggaaacagcatttgcctttaataattacacttgctggaaattcctctgttcttagactgctcagtgtatagtcacaccaggtgtggggtttaagtgttataatgagacttatttatccccaacagaacggtcagatgctttgttacctttgtcccagtaagggacattgtgttgcacagcgtctgaatctttgtggaacttaacggtcccactcctgccttatttctaatacttatacttggtaatactttttgtgtatataaataacttaaaatgtttattatcgtttttcttatctataaattatttgtttgtatgtgtgtatgtgtgtgtgtgtatgtgtgtgtgtgtgtgtgtgtgtgtgtgtgtgtgtgtgtagttcagaagacaacctgctggagtttgttctctctttgaactagataggccctctgatccattcaggtcatgaggcttggagagagagtcccttttcctgtgatgcatcttgcagatccctgttaaggtttttgtatgtagattataaaggagactcacctatatattattttctcttaaactttttgaagactcctgttacagctttttgtgtgtagattttaaaggagatccatctatatattattttctcataaactttttgatcaaaatttgttggcctcatgagttgaatagtttgcttttagactttttcttgtttttttgtttttgttttttacattttttttatttattaggtattttcttcatttacatttccaatgctatcccaaaagtcccccataccctcccccccactcccctacccacccactcccacttcttggccctggcgttcccctgtactgaggcatataaagtttgcaagaccaatgggcctctctttccaatgatggccgactaggccatcttctgatacatatgcagctagagacatgagctccggggtgtactggttagttcatattgttgttccaactatagggtttcagacccctttagctccttgggtactttctctagctcctccattgagggccctgtgatccatccaatagctgactgtgagcatccacttatgtgtttgctaggccctgacatagcctcacaagagacagctatatctgggtcctttcagcaaaatcttgctagtgtatgcaatggtgtcagcgtttggaggctgattctgggatggatccccgggtatgacagtctctagatggtccatcctttcatctcagctccaaactttgtctctgtaactccttccatgggtgttttgttcccaattctaagaaggggcaaagtgtccacactttggtctccgttcttcttgagtttcatgttttgcaagttgtaacttatatcttgggtattctaagtttctgggctaatatctacttatcagtgagtacatatcatgtgaattcttttgtaattgggttacctcactcaggatgatgcccccccccccaggtccatccatttgcctaggaatttcataaagtcattctttttaatagctgagtaccgaatggctgagaagcacctgaaagcatccttaatcatcagggaaatgcaaatcaaaacaaccctgagattccacctcacaccagtcagaatggctaagatcaaaaattcaggtgacagcagatgctggtgaggatgtggagaaagaggaacactcctccattgttggtgggattgcaagcttgtacaaccactctggaaatcagtctggtggttcctcagaaaattggacatagtactaccagaggatccagcaatacttctcctgggcatatatccagaagatgttccaactggtaagaaggacacatgctccactatgttcatagcagccttatttataatagccagaagctggaaaaaaaccggatgtccctcaacagaggaatggatacagaaaatgtggtacatttacacaatggagtactactcagctattaaaaagaatggttttggatttttaaaaaaagtgtttgtatgagattactatttcttccttgactctttggaaaaattcaccaatttggcaaatttggggtcaaagtgacctcagtgatcaattttctgtctttgtgtgtgtgtgtgtaattttccagcaaattttgattttatctaaactttcaatttattagcataaaggttttcatagtaaccatgaattgttatattagtctgtcatcatcaatactgttttgttttctttgtgtattacactgccatgtttttaaaaaggcatattctactcttgcttttggccacatagggataactggtcctggattaaccccttcagtacagacagtcagaatcctcattaagtgtcttgagaaagtagaaaataggaaactaaagaaacactagcattagtgaatgagacatggaaaccagcaaccagaacattcatacactctcaacaaagaaaagcagcgtttagagaatgtgactgcagacagtcaggtgtaggctaagaaagaagcaaaattcaaaatgctaaactttagcgtttagtagaaactttccaaaccagagaacacaggggaaaaggctcaaaaatgaacagaactgcagggctgagcctatggagctgattgttagctgtgctggcggtaggagtgcctgaaggaggcaactgaggaagttttaaagaaataattgcagaaaattctaagtttctttaagaatgtaagcctctagtcccatggagcagaaataagtgtcagctggtgcctgctccatgcctaactctctaagcctctgtgcatcaataacataggttcaaaatataaagaagactcgaaagcactgaaataaaaggcacacccacagttcagttattgttggaaaatctggtaaatgtagaggatctgaacaaaactttcaatccccaggacgtaattgatggtgacagcacatggcagatgcaaacttatgcataattatcctttttaagtgaatttagagttttgcataaagtttatgtgtgttataagcaagtctctgtaaagatgaaagacttaactttaaaaagagtatgttttctggttacatggaaaaagataacaaactgataagaaaagaaaattaaaaatctcccaaacagtaactaaaccaccaggcttaaatcaaccatggcttaatgaagaaatatcatatacagccacaaaatatatttaactacatgacaatgagaaattaatctgacaagaatatatcagaccagctaagacaatgctggagagaaatacagaattttatgtgcacatttaagcaataagtacaatttaaaattgagctataaattcagaaaaatcttaccaacccttttgttttgtaagtaaagcaatcctaagatgcatttgaagctgctcatgaccaagccgagagcgcaccctcattctgtgtgagctcgtccgagtacaacagtgctggcaaagtgaatgtctgtaaggtcaagggaccatctgcagggcaggcagaaatccatcaggagcctccccagcctcttgacccccgcacccccagatcatgaaagaaggaaaaagatagtcttcaaacagttaatgttgaagcaactagacacaaagtttacgttgcctgtttcactcatagaacataaaacaaatgaaaatgaacttcaagttgaatataaaactgggactataaaattttttattataacttttattattgagatcataatataattacaccatgcccctatttccctccctctacatcttcccaattaacacaaattattttttttaagtcatggcttattttcccatatatatatatatataactatatatatgtaatatacatgtaactatatatatcacaatatatatatatatatatatatcatgctcagtttctataatgttactcatatgtattttcttcaaagctgatcatttggtattggataaccaataagaaagactatttcttctattctcagcattccttaggtgcctgtagttctttatgttgagttgaggcttcatggtctttaccctgtccacattagcatgtctatttttgttctcattcaagttatgcttaggcactcatgttggtaagactttatgggtgtacctttacattacttggggacagaataaattccctgattctcggactcttaaaatatttttgttgtcacttctgcaatgttccctgagacataggatagaaattgttttgtagaaatattcactaggactgggctccagaactctgaattttgattggttgtagttttctgtaatgttctctgtcacaaagaaaagttgccttgatgagagatgagggctccacttatctgtgggtataagggccaatatttataatctaattagggagtatactgttttaggaacatggtgttgtgggttctcctccaagacccatggcttcattagttccagtagctggctaggtttccagtaccaggtatagtgaaactcatagagattcaccagtctctgattcctgaatcctgggattaaaagtatgcttccaccaccaggcaggtatttttaaagctccaacctgcagacactgaagcaaatacaacatattgacttatctcaccaaggctgagaattgcatttgactttcacattggagagtataatatgatgtaaggcatcatgctctctgctcctcacttctgtgtgtattttctcttaggacaatcagggtctgtctgtgttatccacaataatcccaggtccacacacttttttcttctgacctgagcatgagagaggcttttaatagtctaggaagagcattctgatgaatcaaaattctttgtgtgatcaggaggagcagcagaaagcagagaacagagtcgagtctgcagttggcaactcctgcagtggttgtgtttggatgaacaggtgggatgtgcaagatagcagtagcattcagagtgttggagagagagctaagtggctgaggacctcggtttgatctccagaacccaagtgaaagaccacacagaacaagatacaaatgccagggagacagagacaagaagatccctgggactcactggccaaccgctccataggtactgtgagctctcagttcagtgagagacactcactgtcttaaatatgtgggatcagtggaggaatacatctgatatttaccttgggcttctacatggggccccccaaacccagggatacatgtatgcccagaatcagagaattaaaaatgatttctcagaaaaacgaatatagggttctggggatgtaactcagttggtagagtacttgtctaccaggtacaaggccctcagttagatccctggcactttatatacagcacggagggttaatggtctacatagggagttctaggctaggacagcctggactatgggagatcctgcttaaaaatacaaaacaaataagcaaacaaatggaacacattagacaccccaaaataattaaattgtatccataatctaatattatttttaaaaaccaggtacatataaatctgacacagtaaaacaaatagttgataactatatacaacaggaccagcggtaactaaagtggaaatgtcattggtaggatatattttagcaatatggctacctccaggtttttttgttttgttttgtttttgtttttgtttttagtattgtaacaatgttgacttttattagatattttctttatttacatttaaatgttatcccctttcttagtttcctttcggaaaatcccctatctcctccccctgttccccaactctcctactcccattcctggtcctggcattcccctatactggggcatagagccttcacaggacccagagcctctcctcccattgatgactgactaggccattctctgctacatatacagttagagccacaagttccaccatgtggttttgtttttttgtttgtttgtttttttcgtttttgtttttgtttttttgattggtgatttagtttcaaggagctctgagggtacttgttagttcatattgatgttcctcctatggggcttcaaaccccttcagctccttgggtactttctctagctccttcattggggaccctgtgctccgtccaatggatgattgtgagcatccacttctgtttttgccaggcactggcagagccttgcaggagacagctctatcaggctcctgtcagcaagctctttttggcatctgccatagtgtctggttttgatggttgtttatgggatggatccccaagtggggcagtctctggatggttgttcctttcagtctctgctccaaactttgtctctgggtattttgttcccccttctaagaaggattctgagcttctgggctaatatcctcttatcagtgagtgcctatcatgtgtgttcttttgtgattgggttacctcactcaggatgatatcctccagattcatccatttgtctaagaatttcataaattcattgtttttaatagctgcatagtactccattgtgtaaatgtatcacattttctgtatccattcctctgttgagggacatctgggttctttccatcttctggctattataaataagggtgctatgaacataatggagcatatgttcttattacatgctggagcatcttctgggtatattcccagggctggtattgctggatcttccggtagtactatgtccaattttctgaggaaccgccaaactgatttccagagtggttgtaccagcttgcagttccaccagcaatggagtttctaacagacatttctagtacattcaaacagtgcagcatctgaggtctcctgtgcaagcggtgacagtggactaaggcctcaggctgcacatgtggctctccctcaggaaaatgaaacctttcttggaagaaatgacctgttgagttcgaagcatttttgaaagagctttgtactggttgcttagtggatggtatataagaaaggaaaagtttcagtttaaatgagatggaaaaagcaaactggagggtcagaaacactagccaagcaccatgtgtaggggactgggctgctggacaccactgactttccctgaggtaacctgtcttcttggcaccctgtccaaagagtgaatgtttgtgtctatatctgaagctcctgttagcgagtgtaaaagcacccctttcccactgctggctgctgcgatgtacaggccacagtactgatggttaaacagtgatttaaatagtctctggtaaagcaagtactgaggcacagtcaagtggtccccatctgtttgaagtcagtgatgccagagcttcctcatcctcactcctttctaactccttcggaaatggctgttaaagctctagaccaggctgtgagccctgcagtcccctgtagtatgtccttcctttccggtgttgaccctacagtggcaatgctttgatgaccaggcgagaggtagatcatctggtttgggaatgatccccaaactcatgttttatgtgctaggagccttggccagaagatgagagaggtagatggcttttgcctgctcatatagaacagtgtgactttcatgaatgtatgctcagtgccagttgtcagggatgcctaagaaaaactctggtagataaaaatagtacctggagaaaagattgcccctaacacgaagatgcttacatgtgagcctggcagggcttagaagtgcagcctctgtttccttatgaacatcccagagtcttgcatctaatcgttctaacaacatttccaacaccttgatttcttcccccacatggtgcctcctgcaaacacaccccctcactcacagcatattgttcagtaaagtggctgtggaattaacatttttcctggaaggactatatctgatttaatgaccaaatcattttaaggcagcacaacagaattttacagaaacgaaatctctcccttcacacggatcatgcgtgttttactcgagtattgagtcattagcatgtttataatggttctaatttagcacaacattttctgaattttatccttgagtcatttacaaattgttcttattgagtaaacaaagggaacagattgcattttatacttagcaatttatctgaaagaagaggggagggttaattgttttaaagttttggtctgtttggggaagtgagcctgctttctcattgctaggcatacttgcctttcttctcatctttttggatggagggtatgctgtggaggaggaaaatgaagacaaggagtagaccaaggttggccactcccacaggggagtgtggagcacaagggggctggcacgagattatcccaaacagttggtgcattccttaatgatcaagtgcttgacaagtccagtccttcctggcagagcatctgtgttgatgtttataccgctgtcctgctgtatgggaaaggcatgctttctctgctgtgcctaaaaataggatagcattgtatgagatagtttaagatagcagaaacatttaagaggttaaaggtttgactttcagatcagaaaagctcagtgatatagtgtgcactgctctttccaaactagattttctgtggagttgctggccctggcgatctgcacactgggttagagaagttatttctaggtttgtttggttcagtctcaaaaacacactctgtgggcttttctgtcagctccctgcatgaagagcttgcttgaaaacagactctatttataccccttgttcttatttggaaagtcagttgtttcattttgtgtgtgtgtgtgtatgtgtgtgtgtgtgtgtgtgtgtgtgtgtgtgtgtgtgtgtgtgtgtgtatgtgtgtgnnnnnnnnnnnnnnnnnnnnataaggacagtcatcatggagaattgctttgtatgttatagtgacttcagaataaaactggcacattttagggtctaattatttttagtgagcttggagggttttaattaaaatttaagagtgctcttcaagctctccaagctccaattttatcccttgtattgtggagcgcttgccactgtgtggaaagatgtacagtagctgatgactgcatctgaatgtcccccagtgaaagcacttggggccaccgaggggcaaggaaacatacagtgtcaggtttgactggaaattaaagtcattgggcacttcagataagtatcagtatttggggatatagagaaaagtgactgcatttgaaataggtgattctgatggtaaaacgaagggatgcctttacaacggtcttaagcaccataaagcacacattccttctaatgtgtacacaggaactgaggcatttgcttcttcactggaatatttgaacgatattttctgtctcatgtttgcgatattctaacactctgattttcagtgtcacatggaaatgaaaggagtaacaaatgtttactcacagataaactgtttcaagtacatggagacattcccattattctgtctttttccttggctttaattatgatttatttagtctctgacacagaagataaacctttatcatagtactcctgaagccatatgtatatgtatatatgtgtgtgtgtgtatattgagtaattgaaaaacctttcttagaatatcagtgcacagattaaccccccttgctcttctgttattccatagtgtgttattagccagtacattagcacaccatggtgagtcacatcctttactcagcccaacgcctcactttctaagaagtagaaccatagtttgcaatctgttttacagtgtattttaaataaataagtcctgaattgtatctttcttttgttagcaaaagtttagaatatgtttcctgaaagataaaaacttgaatttgaaaaaaataagcaagcaaacaaaatacccaaactcacccgctaaccagcctagcaacagctacataacccagtctagagatatggaatctctacatctttgcttcaaatggagaatagcaaaaatcagatttctatcattcataaattaataggcaaaataatctgaggtcccgggtttcactgagaaagtgttggggaggatggaatagcctctggtgatgcgctacacaatgtcagggcactgtaagttatacctggttttacttatgtgtttacttatggggctactgtgtaccatgcatagtattatgatccttccagtattgaagagtcatttggttgtgtagctgcagacagctcagtcacagaagtttgaacagccaaacttagataatgaaatttactgtcactgtctccttgagtggagagttgttttcaggttatcaaataaaacatatttgttccatgacagagagttgttttcagattaatcagataaaacgcatttgatccatgatagaaccctaaactatttaggggacgtttgttttttttccccatttagaatcactgtgactgttttattgaagacactgtcttgctctttctgtgtggagtgtaaggtctcatttatgtagtttttcctctttgatctctgaagttgtgctaaatcatgatgggataaggtctgctctgaccagctgcctgctgctgctgtgctggaaggctgttgtagaatggaaagggagccttacacttaacctgcatccctacccagatattgagtgcattagtatgatccatgggactgggacctttgacaataaacttgtcataggtaactttgaacctgttatatgtttcctcatctctgatccgagagcccccaggacagagtggctgggtgacagccagctcctggcccgtcacattcatttcacttgctttaccctacagcaccaatgtggttcttgagggtctggcagtcagatgagcagccaagagacactattcatttcaagccctagaagtaagatcaaaggatgatgaagttgtatgaagtgactatttattagtgccctcagataaatattatctgtggttattattaaatatcttcctgtctataaatgtagacacacaaagcctgttttatcttttccttcagctttttctacttaagcaggagctggtgtagctgggtctctgtgttagcaaggatggatgttttagtagaatgtcacatgctttggatcctgtaaatgtatagctttcctgtgaagcctgctgggtttgtgtccgagcatccgttcctgttgtccatagagctgtctccatctcccatggagcttcagcgttctctcctgggatctctggggtattttgaatctatttatagaaattatagagatgctttacatcatgtgtgtgaacttgacttgactttgttaccatccttgttatactgtgtttttttctgatgggtatagcatcttaactctaacttaaccagacttttggctcctgcatctgtgctagtgagcatcagtttagtgcaatgacaaaacctacaatgataggtgaaaatgtagcaagccctagtagagtgtaaaattcaagactctattaatctgtctcactgttatctaatgttatagccatcttggtctgattggagaaacagtaaggtctggcatgcatgcctttgaagattcgctccttggctctgtaaactcagtcttaacattagaaaaaatacaggtgctgaacaaaccacatgcagcatctctgatgtgatgtggagagaaggcagggagaggtggggctctcacttaatagcccttctctgtagacagaacatggccctgtgacagcattagccctttcatggcactagatctggattccatccattccctgattgattgatctcgtcacaaacaaacgttaattgttttcagcaatactttctaatcatgtgaaggtcttctcatctcttaagcaaggatcactgccttttccaaagcttatctagcctctaaagccctttagagccatcttgacctaactgtcaatctgaaaaattcaaggcggatttggaagctaaagggggaaaaatcctgaaagagaaaatgctgaaaagataggtgctgatatgggggagaaaaagcatttggaactggaggaaccattttaaatataatttgaaaagaatgttatcagaattttgacacttggaatgctaaagtttaatgggagttttaaaatctgcattccctggaaccatggtctatttgttaagagctgagccttggaaaggtacacgcagacagtgctaagcaggaggcttgcttgtgagtccatctgtcctgaaaagaaaacaacacacccagaagaaaagagattgttagcactgtgttctcatgtttggactcctgtgatatcgtgaatctttataaatgcatatggtgcttactccctgtaatctagagcattattttaaagtgcagaaggtggacagtatttaaacagctcctttctttaataaacatatatattagtttttgtataaaagttttagaagatttcaccatgagggtgcaaagagcatcttaattttatttacttgcctgatttttagtttttcaaagtggaatttcttttttatgtgctagtggttacaggtcagttggcttcttctctcttaacaatttatcgttgtttcttgcacagcatataaattttacttaactttttaaaaaaattgcctgggctaaaagaaatattatctaaatttaaagccacagagaagagcctttgttctgtcttaccagtctgataaatgataaacattgattaatattgctagaattaggctgctaagcatggattagggaacactatcatcctggggcaatagtttaccttagctatggggttttattatagagtgatggcggaattaaagcaacagcagcggaaacagcatttgtttgtttcccaaggagccagttgctcaggcagctcaccctctgggtccatagcacacatctttaatacttgcttttgtattttaatagattcctcctgcatggaaaaactactttcaaaagattggaaggaaaaaatggaaagactaaatacgagtgaacttcttggagaaatcaaaggtaaaatataaaaattatcgaatgtgttcagttattggttcacatacttcatgcagctgctggtctttgtgccaggaccctaaattctcatttctaaattactaaagggtaaagaaatctactcttctttccatggaagaatggatgtgacacatccctgaatgtcttctctgtaaagtgtgctctatggatatcttctgcccccagtgtcagtgtacaaactaccttgtggatctacttgacaaagatgatggagaggaagttttgtcaaacaatgaactgtttaaaataacgtttgttctcttaggatcatagtactagcacagtttatagattgaaattatgtgatttcttttttccccctgcaaattggctctctataaaatcccccaaaaagcagatagaaaacgccccgcatcacaacttatgggtaattttggagacctatttaccttgcttcccatcctgtctatatcactttatgtctgagtagttttggctaaacactggagtttcctacatctctttctccatggaggtgatatgggcaactactttatatgagagagagagagagagagagagagagagagagagagagagagagagagagagagagattacacagattacacaagtaaaggtctagcaactgtgtcacttggcactgagagaatctgggggtgtgtgggttacagtgatggttactgttcatatgcctataggactgggaattgattcatagcaaagagagttctgggatttatcatttcctgcccttggaatcctaaagtacctttgttttctaatttacttacttttgtggttctgggaacagaactagacaggaaccagacaatgtgctcggaagcctcataggttcaccccctgcctgtaggtcatccttctaaatattgagaaattaaggagtacagtgtatttcatcattgctaacctgtgagcaaaatgtctgtgcatctggactaatccagctcttgtgtggacacttttctggaggagaagtgttattttcttatacttctctgtctcaagaggaagccagagccccctataaataccatcagtcattgctcacaaactcaaatcctctttttgcaggaacacttcagggacttgatcacattagatctctggatttatcaaacatttttgggtcatatagctcagttaagacaaccatttggtagcagatacttcatgaaaatgctatttttaatttattggagaaagttgatagagctcttgttccattcaacttaatgcaaagaacagttgttcttcccaaagagtaattaatagctcattccattaactaacacagtgtcaaaaatcaagtggaaatggaatattattttcaattttacttcttctgctttgtactcataaagaccatttgctattttggaaaaaacagaatctcaacataactggtgggtagaaagaaaagtcattatgacatattctccatccagctgcaataacacggctgtgtgacttcacacgtcattttgtgttttcttctctttccagagccattggctttataacagtgaggacagaaatggcttatgcaaaggcaagcgtttgccaacatgagtgatgggggtcttgctttctcccacagcacggaagctaacattttattatctccgtgctaacacactttggctttttatacacttcagggtgtctatcctctcatacctttcacttttatttatatttaattctaattatgagtttaaaaattcaaaaataagcaaaagtttcagatgctcaaaatgtgtaattctcaaaagtgaaacatacagaatcaagattttctatgctgcttctctggaggcccataacttccaggggtgagtctttctgaatttatagacataaatgataatattctttctgaatttatagacataaatgataatattctttctgaatttatagacataaatgataatattctttctgaatttatagacataaatgataatattctttctgaattttctgtttaacttgttctacattttccttttaatacattttagcattttgtcaccacaaacatcacatacagaaaatatatcaatcatacactaattagacattaaaaaccttagtaaagtggtaattccaacagtttggtttaaccgatgctgagagaacacactctttttgtcctaagtgacttggccaactgtgtttctgtgctcagggcatttctctgagggtttaaaggtgatctaccctttaaggatttgttgtgggttttcagtagctccaatcttaagcattgtgtgtcagtggctcctattttctcctgattccaaaattcatacatatctatctgtaagaaatagcatacaacacacaataaaaacaaaagtattctttaattctgcataaatctcgtggcacaggctttctgtttacctttcatctataccctgagttttgtataaagttagtgtctccccacttctgagatgttccttctatttcctgcaggttttcatttggatagtctttaaaaatcagcagcagcagcataaagtgagattgccttgtgtcaaccaagccattttactcaacaccaaactgcccatttccctctaaaggacttgtcttatgcttgctggctgtcagaacttgagaccccttgggtatatttaatagtgtcatatcctggcacatacatgcctgccttctttcccctttaaatgtttgaatctgttgaggtttgtttgggtagatgtctcctactcttgagattagatactattctgccatattttctcccaattagttggttctatgttgaaacatttaaccttatcttctctctctcttccttccctcctgaatatatttagatgtataatgtcaactaaagttatagtgttttttttaaataacattatacattatgactgaatgttgtgatcactcttcacttggaatagtatcttttcttacactttattatacatttgaaaccatttatatatatatatatatatatatatatatatatatatatatatatatatatttactagtgccttagtaataaatatagaatatttcatatttactataacttttatcaaaggtattgtcacactttaaaaagtttatcttggattgttttatatcagtgtgttaacattaaaaatgttttaaaattgcatttatataaaactattagatgaacagacatctttataaagtcatacatttttttattgggaacaatttattcaatttttctttgaagatttattaattcgtgtgtgtgtgtgtgtgtgtgtgtgtgtgatgtattgcttaaatgtatgtgcatgcagtacccaccaaggccagaagaggtcactagattccctgtaactggagttaaacacagttgtgaaccaccctgagggtgctgggaatagaactcagatcacctactgtcatgcacttaaccactgggctttctctccacttccttattttggttttaattctgtacatttccttatccttcaatattatttttcttctgtaactgtatttagagattatactaagttttgcaaatcagttttactgattcactgtataatttcccttttacatattttatgtatcaattttttgggtttttttttgttgtttattggtttttctattaatttattttttacagtccatattttattcccctcccccaatccaccctctgacttcagagttcagcatcccatannnnnnnnnnnnnnnnnnnnttcagcatcccatacctcctctccccccaaccccccctccccgtctccatgtggatttttattgagattactgagtctaaccatgcagcagctgaacggcctttgtttcatcacttcacatcatatcacctagattgctaagagcagtataaagcaatagagacaggagcagaactgttgacatcgtttttaatttatagtgttggttttagtattttacactttgtgttggcataagctacttttaaaaataccatctcatgtaccccaggctggcttggctgttataaccaagaatgactctgaatccttgctttccctggcacatcccaccatgcctatgccagttattttttcattaaaatacagtttgccattgaaaatatagttctttatcattaaaaatggtggcacatgcctttaatcccagcacttgggaggcagaggcaggtggatttctgagttcaaagccagcctggtctacagagtgagttccaggacagccagggctacgcagagaaaccctgtctcgaaaaaccaatctatctatctatctatctatctatctatctatctatctatacacacatatatatatatataaataagttttagttctagcatcttagatggctctaaggaattgtgttgtgtttacggcacactttgctggtttcgggatttgagttcattatgaaataaacccaggttaattgtgggatagtcatctttgaatgtcctacagggtgtatctcttataaattgcattgatttgtatttatctgtaatttatttttttaattcttttttattagatattttctttatttacacttcgaatgttatcccctttccaagtttcctctctattccctcccccctccccctgctcacccactcctaattcctggcattggcattcctctatactggggcatataaccttcacaggacaaagggtttctcctcccattgatgacagactaggccatcctctgctacatatacctctagagccatgagtcccaaccatatgtactctttggttagtggtttagtcccagggagctctgggggtactggttagttcatattgtttttcctcctttagggctgtaaaccccttcagctccttgggtactttctctagctccttcattggtgaccctgtgctccatccaatggatgactgtgagcatccactttgtatttgtcaggcactggcaaagcctttcaggcttctgtcagcaagctcttgttggcatccacaatagtctctctctctctctctgtctctctgttgtctctttctctgtctctctctgtctctctgtctctctctctatctatatgtgtgtgtgtgtatatatatatatgtatacacatatacatatatacaataacttccagaattcaaagtagaactggcctttcctttctagattatgtaataaaagtagaaaatatttatgtatatatgtatatatatataatatcttgaaattctgagcaatatattctgaaaacacaaaagcataaaaacattttttactttttaaggtaggtcattgttttcatgaaatactttttctgaaatcatatagtctgtgagattgtttcgatgttattgttgattgaacctgtcgtactcagcctttcaccttctttgtatttcttgttatatatctaattcttacttttgcaaatttgtttttcctcctgtctctcacttctcttggcagcagtttttctactacttagccacttaccctaaagatgcagctttcggagttatgtgttgatgctgccccttttcagcctgcctgggaaataaccaccttgcctttgttggtactgcttctttagtcttgatttgcttcctactttttgcttgtttgtttttatgtactctaactttccacattaaatgcttcatttaaaacttttaaacttaatattaaaggcacttggttatgagtatgtttctagaaatagcattatgtaactctgtatggttttagaatttttgtcattttatgatgatttaataattacatcattcactaactaatttaagttgatttatattccgtaagcttatatttcattttaaagtcatgtagtgtaacaaagttactataaggagggaatagccaccatcaatcttagtggaatattctagaaatatatagtggaaaaaagtggggccatagaatgcttaagagaagactgaaagatgagtcttcaatccagagaccttaatattcctatacaattaagacacaatgtttttttaagttctcactgtaaacactttgcttcatgtaatgctgtccaaatgaagaacagcgaagctgctaaaacccatgggtagcagccaaactactgcaaaagtttatacgacaatgggtcaaagttgtcaatgagtctgtgtcatgtctagtatttttattgcttgtttaaaggtttattttattagtttaaaagcatttatttattgattgattgttaattgttgttctgcctccgtgtatacctgtatgagggtgtcagattccctggaaatagaattacagttgtgaactgtcatccgggtgcttggaattgaacttagttcttttagaaaagcagccagtgctctttattgctgcgccatctttctaggacttatttcactattttacataatatgtatgcatgtgcctgagtgtggacatgagcacagaaacacaggtgcccaaggaagcttgaggtgtcagatccccttgagttggagttacagttggttgggagtaggtagatgtgggtgctgggaaccaaacaccacatctgcaagagcagcaagtgttcttaaaaccactgagccatctctccagccactgtttttattgtttatatttaaggcatatagtaatatgcttatattacactacgttctgaatggttggttgcagccaaaataggaacatcacctcaaagagttctgtttttctcagtgtggtacctaaagtatctcttagcatcctttaacttcaccaagggaaaccccacagcatcatgcacagccacatttcctcagatctcctcttttcctgcagtcaaattacttaggttagaatgtggtaacagtaacttgcaggagattagtagcagtaatctcatggtgagagcccaaacatttgttatgaagagtagttagagacaagcaggagggattggcctggcacatgctaccttatttgaagttgttgggcagaagagcagatgtctgttttgtgctgttttagggagctgagataacagggaacttgttcttaaaagcacaaaacatcatctcatgaagtcatagtatctaatagagttgaattgcgtgtgttagcagagggcacctgaaatatagcacatcaaagggaacattgtaagaatgtgagattctttactgtccacaaaatagaatataaaaatacctaaaactgtgagcactggctcatgagactgaggcagaaggatttccatgagatctagcctggaccatatggtgagtttcaggctagttctcctatctaaaaaacaaacaaacaaacaaacaaacaagtcgaagtcaggtgtaatagtttgtgcctttaatctcagcacttagaaggaaggcagagacagggagatctctcttggaggccagcctggtctctacagtgaattccaggagagccaggactgcaaaaaacaaacataaacaaacaaaaaaccaaacaagcaaaataaaacaaaacaagacaagacaaaatcttctaggtatggtggctctcttttgatcctaggcagaggcaaataagtctttatgaatttgagactagcctgaggtacaagtttccaggcctgccagggcttcattgtgagcttctgtctcaaaacatcaaatgaaccaaacaaacagaaaataaaaaagaatctaaaatattttatgatattaaactaataagaaattatacctattcttaaaactgagtaaaacagaacagaaagttagctgttgaaagtgttgcacaaagctgtagaggtctcagacgtctctgcttgaacaatggagtggttttaagttttctgaagccttaacactgttagagtggttggacttggctcctggcctcccccacagcgcacacagtagttttacatttctacttttgatcatgaggcaggacacaggcagcactatacaatccttattgccatctgtacttaaatgactgagagagaggagtggagactaagtgataagaagacagagtacaagactgatatgtggtggggttcaagttgtgctgagtgtgtgtggattctaggatagctgtggtttgacacatttctgaatgcagctgtgtccccgagccatgcctgcaacatgaggatctgtgtcttattgctacgcagaggctcggcatcttcagttataggaaaggttttgagcctccttcacacgtcttcccctggatgtggtggctggcatctcctgcgtggtgtgaaggtgcctctttgggcactgtgccagctaaacagtgttgttggttgcctaagttagtacaaactgtgcttgtgtttgtcaaacacgcggataacaagagacacgcaaagacaatgtgcagtgaaggagaagaggaagtgaatgactcctttctagtgtcattaaggattatgtgttttgctatctacatttaggtataagatagatgcccttgaggtatagcctccttacagcttagaaaaacaaagattgtttgtttgttttttcatgatggaaaactgactgagactacgttttccagggggaatttctgcgaaaggttgcagtgttttcagagctattactgaagtactgtcatgcacagtgtttactgctgtgtttgaggttctggtttggccttcatcgacgttggttcttaccatgtgcaccgaggagcagagaggctgcacttgttcttccccagcgttctttctagagatgtaaaggcaggaactatatgtgcttatggcaaatacaaaagtgacaacatcaacttaagctgggtatggaggttgggcctgtaatcctaaacccaggaggctgaggcagaaggattttaggcttgaggcccccttggattacgttgtgagttcaaggtgaatctggactacatggtgaggctctgtctctaaaaccaatgagagagcacacaaagaaaatacagcaggaaccaagaaggaccttcattctaacacttttgtgaaatacttctgagtgtctggtttcatctcagctttgattgccagcaggaatcctcagaggaaaggacaggcatgtggagagtcatggttaatttcagggcatgatgggtcctaaaggtcaaatagggcagaatgttctagaagtagcttaggcagggttgttatctccaggtcagaatggatcttccagttcctgcagaatcagtgttctataccaattgctgacctccatgcccatggactcctacttggtttagtctcataaggacctaaaccacagtgcaggtgcttgctccccacctgtcttcctcttccccctcccctgaatgctctgttctagaaggcatggtgcccactgttttctgctttacgcaattacagtacttaactgcctgagcaggaactatgattgtataccttgaatatttgtttataaatgagattttcttgtatttctactcataaatttgtgataatttcttcttcctttggagagacttctaaaaatcagaaacagatcttggagatatggctagtggcttaagagcactttgtgctcttgcagggaactcaggttcaatttccagcatacagatgttgacttacaactgcctgtaactccagttccaggacacctgatatccttttaaggcctctgcagataccaaacatgcatacagtatatatgtatatatgtgtatacatatgtatttatttttactatttatttattttcatgtgtattccatacacatgaaaataaataaattctaaaaatcccaaatggaacagaaatgtctatgggtgaatcttttgctgctttatcaataaaatcagcaaagttcattcatttggtgatttttaaaaatgtgttcaaataatagtgtgccagtgtttcttaagatttaatgtattttaaacttctaagttgaatattttttaatgccctgagttgtaattcagggacattgtcttcttacctccttcttttatgaaatgatgcagttgacggacagccagtgccttttgtacatgttcctatagagtagaacttcagattcacattgagaatcacagacactcaaaaaagttagagctggaggcttttttttctgttacacagtccaacttgtttttctccagataagtccagaaagcttgtgctctaaaccacatggtaaattactaaggtagaaacttaatatttggttccaaataacatgtttagccaatttcacatagtcttttggatgtcttgtaatcaatagcgagtaattacgggagaactcctggattcctttagccagcagcaaatacatgaagcagcccctctgaacacatccatgcatttggatccagcagcacccacggtttctaattacaccgctttgcatgagtgtagacatctcagagctctcctttgtactctctgctataaacatcttttgcttcttttgaagtctgtgtgatatacatgcaagcaattaaacaccccccctccactggaggttggagacacaaggtcttcttaattaaaattctaacaaaagctaccagcaaaaattcctactatatgattaaggtctaaagtattatgatacattagactcattgttaactgtcaggattaaaagaaatcgatatgttggggtaagatcagctgaatctaattagtgaaatcaatgtttatataaaagaaaatactaaagtttaataacaggttctgcttataaatataacactggctaaaattgttctttgttgttactgcattgaccacataatcatattttaaattcactgaataagaatcggaaacttctttcttgtagttaattattataattaaaacacaaaactttaaaatcatatctgatttcaaaagttttaattatgaaagattcttaaatgtaaaaatagtctccaattataaaatattcccagtgattccatttttaaaaggctaattttagcaagagctatgtaccagagtcagaaaggaggcaaacttgggtagaagtaaaggaactaaagtattcttatgcaattatgattacattaatatgcattagtccatcagtgatatagcaaaattaaagggatacattttgatataacatgaaaacaacacatcgtacttttccttcctgattgctgtaatggaaataaacatcccaaccagtatggagaagaaaaactttactaattgcagcctagattttcagtcaaatggaggtcattagcaatttcctggaagcccctcagattgcttaccaggaaatggtggctagcgggacctctgtcgttctcctggtgggattagtgaaaactggagtttttaatgatgtgtgtcagatgtaggctgatggggggtggggtggggtcgagttctctaccacagtaggtaatattctttgaacagaaacattttttaaaatttcatattaatatacaaacctgtaaatgaacatagccattaacatgcataaatctacccatactttaatacatgcctgtagcgagtagggctcagtgatggggatgttgtaaagagagggatctgtatgtggtgtggtgcttactgaaagaggctgctctcggaggctggcatggtgattttacaacactgttgggtggaaagttcagcctcatctttccacctccataaaagagaaaaattgagtgtgaaacaccttccaagacactaacccaagtctgacttgtcttgagtccacagagtccatcagccactgagagacttgcggctcagcattcctcatgatatgaatgagtggctggcttcaagtgggctagaatggctgaaacgtttaatagtgacataagcagaggtgagagtacgtattcattcattcatacagtaaattatacagaaaggaagtttctggttggtttccagtggtgacaggaagaagacctcttgtatcaccagagatcttatagaaaatgagccagcatgtgtaagcctgagagggagacctcttaggctaagaaattgacaataccatacacatctgtcaagtttacagtgcagagtacgttgttaatgtttgtgcaacccaaaatcaagctattgctaattaaaattaattaatttcaaataagttagacctggcaatattaacccagcttcatttccatcttgttataattacagtttagttattaaagacctcccaagccttttgtaggattattaaacagttgtgtttaagcaaggtcaaaatgtcttattaaaaaacttaagtgatttcccatgtaatttttgttctttttgttaaaatgggatgctcacatttaatatttctgatacatagctgatataaggtattttgtatattgtttttgttttgttgttcttgtttgtttgtacaaaatattactctgtagctcaggctagcctagaactcatggcagcctttctgccttagactcctgagtgctgagattattgttgtaagccacttctcctgacttggcttaatttgttttgaaaataactgtggtagatacaatttactatgtatacatttacctcagcacttatacagagattttagtaaatgcaaactagagaaaaacattttaaaatatactaacactcattttctgtgtctcacctcagatcctttcatttgaataaattatagagatttaaaatatacattggtggaaatatttatccataagtaattcttggaagaaaaaattgtaggatgctcctagtcttctgtctgttggaccccaccaatgcctgtgtttagcacagcagacgcagtttaccacctaggtattcccttccttagagtcagctcttgagctcactctcagggtcatggctgcatcacagaggaactgctgcatggctctggacctcccacagtcctagagtttacatcatttttctggattgaaaaagcaaagcaaaacaaaaactaggcatggaatttttatcccaatgctgttcttatggaaaaggcctatggagtgaacataacttatacattattctgtatattttaaatttgttaccactgttggtaattaccactgagtgcatatttaatgcactggggaaatttgatgcaattattcatttgtgattctccttcaattcaaatgtctacattaaactattgaaaaataaaactctggagagtttaggtcacttttaaaaatccactgactttctgaactctggtggtaaacatctgttgcattaaccaagatgaaattagcatagagactatactgtaaagaatacagtttccaagtttagtaacataaaataaaacccctctttgaatacgaccttgaagagagtagacagtcagccacaccacctgcctgcggggtcagtgggagacactaggactgagtgcacattttagctactttaacttgagagaaattattttcccttgagcctcttttcagcactttggcattgattacacccagaaatggactaaatagtccagcacaagttggtagctcttaggaaatccgttcaaaatgactgaaactgcagagaaaaggcacacatctgactctcttcacgatttccagactgttttaaatcgcagagaatttgggtactgaaaaagacctcttctgctgaaagggtctgagaataagaaaggggccagaggggcagagttcccgctgacccacgctttatttctcctttgatcataagctggaaggaaaggacttgtttcacagaaatagctcaacatcatttagatggtatggccaggagaggaagtgaggcagatgaaggcagggtttgatgcggaggtgggattccacaggtattggctcagtagcccagccagtgttttctcgaagctatttgttctgtgtgcctttatggtattcttaaatctctctccatagaagagattggatctaaatgagatccatccatgcttttaaaaatgggtttcttgacgtaataacaagagatttgtgttcttgcagttaaagcaaagtttcattcctgttcacatttgtttaaccagattcccgtcacaacaggtgcacaattatttttatgagtaaaatattatcagccttcaaaattagccagggcaaaatgcaagttgtctgattaaataatcaaaggtgatacttaaaatacatttgatttccacaggaattttaaaatggtaagctccatctcttactctgaagttcagagggaattacaattgttgctagtatgtaagtagtacctgtaactagtctgatgtgctttgtgaaagtcattggtgttatggggcaaactatcatcagatagtcttttcatctgtcaggaaagtggtgcatatcacagcaggtgactctttttctcttgaacattattcagcatctgatcagaaggcccaccaatctagaaaactaaaatccagtgtttgttcacttaaattcaatttgtgagatataaaattaaacatatatttcactttataaactaagtagattatagatatatcaaagttatagattaccttggtcaacagtcatgatgcctaagtggcagaatacaagaaaaaaaagccaaccctaccccaccccctcctgaatggaacagaaagcatatctgggtggcaacttcactgtggttttaaaagcactacaacagcacagctgttagaaaccaattacaggcaggtaactgtttgttttcatatctaaatctgtttgtcaatcaggagaatgcaatgaatcaggagaagggatctcaaatacaaaccacagagtaaggcggagcttctggaggaagtccaagccacaagaattagggcaggagtgcgatggaaccaaatccacacgtgcgtgcacatggctcccggctttgaccatattttccaaatccagtcagaagctgagatgattggagagaattctccattttctgttgggaatagactcattttaaggtttgttagaagcagtgtggttaccgaaagagagagattataaaagaagcctgtaggttgttattaactgagaccattttcagtcctggctcatcaagtcttaaagagagacgacgacttacttacatgttagtttgggggtgcatcaaggcacacctttggctatcttgtggacaaatagatttttactactttgactttagttcatagcaactttcagcttctgtgcttgtttctgaagagttttgttttatctggacacagtcagtgaggccacctctactgtcctgatccttggccctggtgctgaggctcacaaagagtgctttacacatgtctgtagggctgaacatggggaaacctactgagagccaaagtttaagctggtaacatcacgagagagtaaatagaagtttattaagaacgctaaagaaaacaaaatgggcatagccgtgctgtggttttgcttaaacacgggcttttggatacaccaagaaccctggatttcttttctactgcttactgaaaagagccctttgatttttttcaggcacagtttgtgccaatgagccttagcctggaagcatggtgcctgttgtttagccctcactgtgcactgtgtgtctttctgctgtggctaacaggctttaggctacccttttaagtggatgtgggaatgtattctaccaaaaggcttgttgcttgtgccaggtctctgtgtaaattcagtgtggttgtcaggaaacagggaaagagatctttgtgacctgcaggagcattctctacagactctcacctgacataccataagaagtaactgatgagccatcaatgaaagagtagagcagttaacaccatcccctttcagagtagaaagtaaaacagcaggaagcactctgaggaggcattctgcattcctgtgttccatttcatggagaaaacaggaggtgtgtaggtgtggtcacttgccttggtgcccttgtgcaggacagaggacaacttatgggagtcagttctatctttctacctcgtgggtctgtggggttgaacttgggtggtcaggctggatggcaagcaccttaatcagctgagccctcttgccaaccagagcaaaacttttcctattgaacacaagattccgagcccaaatgggatccttagaattcctgtcacccattcttctgtttttcaagaaggactgtgtttgtagagtttcagtgaacccacaaatcctcatacagtgcttattttggggtttatatgatttcatatttcctaccactcaggcaggattgtttattttatgggtatgatagctttggccgcatgtatgtctgtgcaacgcatgtgtgtagtgcctaaggaggccagaagagggtattggatcccttacaacttacaagttacagatggttgttagctgtcaagtgggagctggaaatcaaatcggggcttctgcaaatgcagcaagtactcttaaacactgagccaccgttcctgccccaagaaggcttccctttaaagacttagagcaaagagcagagaatctgacaataacaagagataagacattaattacatactgtgtcacagtgcattgtgtgttttaatctcacacaatcctcaagccagggctgtgaggtgggtatcatcacttttcttttactgaagagaaagaagggttcgggaagaaaggacagttttcttcagacaccaagaaaatgccagccatttcaaggtttgaatcaaggtctatttgctgctaagctgccatcctttctgcctgagttgcctttctagagattggcccctgctgggccacccagacactactgggtcatactttgtcatgtgattcttagctctttcaaactagaatttgaacaagtcagacagatgaacagagatgggcaagtgaaacaaaaggcaccaattactaccatcctggctatggagtcacactaggccaggatcacaataggagctatgcattcatttgttttgaaattttggaggtcatctatattattttatatctgtaatttttcattaaaaatctcatgagtgttaggttgatcctccaggtttgaggggcttagcttcccttagtgtacccttgcctttggggtctctggtttgctattaattgcagtgtagacctgcactgtctccttgcatgtatattctataggatgctctggctttctgggttctctggtctgcagctctgccatgaaggatatgtggatatgtcaaaagaacagcgatagagcacaagccacagacactctgactgctggcgaggcttctggactttttacacttctagcacaatatcatgtggacttctgtgtttactgcaaagccttatgaaccatgaacagaattctaataacagattgcactgtggttaattattaagttaaaactatgaaaggcagttagagaagattgccatctctttgcaacaacaaccctttgtggtcctgttccaaggtctcctatcgtaccaggtgctgttaattatttgttttttttttttgagtcttcatatttataatataattttcttctctctgtgaagatatattagaagtagttttaacctctttcactcagcaaaacaacaggattgctagtgccctaggaaagaccagttttggatccaagagaacagagaggatcatgtcatcaaactttctgcagcagtttccatgaagaatttcaacttggaggagaagagagagcagagtcaggcatgagtttagaggcatggatctgacaccatccatgggcctggaagtagacatagcatgtcctgttggagaaataacttagaaacctgaacttatggttaattgcagttgagtcatcctagaaccaagctaagatgcccaaggatacaagttaggagaattcggaacacagcactaagttatcttgggagccacaggatagctaatgggtgaaaatgagatcctggccacaaggtgcagggctacagggcagcatgtgtatggaatttcaactgtaaaaggaggagaagtactcactgcttatagtgtttgaatagtgtacctctgatcctgtgcttagattctccaattctggctacctactttgtatagttagaaaccaatgcttagacctatttaaaaggaaatgttttctagatctgctacccaatacagaagctactagcattatatgtccatttaatataaattcagattaatagaaagtcaccagagttaaaattttgttcctcagccacattttaagtgcttaattatgatatctggatagtgactatcatactaaccagcaaagagataaaatatctccattatctggaaagttctgtgatatagcactgttgtatagcagtgtgaacatcctcttgacagtgttgctgtatggtatgaatgtcatcagaggatgtcctagtactatcaaagtggaggtgtaagcatcctcagcaagatgcctctgtgacaatgtaccatagagatgccaagaaataatactcttcagtgaggtctctggaaatagaatttttctagaagagttctattatgtgaggctagttctgaaattggtgctcatgatgtgtattttcacaaagatgtagttcattctcaccggaatggattgaaaccagatacaatgctgtggaagtggagtagagtcattccctcacatgagtgtgtgtacttgggacacacattgacttttctaagttatctccacccatgtcagaagggaagtccattcttgcatcttaaaaaaaaaaaaaggcaaaccgtcaactagacttcatccagctaccactgtggtttttatgcatgcattgttcattatatctaattctgatttttgtgtatttaagtatgtgttagatgtaaaagtgtccaaagtaagccaggcatggtggctcacacctttaatcccagaactcgggaggcagagtcaggcggatttctgagttcgaggccagtctggtctacagagtgagttccaggacagccagggctacacagagaaaccctgtctcgaaaaacaaaaacaaaaaaaaagtgtccaaagtaaaagaaagagactaaacatgctaaggaaaacactaatgaggaagcaaagtgcatagaatattcatttttcccttcaaagtaaataaaactccaaggcagagaatgtttataggtatctactcttccctctgatctcctaaattctgccagcttgccttcttaacattgaacagagacatttttcacatggtacttcttcctctcccttgtccacgctgatgtgacatcacttatcctagatttgaggtctagaaataaaataagtccagtcagccaagcccagcactatcctgaagagattttaaacaatgaggttgtcgttattaaaaataacttctgggaaaaaaacccgtaaaattcatttgctcaaagtactgcattttgtctttggtgaaaattcttgacagacctgaatattaggatcatggaaccagaataaaggtggccaacatctcttgctaggtgcaaactggctcaacataaaatagacacttcatagaaagagttgtctaaagaagaacagattaaagcaccagacagacactgctccctgtcacttaggccaacagtcagggtaggaaggaagcgcttgcaggacagtaagctgctctcagcacagttgttttgcacctagcaaaactgagaacatttctgtgttggtaaatttctatgctgaagaaactcctgtagacacaggagaatgttcttctagtgtagcttttaatagcaatcaagccatcgacacagggaaagggctacagaaaccaacaggcacaagtttggaaacattaaatgaaaactgcaaaattacatatctgctatataatttctataaaatgaaaacataaaacaaccctgtagatgtcttatataaactcatgtggctacagtatgaaatgggttgaactgataaacatttactacacaccaaagccattaagtagtttgtgtttgttgttatcggtttaaatagaagcaggctgtgctgcaggagcagaaaaaacaaccagacaaatgtgagttgtttccacccagtagcagagctccaagcagcactcaagcccctcccctgtctgcttcacagcagctttgagagttgtctagcctcctcacactgtcccttaaaagtgtggctattgtcctcctcttgacttgcagcctcaggaagcatgaaaacacctgagggactgggttgaggagttctctttgtagaagcaagcaattctccttagtgctgtattgcagacagcactttagggacagcctgtaattcccatgccagttcattcttttatactttcatcagtgccactcatctggctgcattcttctctctatctatctatctatctatctatctatctatctatctatctatctctatctctgcctgtacacatatgtgtaggtttgggtatgtgtgcacgtgtgtgtgcacacatgtggaggctagaggaggctgtcttagaggaggctgtctgctttcctgctctactactctccactttcttcccttgagagaaggtatgtgatgaactggagagaggctggtgactcttggtcctcctgtctcctgccctcctccctgacactgcagaggttgttacaggcacataaacctggccatacctggggcttttacatggcagctaggatcccaattcatatatgtacaacaagtgcttttacccactaagctatctttccagtcccatgacaaacacttaggaagtcttatgtgctagctgttaggaatgtaaagatggctaaaatgtaggccccatctgtaaaaggccctgcatctaaaaaaaacacccaggtaacaactgattttagttcacccttctgaggatgttaaagaggaattggttaaattataatttatttttacttcaagaaaacaaaagaagagtgtattaaagaaggagagtcatttaggtttacagaatgccatcatatcttattcagtgtcccaaaccctggaaagctagagttcatatctctctctctagcacagatctggtttctgagttccaactgtatagagccagctttctgtcattcattctgatctgaaaactttgcattcggcatagataaaaaaaaagatgcccctgactttgttttctagatttaccatgcctccatctttttccagtaaatggcaactctgtcccagaaactccatcaccaccctaatccttctgagcctggttttgcaacacaagtcccagcattatggatttcagtagtgactgatttctgggttttggcaatgggagacaaggaacatgagcagaggcctggggagttggcatgtactccatctcttagctctcctgtttgacttttggggtggactttgaccttttgatgacctgacattccaggacccatcttcttgtgctctgggttagttcagactgtagccatccccagactccagtgctgtcctttgttgttgtaagttctgcccaaggagatcattgtcccaaatattatgactcatgtgagccctcttagctctttgacttcatctcctgtgactgcccttcattctttgtcatcaaatactgttttgtgatacagatatagaccacattttgttcacccggctcttctcagtgtgcatgggctatagcttctccatgtgctcatgctttcagataatatattttttgagaacacctgagcactgcatctaggttactcctgtactttcctttcccactaactccacccacttctctctactcccaagatcacagcctcttctttgttactgttgcatttgtattcacacaaccaactgagtctgtttagtgtttgctcatgtaaatgtgttcctcgggcttacctcttgggagtggacaacctgtgcagcatcttgtccttgcaagatatggacttccactccttcagcagacgcccaccacccatagccccacctatttcttcacaatgcttatttactcttaattgaagaatgtaggaaagccaaggttctagaaacacacaaataacttgttctaaactacaaagactaggaaatgtgaagctatttttaaaaaaatctatgtttttcaaaatctctcatgattgatttgtttcaaaatttatgctaaaaatccagatctgaataaatatctgttgtctatcattgattatttttttctccagagattgtggtttctgtaaacaaagcacctggttctctgcatcacacgcgtgctttctcctctagacgatgactatattttggcagtagcagaaatatttcttatttctcaattagttatgcccattattttataaagtctactccaaattaaattttaaaaagcaatttattttgctgttttaccaagaagtgaagccaacctgttactaaagtgtgggcttatgttctcccaggcatgcatcggggcactggcagaggtcagttctgtcgctttaattcatattaatacacaacactttcacccgccgttactttctcaccatcaaggcaaatgtcaatacaatgaaatgaaaaagaaaacagtaatattatgaaaacaggtttatatgtgtgctttagctatctgactttgttatatccatttcattcaaactatgattaatttcctaagaccagcctaatgggaagagcttcatactcactctagactctaatgtctaaaaggaaagccttggtataattagacattgtttcctccatgcctgcttctgtcatttgattcacatttcattgatagattatatggtatacttgggaaattcaaatctgctaaaataagtaaagtatacacattgattttaaggcaggaaaatggttagcaaagttgattaatgggaaattaaagtgaattatttaacttcatttttaaaatgtcagcaatgaagaacgtgtgatggtgaaaagaatctgccctgagtctcagtgattctgatgcccagggctcaggataaggcctgctgcaggctacctggcacataccagccctgggttcaagtcccagcagtgcacatgtgagttctgattccattcctaactctgcactagctaattaactacatgacatcagcagctcctccctccctctcttgcttttagctgctgtataaaatgtgggatttaatgatcccttgattctttccaacagtgattttatgagtctatgactggataagcatgcttttaaaaaaagactttgcaagtactttttaatagataggataggttttaaacttatctgcatctgatgaaagagtcagtatgggaagctgtggggagtattagggagtgcttttctttgcatgaagttcctttccctgtacactcaggtatatgatagcctgggtgaatagcctactggcttacagagagctacacagagatagacaaacagagaacacacccactgtgcccacagccacactcagtcttcctctgcagctctccaggctgcctctctgggacattgggggaggggggaattagtcagatggtgctttgacgctaatgaaaggtccaaaattccagatgaagaaagtgttctcagatacctgtctaaaagaatagtatgcttgggggcttaatacatgaatcagtggttaaaatgctcactgcacaagaacggagacaagagttcatattcccagaggccgtataaatgctgcacaggttttgtgtcccctcttgtaattccaacatttggaaggtggagactggtgatcccatgagcaaaatggctagacagattagttttatccatgagctctggattcatctgaagcaccctcatctgaaacacactacctcaatgagtaagatcagagagcgattgaggaaaactcctgaagtcagcctcaggcttcactcgtgcacaggaacaaatacacatggacatgtgcccccacccaagcaaattcacgaactaacattatattgaaagaaagaacaatgtgttttgaatgagaactttgatcctcctgtctatgcctcttcagcataactaccaatgtgtgtgtgtgtgtgtgtgtgtgtgtgtgtgtgtatgtgtgtatgtgtgtatgtgtgtatgtgtgtattgtgaattagaaaggcaaataggtttgagttaagagttcaaggtctggctttatattctgtgagtatagcatatgtctttcctgtatggcccatcatttgtaaattggtggagaaatccatatcaactattacagtttttttaaaatgacaaaattgtcaataatattgttttgatgtttgcaatatatgcattgtggattagctaaattcagctattattataacaaatgtgactatttttgttggtatctatgatacaaaatggtgattatagttaacaacatgagagctttcaaaacacttgccaacccttttcagtgtttgaattattattgtgtctggttgattttcatgaacaaattatccaagatagtgtcttcctttctatctcactgtattgcaagctaaagttttcacatgctctcattggcacctgttttatcattttatcagttgagtgggaagtaggactaaatgagtcgcttcatactcaaaagcacttgctgtgcattgttttaatcttggaggatttggtggcctggaaggctggctattgcagctttgatttttaatggtgagataaaggagctgataactgctgtatatttcctgaaacatcaagaaaaactttcttggtttttccctgagtgatctaagctacagtgactgttgagctgctgtgttgaaatggtggagatggggccagtggctgtcagctttgtcacctgtgctcttctttgcactcagaactgggttccgcatctgcacagatgcttgcgtttagctcaggagtgggcttaagtgttcacacatgaccataaccaccttggatagtttgcttgcccatatgtttggtttgctacaaagataattaaaacttggaagtgcttttgcctgaatccaaagtacactttgtcgtctagaatacatgtgtgagtttcttgggccagtgtttcccttgtttatctttttgccacgaagaaaaacatggctgctcaattttctacttggacttgactaaatctttcctcaaaaaagggtgtcagaaaaccaagttttttttttttccccaatgttaatggttacaatttaattgagtttttctagatgaaaaggaaaggaaaagaaacccaaggcgccaagcatgtgtttagggacatttggttgaagtgattcagccacttgctttttttatttttctagtcttcaaaattctaaattagtatatgtttgagcaatccagacttttcatttaaaagtttgatctcactgcctcttacatttcctttcttactgtgaacttcatggtatgaagcaagctctttaagccattgccccaggatctgatggaaccgcatctacaaagcctggaagaaccactgtttctctttccaagtgtatttagtagatttccttgctattctatgcttgtttgtttgttagcacaaagccttttaggcaactttgtctggtttagatccatcacttcttacaccaactgttccttgttgtgatttatacagattcctcagatgccttacgtttgagactattagaagtgtctgacaggttagagatacgaacttgaaaatataattagggctcaggcaagacagtcattctctactcatcatgtgggagttacttcttgagttggtaagacattgcatatgtagtgttgctattaatctcttagctatttacttacagaatctttggaataatattgctatatgaatattttaatgctgttatgtagaaatgggctatagggagagatgatgttataaggaatttatccgaaacccatgaactctaactcctttgacctgtaggttctaggcacacttctattaggtgccattttcactggcttatgaaagttcttgctttacacttttttatgcttgatggatcacttgactagtctctgtctttataaggaatttgactatttctttactgtgtatgcctatgggattagaatcttcaggagcaagtgtaaatatcatttatttatgtatttatactttcctcatgtacttaacatcaaacttaaagtttatatcaatataatgctataaaatatacgtatcttgataatcactatattttgcatgggcagcttcttgttatctagttcattgagtaaaactataaatctttttattctaaaaggggaaatctgtatactctgaaaatccccataatcaggaatcacttttcataggaatccaaaggttatttttgtttatgttaaattaaaattctctccaaaatccatgacaatacagaagtcgtggaattaagattatataagctggttcataagtcatatctgtctacttatgtattcacctatatatttacataatgaatttttattatacatttctacatatttgaaataaacaattgagctcacttattttataaaattccatcatccatatctcaggtttgcaaactatatggattcatgtgtgggacttagggcatttatttatcagctatggattctattttttatgtctttgatattatttagaaaatggtaccgagagtaagttataactggagtgcctccatgtccagatttaccaggtgtcctaaatctcacatgtacattattgatataatcataatggcattgatgatatgttgtccaaatgacttcacatgacagaattcctttcaacaaatagtttctgaaggtcttcccacctgaatctgttataggtgttggagagcctaagactgagcaagtcatgagacaaacaaggaccttagatggttttatatattacttttgccaaaaaattagattagataaattgtctttgtcatggaacataaaaaaataaacatcaactctgcatgacaactgagtcttttccgaatcccagcacatcattgaaacggaaagaagctgccaacaatttagggagaaatccacagatgttctgtgcatgtgtcagtgtgatgggaaattgcattgtcttcatagagtcaaagagcacttgagattgtttaaactggagacaaactgccaatactccattaattaaaattcttcttgattagtagagttggattctcaaatgggttgctaatagcatataaaagcttatgcaatgtgccagttttcttcctgcattctgtatacttccattagccaaggagattttgttcagctgattgactttctatagtttgtttaataaagtaatagatatattgattttaaaatgttaggaaacactgatatggatcgatgtctaggtctggctagatctggatcacaataaagctcattcttccaactttttaaataaaaaagaattaatttcctcatactacccgtgtttttcttttaaaactttctaactaactcctttgacagttttcccccatttctgagtaattaagaattagaacctggactctagctgcagggtgttgatacatacgccaactttattgaaaggagtgattctagagattacttattcaataatataaagccctttaagacgtttcccttaaatgcttagactatgtaattcatacagtcctcccactattgggacttctaacttaacttaaactttatagtcatagaattatttgacaaaaccgttcaagtagtttgaaattaaatttctagttataacattttttctgagtattttcaaagagttaatgtgtattcagttctctccatttatgtttatagatgttaatattataattttcctaagtataccttacctattaatattgtatttaccaataaagtatttaaaaatataaaaacatagagttacttcttgagtactatgtatcaagtcattgataactagaccttatctgtatttttcgttaaaaaacaaaacaaaacaaaacaaaaaccaagcctgtgagttcctggagaacagaccaggtaacttagagtaatgcctcaatgaagtacatccatgtgatcttggatacgttttcacattttcttcattctccattttctaaatttgttaaactatagataaaaatatgactgaccccagcacacagtagggactgggattattcttagtgctcaaaaatgcttattaacctaaaccagaactttttaaatcacctctttcctttctctgaattcagtttagtgcttcatatacagtgatacgagatggccagtaggtttgtttagttacagtggtccccagactgtgagaaagtcacataaggcacaaggattcctgggattcagagccatccgtctggcttgttaactgctgccactgcctacctccaacctttctgtgaactcctgatttagaattggtcactaagtcctttcaactttactgagccaagaagtgcttgtcagcctggcatagaatctgtttctcagagatgctggtgacacagtcgctttcattgaggacgtagcactccggtgggaagtgggaggtgtataatagccaatgatttgcttgtcccgccttgctaccaacagtccttatccgtttgtgtggcactatgatgcattcttattttctcagcagagcaggttttaaaattgggctgggagccagactgtctgtgactgtccacagctgtacttgaggtttacatgttctcaaatgccatctttagaaaactctacacttaaaattcagtttctgtaaatactctttagtaccttccaggctgttgtctctttggaatgagatgtccaccactggggaggttgtgtttttcccacacagtagttgcagtgttctattctctgtgagtttcaaatagttcctctatcttgcttctgtagtgcacactcagatattgccattatgttaaaacattagttaaaatcgcttatttttattggaagtacacttgtaaaaccaggaatattttaaagttaaaagcaagtttatgaaaaattttccaagctctctttggaatctacaaccatattaaatgatcactttaagacctcaaactggctttggaatgaatgttttattatgagaatatatagaaattattgtttataagttgaacaagcatacattagcctttagctgaattcttataggaaaaggctagagaatattctggatattttctcatattgtggtttatcatgttcaacaatgtcctgtgataggagacccctggtcacttctggatccaggtttaattgtctctctgtctctgattatacttcagttcctttattctgaatatgtgaactctgaatttctagtaagaaaaccttgaaaggtacattttcaatgtggtgtgtctctgtaaaacaatgatgaaatcaatttggtagtacttgttttaacccaaagatagtatcagtcaaagctgataatgaaaaggatatatctgtttattcatccatatttaatagtgaaataacaatggaagaaaaagcaaagttttgcaactatatgagcctttacagactcctcatctgagtttgcaatgggtgggatgcatgaatggcttgttaccaggtcagatgctcagccttgtaatcctggaaactaccagtcacatatggctacataaggacacatattttctctctcatacgtatgtaaatatggaataactacaccattgacatatattatatatgtacatattcataaacacatgtatgtgtttatgaatcaggaaaacaaaacataaattagaataaaaacgaaagtcctttaccaagaatttattcttactgtgtgacaggtgaggttggactaggtcaggagttgtccagacttaaatcaggcaaattacaaatatacctggggagtgtgtgtgtgtgtgtgtgtgtgtgtgtgtgtgtgtgtgtgtgtattatgctgacatgaatagttccaacctcagtgctacctaggagtttcacagacttggcaaggaagtttccccatgtaaccacctcctggccagtccttgtctcagtctacagaaacactgcatccagggtagtagcacacttgacacgtgacacatgcaaatatttgagaagttctcagactttcatgggtgttgtaaatattatatctggaatgtgagagaatgttggagaatgccttggcctgcataatcactgtctgggcttggaaccagcaggccatatgttgtttggggagagaagggtacgcttcaaaactaagcacggcaaggatcttctctgcaagtcaggctgctcgcttcttgaggatctctagacttgtcactcaatgtccagatctgtcttcacatcgatatcctgacaaagttcattgctgaactttttgtctatttgatttcctagtacaccttttaaacttcttttgcaagtacaaccttaaagagtagctgtatatttcttcttaaaaaccagtttctggaaccagacagctcagtggttaagaatatatactgctcttgcaggagacccaggtttagttcctagcaccacttctgggtggctcacaactgcttgtaactgtagctccaaaaccctaagtgggtatttgtactcatgtgcacatacaaacacatacacacgtgtactcatttgtactcatgtgtacatacaaacacatacacacgtgcactcatttgtactcatgtgcacatacaaacacatacacacgtgcactcatttgtactcatgtgcacatacaaacacatacacacgtgcactcatttgtactcatgtgcacatacaaacacatacacacgtgcactcatttgtactcatgtgcacatacaaacacatacacacgtgcactcatttgtactcatgtgcacatacaaacacatacacatgtgcactcatttgtactcatgtgcacatacaaacacatatacacgtgcactcatttgtactcatgtgcacatacaaacacatatacacgtgcactcatttgtactcatgtgcacatacaaacacatatacacgtgcactcatttgtattcatgtgcacatacaaacacatacacataacttttcaaaaaaatctttaaaaagataaaacctgtaaaagagctcaattgtctatttttactacttacctggccgtggtccctgatgggtccctcataacattgtttcttcacttatagatattccctgattatatttccaacctgtagagagatggtagctttaactctggacatgtgtggattagaaatgaaaagactaggattcaaatgcagtcaactgcttcgtgggttggccaagttatttatgttctcattgatctagctgttcatctgtgacataaagataacaacgctctgtttagggtaaggacacaagtgatgcttaggcaatgctgctttaatagggctgtctgtctttctcctccatttctagccgtagatatgatagactgtccaaagaaggcaagtctgcaaacctcggtgattgaaacaaaatgattcattgttctccacacaggagcagagactcccatgtttctgaaaggcagagttattatttttaatgtgtaggttatggagagatagcccttactgcccatcacacacacctagcagtactgctatggcagcttgtctcctactgaaaaagagatgtgtcaggatgtcttcacttccggacccaaaaatgattggctaataaagcacaatgggctggtgcccagctgtgaggttgggagcccagatggcagagttccatggattgttcttgctctgttaggatctgcaacatgaatagacctcagttgatccaggaaacacacttccttttacagccaggaagaagggaagctaaggagaggtgagtgtgcctggcatagacaggagactggtcttcatttaggaaggaccggggtcttcttgtctctcgtttagtagatttgaaagacatttcaattagacttctttacgttttgaaaaggaaactctcatatatttagtgggggaaaaagcctctgtctcaatccatgagacgggtttcctgtgtgttgcgcctgaggtcattcctaagagcacaattgctgcatttattaaactttttatttactgaggagtggatgggaacatatgggagccatgacaatagccgactgaggagaaaacaaagcaattccagtgttctgctgttttgaaaaaagtcattcaggatttgctcctattggttcagctgttgtaaccaaagcctgataagataatagagggctttgtgttgttggatttttttctgaaatcctttatctttatgatgtactggggcccttagagtagaaagctttttacattgctgttggattcagggctcaattatctgctggtaccttgggacaggggtcctttctcaggcagtcatcacaaagtaacttttatcaaggaatcttctggtgtgttgtgggtctccttagctcacccggtttattttttgttgactttttgatgccctattttgtgacatttaaaagaagattccatcaaaaaaggccagggctaaatgatgtactgggcttgtgaagtagcaacatcacagcccatctgatgtgtgcagggctgaagcgggagaggcagcagcttgaccaggttaccccagggcaggagggatcaaatgaggctttcttttatgattggcattgtatttttagctttcttctcaaacagtgtccattttaaaacaattagacctgacctgaaaattgactcgtaaaagcttttcttttcaactgaatttaaaatctttctggattgttggctgaggtcctggattggtgtcactttgaaatgactgttaagtgttttaatccttctaggactgatgtggaaaagtctgtcctcattggaactccactccagcggctctgcctgctctctctccatcacaccaggagcaggcatttgtagctgcagagtcttgtagtttcactgtgaccttctatcaagtctgttaaagtaactggcacaggatctaatgaaaaaggctggttagctgttgtttcatgttgtagcccctcagacttgcgttagatgcggccgcttgcccttggctttatttgacttggtaaatattactttaacaacataatccctcatttcattagaaaggaaaaacatacagggaaatgcacagaatttaatttagtgctcgctctctctctcctctccccctctcttctttctctctcctgtgtctgtctttttctatcacccaccccttggcctttcagctaccttttctctctccttccctctgacctccctccctgttctctttaagtgtctccttctgtctcccacttgactgctgtgcacatttcttattttcttctaaaaatgtagccctcaggagagtagtgttcaactttgcaactaagtgctgagggggttatctacaaagattcctgtgctctacaagtcatgggtgtggagctatttgaaaagaactgaggccagtccacacgcaaagtgcccaatcctgctgtgcatggctctgccccggagcctgcctttgcctcctagtgcccagctctctttctagtgccaccaattgtaatcatatggatttgtaggggcaaaattagctggcagattatggtgctaacttttatgaactgatgtgggggaaagaactttaaattaaccttaaatatgacttttgatttctattttaagccaaaaaaataaattaactgttccacatagattcttatatattttgtatttttccctttggtgttgagtctgaagagaggtttgtaaaagttaaaaaagaaattatcaataggttagaggggtgattctgaactgttataataaaagatggtatttgaaaacttttgatgagggaaattgccaccatatttacatttaaaaaagtgtttccttatttacacactattgacttcctattgaggctcaaaattttaactacaactggtaaagaattcagtggatcaaattcagtaaatctgaagtcactggaataaaggcccctcagggggggaaaaaaaacgtgtcaattttaaaggtctttcctaactgaagaccattttgtgatagagccaaaggttaataaaatcagtagtgaatgtagcaattttacagataagctattcacaacaagtgtagttacttgaataaaaagctaattcagttctaaaatgccacatgcagtagcagtgaatagctgcttttaggtgctttccagaggagggtaaagtacagaatcgcagcactcttctctcgccgcgtccccggccgcctgtaaatcgctgtgaatggggctgtgggctgacaggctctattaagacaaactgcctttctcatcggagagataaaataaatcaggtgtttagtcaaattaaaatacttcagctggagcaggccccggggagcactgatccaccttactaatccgagagaaactcaagacagatgtggtttggggataaagatgaccccatggaagaaaaaaggaaagaaagaaaaaagaaaggaaaagccgagctgcagctggcagctcggtctctgcagttggaggatagatacagtgttgcagttggaggatacatacagcttaccgtggaggagcaagcgtcaggcacacacaccctgtgtgtgccacacaggaaaggcaggcgcactgacttggagaaaagctgtgtactgaagctttttactggctccctttctgtggtttatgaagctacctctggctttcagtggaaggcagaagaggctattttctggcagtgcgtctgagagagtcattttaagatagtctaaagatgtcaaacagatgacgctaggcaaccgatgacctctgctggcccgctgagatggggcttatcccaggttcctatcttatttatttacttatttatttactctaagttgatttggtcaaatctcaaaacatgacttagggtaagatttcccccacatattcttaagttagttgaagaagcatcttataaccccctgcttctctaacactccctggttgtacttaggagtcctgtatgcccctttggctgcctcttctttcagccatcttgagcattctagtttctccgtaatagtggaatctcgcggttcaacgaaacatgtctgagaatgaagtaatctgggttctcaggttgtttggatcactgactcacacttgatactatttttattacagcagggtagataaatacttcatcaatttaaacagaaaaatctattagtatatgttcaaatattgatatttaaattcattgtgccaaatgtatacaatgggtatggaacagaaaagtcacctccccaacctatgcatttagagaacatacatgattgtattgtttgaatgtactactcactgatctgaacccaagagatggctacacataggatttctcattctaaaggaattttacatgtcacccagcgccacttattgtgactcatagctgtacaaactgttaattatctatgtcatccagctatcacgtactgcccatcatttagatctatttaactatcatttatcatctagctacctatcacctacaatctatatctgactagctatgtatcatttattatgtaccatctgtctacatatatgcctatcaatcacctatcaattatctatcatccatctatctatattataccttttctattacatcaatcgactataaattatctatcacctatcattggatcaattgatatatggataaactttacttaagtttaagggaaaaaaattgactttttttagtgacaatgttatatgagtacctaaaaccttaacttacaaatactactgttaccttgttttattttccttaaaaacatggctaagtccaatggaagagttttaaaatcacttttactgtttacaatccaacagtttcactgtctttatactctgtaaaatgattcatctaactggtgttttttggtaaacttaggtcacataatggagtcacccaagcttttatagatagcactgttggctcttccttgaacaagaagctgctatttacataccactccagcttctctgtttactaagcagaagaggaagaaaaataaatgaaaggttgttgaaaaggctttaaaactggagaagggaaaatttcatcttcactgaaaaatataaacataaattcaacctgtgtgtctttggtccttacccaaaacactctgagggatactttattatccaagaacaatggtaaggcagccgatgcagttttcagcaagcttcctaactcacctcatataatcaagtgtaagaagaaaattacaatgggttaaagataggacacaaaacataggcaataaaaagcgcacatttattttatgatttcagaactttccaacctgttccccacaacaccgccagagcgccgccctagcttaaactgttagtgatggtgcgttattctcagaatggagagaaggctcatcaaacctgctctatgtaggatgacattttcctgcctctttagcctctttgctttattttttattcatatttaatcacctttattcaatctctgaaacacaccaaagcccatatacccccagcgtactcatgcagagcctaagtctatattgtttgtttgtttgttttttccttctggaaagctcttgatcatccactactcacaacccttcccttatctatatttcccctgcagtggtaatgtttcatatttttctggtagttatcagaagttatttccactctttatcttgttaatgcatgttcttcttcttaaattgtgtcttttctaggtttccttccttgaacttggatccagacttgggccaacctcccttagcatacttgctttgcttgcagtttctcagtagtggtttacagtcatataatgattatttgatatagtacctggcacattgttttcatcaaaagatatttactgaattaaaaagaatgaagtcagtaaataaataagctccttagttttcctgtagccactcagtcctgtatattgtaatgaaagcatattgttttttgatctcctttggcaacatttatatttttcttatttaatatttctgggttaataacaacttcttcctcttactcctccccctcttcttcttccttctccttctccccctttttctcctctccctctttctcttcctcttcttcctcttcctcctcctcccttttctctttctcttctcttcttcctcttcctcctcttcctcctcctcctcttcttctaaccaaacctaaaagcctactgatgaaataaaaacccatttttcttctttaatgatttccaagagccattcctgatttgctgtatgtttccataatcagtgtctcctttcttgtacctcactcttactcttgtcttttaattttgattatagatatcctttcaggtcagtcagggaggcttttttttttccctgagttggttattaaaatccaaaagttttctacctgggttgcttttctgccaccatctgtcttccctttaagtaatcccatgctagcaagggctagccagcatactctgaagacacttttttccccccttgggagtcctctcagataatcggacacacagaattaagatatgtttagctccttgggtctgggtgctttcctagcaggcgtgaaggggagggcttcccagggctggaagtcttcccttccacattcacaaacatcggcactcttcatcccctttgacagctgctggcgtcttcctgaaaagctttcaaagcataggtctcttctttataatgaaaccagtgaggctccaatacagtgactgaaatccttatctaacactgtgctaaaatgctctaatttagattcacaaaaggattctgtcccctttacttaagagagctgtgcaatttgcccataaaagactgtgcagtgccattagcgcataccgtaagtgctctgcgtctttgcgttcattaagctgcacatccttgtgcaggcctttccagcctctgagcctgttttctccctttgaggagtgacaaatggcaaagggtgagggagccccccaagcaacattgttgcctttgaggacaaatctggaaaccttagcttgatctctagtacaaacccaaaacaccaccaccaccaccaccctaagacattcttacctaaggctattttaattctcttgggagaacttgtttcatggccaagagcttgacctctttcttacctctgaacttcagacagacctttgagaatagaaagcctatgaggaccacagctaggaagttccttagatagtgcttagtaagcacctaccgtttctttgctactgataatgccactaaagaaagggtagttatagactattaaaatatgtaaagtttctgcattttggtcaggactttagaactttggttttttttttaaaagtttttttaaattagcatatattagttctacataatagtatgtttgtggcaacatttttggtatatagtgcattttgatgaaacctctgattatatctgatatccccttcccactcttgtccatctccttcctcctctgaacttgtcccacaatgcccaccccatgtgctttcctatctatgtgtgttttcattctttagttttaggtaacccaatgagtttaactagggttacttccagggacacaggtaaggatacaggagctggggctccttacttgtagctacaccactgaagaaaatatctctccccacccccaccccccacagccaccattaaatacctcaggtttcttggtttgctcaaaggatgtgtgtgctgtgaaagatgttagatggtaggttagtctgctttggtttgattttagagaggggaagggatgctaggtgacaacacagtgctgggcatggtaagcacgaaccacatcacagcacaatgcacttcatggcaaatactcccagtcccagactcttgtccaagaggttctcctcctaaattgggcccctctttctctgattcctgcaagacattcctcaagcttgtgagatttcctctcatttccattttaggtacacctgagagccttgcagagaaagaacggcaactctccaccatgattacccagctgatcagcttgcgggagcagctcctggcagcccatgatgaacagaaaaagctggcagcatcgcagatcgagaaacagcggcagcaaatggaccttgctcgccaacagcaagaacaggtgaggctcacaaggagccagggaactggagatgggggcgtggagggggggcggcgccaagctcagcaagcaatcacactaattggtctacttgttggaggttttcttcagaaaataaaatcatagaaattcaagagaagaaaaaggaaagaacaaaaagagagaaagagagggagggagggagggaaagagaggagggaaacttctagtaatttagagtcttcaagggggcaaagaaatacatcctaggcagcagtacagaccagagacattgcttttggaaggtgtgatttgaaatacttaggtatagtcatccacagagtcacccagagcatactcatgctaactggggccttactgtcccctctagaaacgctttcctttaactttaaaagtgctcattcttccccaaatagcgctgcctggcttatgtttactttccaaggtaattattaatatcccatcccgtatccatgtgaaagcagtgttggtttggatggtgagttacagtctctatagtgtgcgtgaggcgaggcattgaacaaattagtacatgaatcctcaaagaacttgattgactcagaaatgagaacatagaaaaaatatcagagtttaaatgtatgtcttttagaaaatgaaccgcttttacaagtgagttttttgtataccagagtgcattaatataacaatgatcctatagcatagcctctcacgtcctagatcagacagacccaaattaatgtgcagtttttaaaattctgacattattactggaattatcttttcagttaaatgtattttacagggatatatagagcagtatatgctctgttgattttaatgagttgtgacgtctggtattttatatgcttgagtatttgcccacatgtaggaatatggactcagcccctaatggaaaataacataaaggaacactgtaaaaaatcagaagttagaatgtcatttagccatccagagatgacacagtaattaactattgacacttgtgaataagctagcacaaattaatcttgacacatttgcagacgagtgatatcttacagtgaacactttgtaattatatttcaaaatgaaaattaaatgacacttaaaactaggttgtcatgctcaatgaagcgagcatgtagctcaaccgattggcaaataaaattccgagtttgagccacatggtgcttatgtaccatacttcactgtgtcaaacccatgtgtgcagagtggatgatggtaattgcgctgtggtgtttccgatgcatttctaggcagcactttatcatttacgagggaccatcaatattagatgcctagtggtgtttcaccagtttgctaaggggaaataaatattcaaagctccatacctagagctgcaaagtgagtggtccgtttctgatttgagtggcaacaagccagagcaggctgtcctaaccttattaaatcctgttttcctatggactctaaattctgggaaaacacaatcccagttcccaaactggggttgcttaaagaccctagcattatgcttccggtacgagccagttgtccccagaagcgatggagcagcatcagaaagtctcccactattgcccttctatgctggatgacatgattgggtatttctcctgttctaggcaagggagagtgacaggaagcaggaagatgaacatggtagaggctggagtcattggcacgcagtttcacccccatagctcatcttagaatcctgggttatggaaataggtacaaagaggagatcttgagcacaacgcactatgacactaggtcctcctgggagctcttggactccccgtgcctccctgctttgcagtgtatactctggaagaaacctctttagagcctgaggctgcagtcaatgtgagctgggtagtgagtgggcacagaatgcagctgaacactgactcccatctagttaggcagcaagctccaccattttagaaaaggtattttccctaagcatgggcagcctctgctagggtttgtgttttatggctagtatttctttttgtagcccagataacctcctgagatgctgagtttgattgctgtgcaaagaaagggaatagaacacctgtatgcaaatcctgtactgggaaccagtgggtcaccctaaagggtaaattgaaattacagcacagcctatcttaaaaatgccttgtagagcacagagtgtcctccaaaaagctaaagttttttccctgtttactacgttgtttttatgtccttttgataatatttataagtctgccagggcttatgacagaaatagacctgtggcacattaggaagccttttacttgcagattttactttttatagccagactatcctcgttagacaaatgtggccaggatttttctgttttattctgtaaggatctagtttccaaagtctgtggtctccagcaagtcagtgcatattgaggagctagctttcagctagggcacagggctgtcatttgtacctctggataaagagaggcacccccactagctcagattcttcccctcctctctggtcccatggcctccttccaaagggagtctttcacactgaggtgcagtacggcatcagggagtagcaggagagatgcagaggtaatggcaaaggtacaagcatttcattttaacctaatggaactttatttctgatagatcgcaagacaacagcagcaacttctacagcagcagcacaagattaatctcctgcagcaacagatccaggtcagtgtgttttattgccctcatctgactatctgtagatgtactcctcttccaaaatggaacttaaagtgttgtaaatgaccatcttatcaacagtgccaacgtggctgttattcaaggacgatgctgtacacagttgtggtccaagaggacagccaggtgggggtcacagcatccttctctggtgtgatgtgtgagcagagtccatctgcctattctcctcaatcctgcctttttctatttgccctgatgccaccaggctgaagcctcttggtttccaaggcagcatgagatgctgttttcactgctaaaagccactttttgctctgtgttttattatgcaatagggctgcagaaagaagattgcttttatttacttgttaggaaggactggttgggtcaattctgagaagaatctgggaaaagtctgttaattaattcttttttagaaaatactaacggcagtatatttggatacagggcaaagcagacatagaaatgaacactggcttgtcttcaaggagcttacaattgagacagcaagaaagatggctctgaataattgtgacgtactttagaaaagcctttatgtatgtatgtatgtatgtatgtatgtatgtatgtatgtatgtattcattctagcagcagtatgaaaatgtgtagttcattacaggtctacaaaagggaaggtgacagtctgatttatgttgttcctttagacacttgattaactcaactaacagctgcttcagatcgatagggagaatggcttttatttctgaatagaaaactaaatatgaattctagaaagtgctggaataaagcactggttgtttggttaatcttcagaacactgactggtcccagagctatactttgccagcaacagaaatctttctcttgtttgttgtggatattttctaacccattgagatctagaccatcacagctgagccagtgtcttctgagaattatgagtgcttttccaggggttgatgtcctgccttctaatacttccaaaagcatcaatagcataagcccatagcttcttctaatgctctattgaagaattccagcgattttaacttagatctttgcttcgttttgttaacctttcttactgtgctgggcaccgtgactacattgacaattccaacagtgtctgaagaggtgcctctcctcaatttagctttttgtttcagcaacttcactgggagaacagaactggaatgttttttctggttgtgttctgattttgtattcaaacctacgtttcaaaatcaagatggaatgtcttttgcatttttgatggtcagactttacaattaaatctgggaataatttctcttcatgatatctctttcatgtctcatgctgaggtccttaattacatagctatccaggtgtccacttgtctgcccttattaaagtttccagtgtatttccttcttctgacattaagatttttagtctgtggtttcttacgtttctctggttccttttccaagaactcaggggtgttaaataacatgatcagttagttatcaatatggatactctagtaagcgtatgtgtttatgtatttctaatatagtctgctcttcagccaatgttatttatgtcaactgactatcttgattgataccttcccctgctactgaaaacctcagatacatagcagttagttcatagtattttatgaaatattatagttactgattacatatgattttattattgtaacatgaaaacatgaaattgacatgttttaagtaactgtggaacacaatcttaaaatattagcttgaatattcagtttgagaaaatagagatgggccttgagagattgctcagttggtaaaatgcttgcctgtcacataccataaaggcctcggttctgacccagaacgcatactggggtagcagagctaggtgcacttctggggcttgctggctaatcagactagcctcagtgctaagctccaagctgatgagagagagactgtcttgataaaataagacagatggcacaggagaaatagcatgcaaggttgatttctgctttctacaggtgtgtacatacatgctatgcagcctttctcatgtgtaccctctggcacgcacacacacactcagagacagagacagacagagacagagacagagacagagacagagacagagaaaaagataagcttctcttctttcaagtttactaatagaattttaactgcctaattattgggcacattttcattgtttatttattttttaatttagctaatcagcacttgaactcagaaatccaagttataaaacagcagagctgtataatgtcattgttcagtggattttacggatttaagtttctttctaacacgattctgtgctttttagaaggagagagtggctaggcttgtgcttgctgttccttctgtcctgggatccgacccatctttgtcagcacttatgggggagatctttctctctaagaatttttaaatgctgcaaacactctttgcactaaacttatttatctctcactcttacaaggcataattttgattttcaacctttcaatcagttctttgggagaggatacacgttaaagatactttctcaccagccataaacatattttatgagaaagattatagtttggttaatttcaatgacattttagggggaaaatgtgagcttaaaggctgtttcaacagttcttttttttttttcacaaagaaaacattcttccatttgaaacagaacaaacaaaccagatgattaaaaatcaaatctagcctcttaattttttttttttttcctgagactaggtctcagtgtgtagaccagattggccttgaacccagagaaatcggcttgttctgccttcctagctctggtgttaaagggcagattaatgcttttcttaaagttcccaacgactgcaaagacaatttgaaaaagtattacacttgtacccttctcacagttctagaacctgttggcacacatgttcagcaaaaattgccttcacaatcagccgtcccttattaagtagctacagtcaagacgctactctagttcactatgctgatttgtttttcaattggcaagctttagaagaaaggagaaaaatgtctacactctcttaactgcatacaaacacatctggatctattataagagcaacaaatgaaaacctcaatgatttgcccagaatgaaaaccatggtctttcattggacctagagaaagatgtgactgagatggtattgtaaaggtcctgatgagaattttatgtgcaatcatttagaacctatatgtgcagttgagagaattttccctttattttttttcctctttgaacaggcttttttttttcttcataattttgccttcggggatcctaactacattttgaaaaaaggatctctaagactgtgtaagtggagttgaaaaaaaaaatcagtgatttagtgatttttaaaatggttttagtgagctaatgcttaccattaaaaacaaaattatgatttaaaggattattaacatagcttaatattagcagatgctatttgcttgttgaactcaaagccctgtttgtgctttgggaaatggtgattcctcaaggttgttgcatattaggtggacctcctctatggaacacaggaaaagtcaggcatgattgatatttctggacagcaagaccatgggatgtaaacaaaaaggtcatagaatgtgggtctttctgctcagcgaagttgcttcttaactccaaaggaagatagtggcgtcagtcatttcaacccacgttccctacctgctgcactgtagcacctccactagtgttctaaagcatctcattcatgagtgatgtgaactggcatacagaacccacttcaaaaatatatttaatagttgctataatattttaatcaaccagtcaagataagggtatagtagatgaaaatattttataaatctagatcttattcttttatatattccttcatctactttcatttgaccatattataggtttgaatcagaaaaaccattcttcatggatataatataccatattgacatctataacctgtcattgggaatacatttaatgatggcatcttagggttgcaacttggtctttgtaaaagaatccagctcattcaaatatctttgtgaaaaaaattacttttccagaaataaatggagttatctaatgatccaagtcttttcagaccagagtttagagtcattcaagtggtctgtctttaagactgactaaagaacacactcttctgggggaaatggctgtgggggatttcctgaggcacttggctttctggacaagggaagatgttgtcgattcatgaatactaatcttcttgagtaaaactgtgaagtttggaatcattatcaattttgtgatcactatccaatatttctcacccttctctatcacttcaaacacatgttagattggaaactcaatctgtagaaatccagaaacaaatgccacactacttctttccagagcttctgtcttgctgaaagctctcccttttaactgctgtagaacatgctgtttattaaccttcccccaaaattgttattctgtttagcttcatggaagatttactcttaagagtatatgaatattttcatatgtagtgtttttctcttttggttatgatatgcccttatatgctgctggcatatgtcgtttgtgtctgcattacttgtgtggtagaacaccaataaaggtatgctctccttcttgccatgtgatacagggatacacaaatattccaacaagaaaacaatcaccttaagcaatcaaacaggatggcttcagatgtcccctgtttttcagataagctttgcttgtggcttccttcaggatgattaactatagacatttcaggtatctgctgagcagaataaaggactaccttttaatgtgaagtagtcgtctaaagatcagaaataattactttgtacattagccttcatggcctgcttgacctggttaattaattttttgctagcataaaataatagatatatatttgaagatatgctttatcgttaagtatctaattgacctctaattttaagagctggaccttccatttattgtctttccaagatggctagagcagagcacagtcacgagctggctttcactctcagcttaggttgcatctcttttctaactgtatttaggattgagaaacaaaaggcaattacactgcccctgtgttggctctagcaaatagtctggtgctgtgtgctatcgatcaggtaatggatatccttccaaaagcctcagaaagtagcaaataaatccatcgaaagcaatttgatacttctattggcattgtacatgtgtctggtagtctcttgccacgcagtgaaataaacaaagcttacaagtctaggattagcccccagcttcagcaagcccttaaaatatcttgtaattctatcttcaatcatgaattagccaagaaaaacagaccctctctcctctctatttctctgctgcatgctgttttcagttgcccacaggcaagctgtggtgatcttctttcgaagtttaaaaccaagataaaaatgcaaatctaattatttcttttctgtaatataattaacttttaaagtaatgatagatgctgtatagcctgcttcaaacattttaataatgaagtttctagattataaagaataggtaaagctgctgtaatttatgaattgcaagggccataaaagctaaaatgacaaacccttactgtggtttaaaactactcattaatcactctagattgcttagtttggaatgggtctagaaataagaaaagtatagacaagatctcatatgatgctctgaagacttagtcctctagtttcctgctttcctaacacggccttgtgtagatgctaggcaaagggaaactggagatcataagtctgtggttttcctgtgtatgaacctcccctcttttgctctggtactctctaaagtcccacagcttcttggacctgttcatctcccagatcttatccccagcttcctaaatcagagattctgaaaattcatggaagccagagagtctgttccttgcttgggattaaagtggtagaaagtcttctcttctaggcagggcatgaagctgcccagtgggtaagatgatcctagtgccatcagcaggtgacataacatggtagtgactcagtcttataagaagaaagtaactctgttggtttcttggtcctctttgcattgaaggttcagttttatataagtctttagtgaatctcattccttcctccccctgcctttctttcatatgtatgtgtcagagagaggggtttctaatatgataataatgggatatgtatatatatttttatcactgtctctttttgagataatgttacactacattgcccacactggccttgaacttgcagtgattcttctgactcaacttccaagtgctaccactaagaacatggaccaccacatgtggcctcagcttatttacttatttaattttttctaagataaatacttacttttccttttaaaaaataacactttgtttaatctgagcacctggtctctagtatccaacactttgactggttatgagagactcttcactaaaaagaagcttccctggtcacggatgagagcagcaaagatctatggatataaagaaagacttagaaagcattttgacaacatgaccaatgtaacaaaagaccgatatattccctcaccaggccaaatgaccttccttgtcaagtacttttgaccgggtttataataacagcctcagaatcaatcagaaagaagtttattacctgtaacagtcatgccaccatttctctgtcaatacatcttgcctggcccgtcagtactttagcatgcagggtccagtgctaggtcagatcattggtggcttttccaagagcctacacagtggaactttggaaggtagccagcagggacatagttttctgctcatttaaatatatatttctctgccttctgtaactaagctgtgtgttgtctccagcactaggggcccactgtttagttatggcaagcaaccaagatgataggctgtgttgttgtaggtacctggggacctgccctgactaataactcctaaggaaatatttcatgcctggcactgagtttccttttaataacccatgtcttctggaagcagccctaactaacgtagccccgcaggtaccttggttcaaactcactattttccaaggttctggttatgttctactgatgagccatttttgttttatttgtaggcagtgacacaatgttttctatgaaataaacgtatttgagagagaaaaacaactttagtagaaataaaatctttaagcaaacagtggctgagcacctgcatttggatcagtctgaaagctgttgctgatggagtttgagaagttcctgagcaagcactgcaggaaggggcggtgcgtgttctcctccactgcacatcgaggctgcctcaaggtcctcactcacggccagggaaggagagggttgcacacgttgaccacagagccaacttaaaagcaacactccttacatttcaccttttaggaattgaaaatgtcctttctttttagggagcaatagtcatcatagatgttgcctgcttccttttctagtagttttatttgataaatgctatgaactacacgtaggtctctgcttttgtatttatttattcttcattcacttgtctattaaattttactggtttataaaataaaagaccttgatgactcttacatttgaattctaagtactcagcctgcctccaccgctcataccagggtagtgcacactcttcattagtaaatggaaaaggtcgagccattgccgtggactcagtttacttcaactaagaggtaaaaagaatggactggaatcttttgtgacatagtttgagatatatctatgtttgagaatctttaggtatttgcatataaactttctggtctgcattacttttggggactttaaagtattttgggcctatcctgagggtcaataacttttcttcctgttaaaaacttttttaaaaacattttcttttggttgatgaaaatgagcagtgattgacgaagttgcatgtttatgatcctcaaccttgtttgtacctcgtcattacgtgaaagactttaacaagtactggcatctaatacccatgtgaaatatcctggtgtaattatttaattagttaggctacagtcctagcatgggcatagctaaaaatttatttgtgtataattgtagtgggtaataagaattgagaaatgttgacctttacatgataatatatattacatgcctaaatgtgaattctaggttttttagatctgctgtctgtccatctgtttttctatccaaccatccatccactctcccatccaccgactcttccactcatctatctgtctaccactcacccatccatccatccatccgtccatccatccatccatccatcaatttattcattcatactttcaataatccagagagttgagatacagcctaaaaactaaatgacttattaaaatatactttcatctttggtaatagacacttaacttaagcagactgtatctgaagcagataactgtggctagtgtttccaatagtttgacttttaatttctgcaggggtatatggggagcacaagaaactgatgataacaggtgtatgtttttaagagatggtacacttcaaaatgaaatatactcttccagaaagagacaaaacacttagaaagtgaattttcagagatcacatgacttttattattattctaaacagcttttttttttttttaaccaaccacatgaactatcccctactctgacattcttattgggcaggtagatggcttagcaggtaacagtgtttgctgaataagcataaagatctgagtttgaatcccagaacctgcattaaaagctgggtgtggtcacattcatgcttgaaaccttgctttgtaagtagtggagactggaggattttggggacttgctagtcaccagctatgttccaggttcagtgagagaccctgtctcaacaaagtaagtcacagagatgatctaaacaacctagaattcatatacatgtacatgcagctgtattcacatatgcttgtacattacaatactatactcacacatataatcatccaaatgtctgtttgtttaattaattgtgaagtggagttcttactcatgatgccctaggattctcggtatagttgaggatgacagtgaagctctgatcctcttgctttcatccactgagtgcgggaattataggtataagtcaccatgacttgcttgtttggttctgcggatcaacccagggctttgtttatgctaggcaagagctttaccaactgtactgcatccccaattcataacctgttgttttcttaaagtgttttaaaattgtaaaactgactaccttttaacatccatgaagaatgtatgaatctagggacactagaaactagattcctgtatataaaccaagcactctgggttcatgcttaggagagtagagcacaggtgttggaggtgatgaagcaggttgtagatcccagtccagttaatgattagctttgtagtctattatcccgtttactagcttccagaaaagttgctttagatctctgagccttcatttcctaattcctaaaaatggattgttatatggtaccttacataagtttttgagatcagagataattgtaaaaggccccaagtaagcccatgcctagtatctgctgccacactatcattagtacttctcctgggtgatggggtacagaaataatttcagagatactaaagggaagcagatgtgcacatatgtgagtctatgtagatacacacatgtatgttcagaacctacaaattggtgatgtgattagaagataatcattgtgtaatgctgtaatcaagtattatctccataataactataggcaaaggaaaagcaactatttcctctagctgccaaatgagagctgtttccattgtcagggagtaaggcttttcaggcgtgtaggaatagtcagctaggaattagacagtgctgcctgaagatggtgcagaagggaatggggcattttattctgggaaaccagggctcaattccttgctctcatgctaaaatagtccttgttattagatctatggtgcttgagaaattagaaggacagcaagcaaacctttccaatttattttatagcttttaaannnnnnnnnnnnnnnnnnnnacatgtatgttcagaacctacaaattggtgatgtgattagaagataatcattgtgtaatgctgtaatcaagtattatctccataataactataggcaaaggaaaagcaactatttcctctagctgccaaatgagagctgtttccattgtcagggagtaaggcttttcaggcgtgtaggaatagtcagctaggaattagacagtgctgcctgaagatggtgcagaagggaatggggcattttattctgggaaaccagggctcaattccttgctctcacgctaaaatagtccttgttattagatcgatggtgcttgagaaattagaaggacagcaagcaaacctttccaatttattttatagcttttaaaacacagatggagttgtgcagtgtggctgcacaaacacagaagaccttgtctaacaaagttgttgatgtaaatcttgcatgtgccatcacccataagtcaagcacttgcctggcttttgtgagttatgtctacacttagaatttaagaagttaaacagtatgcataccaggcttgagagataggaataaaaattgatatactgtgtggcacttgatggagcacaagggaatgtcttctgaatgctgagggatgtcctgacataaccattcttaattcacatatagtaattcccactcaaagttattagggtcagagcccaacatttttacctattcaaagtaaaagaaaataaatgattcaaaatgcataatgtctcctgccagatgctgcatccatttctctcacctccctgtccattaggaaaatgtaaaactgcatccttcaaggagggaactgtaatagtttccaaatcagaatgaaggtagagtccattttcagtcaggtttaaaacctgtttttactgatacgcacaactgtttttgactaattctcctgactttccctgggacaatggattaattccacacttgaataccctccttggctctgggaggccatgatgttcaagcctagagaagagtgactgacctgctctttatagaatgcattcccatctcagtggaggacaggaatacccaaatggagacaaaatagattcagggcaaagaagaaagacgtgctcaggacagagggcagcccagactgggattcagcacatctgtgcttggtccttgcactgctcctgctgcatgtccttcagataattctgctttcttgtgtttaaagcaaggtttctaaattatgcccctgaaattcnnnnnnnnnnnnnnnnnnnntctgctgcccactatcattagtacttctcctgggtgatggggtacagaaaataatttcagagatactaaagggaagcagatgtgcacatatgtgagtctatgtagatacacacatgtatgttcagaacctacaaattggtgatgtgattagaagataatcattgtgtaatgctgtaatcaagtattatctccataataactataggcaaaggaaaagcaactatttcctctagctgccaaatgagagctgtttccattgtcagggagtaaggcttttcaggcgtgtaggaatagtcagctaggaattagacagtgctgcctgaagatggtgcagaagggaatggggcattttattctgggaaaccagggctcaattccttgctctcatgctaaaatagtccttgttattagatctatggtgcttgagaaattagaaggacagcaagcaaacctttccaatttattttatagcttttaaaacacagatggagttgtgcagtgtggctgcacaaacacagaagaccttgtctaacaaagttgttgatgtaaatcttgcatgtgccatcacccataagtcaagcacttgcctggcttttgtgagttatgtctacacttagaatttaagaagttaaacagtatgcataccaggcttgagagataggaataaaaattgatatacttgatatacttgatatacttgatatacttgataaaaataaaaattgatacacttgatggagcacaagggaatgtcttctgaatgctgagggatgtcctgacataaccattcttaattcacatatagtaattcccactcaaagttattagggtcagagcccaacatttttacctattcaaagtaaaagaaaataaatgattcaaaatgcataatgtctcctgccagatgctgcatccatttctctcacctccctgtccattaggaaaatgtaaaactgcatccttcaaggagggaactgtaatagtttccaaatcagaatgaaggtagagtccattttcagtcaggtgacaggcttgacctttgttctctgtgtctctcagtgaaaggaatttctcttagaatgtctgcctgcagtagctgagattagtgtggtgggaggctgtcaataggttggcctgactgctgctgtaaaggctggtgggaagcaggccaggccattctgtgatggaattacatcatacacacacacacacacacacacacacagacacagacacacacgtatatgcatatgaatagatattatctatatatgaatatatgtttattgatatatattctttattcatgtataaatatgtatttgtgttagggaaaaaggtttaaaattgatgtcattttttaaaaacagtagttacttcagaaaagtgtctcaagtgaacaaaacatttcttttatactattaccactattttggtgtttctgaaattggatttggcagaagttgttcttaactgttgaagaatcagataaatataggggactaagatattaatatacttgagtgggtccagtggaggcaattggaaactgggaactttcaagaaagggcagaccccttaggtatttgttcaacaaagaatgtcttctttttcatcatgagtgtgtcagcccttccttctccttacttgtactttactgcagaccataagcttcaaacagtttataagctagggtctgggacttgaaagaatagacaaatgtggtggcaagtgtcagagcaccagtgcccaggaacaaaaaatgtcccattattttgtgatgattaatggtggctcaaggaaaagggggaaatgtatagtattccattgaattatttgtgtgctctgtgtgtgcctgccatgggaaggcaaggtagggtagaggtgctacttgctgacctgagatttgtctatggcactaatattctagcaggatgggttactgggttccacaggttagcctttagaggatccggttgctcagctcagtgccacagtgatgaaacctgcatgctccttaccacttgagaaactccagctccatgctgcctagctgcagtgccagggcagaaaccagcacttccctgctcagctttcacatcacagctgtgcttctgaagagattttctgacttaattctgattggattgttagattcactgggtttgagaggcctcacctggaccccattttaggatgagggatatccttggaactcctaagtcctaggtgatctcttgcaggagagagttcagatcatggtagcctgtagagtaggtaatctgaactctgttactcagatttgacattcatattgatgatattgttctttcccaatgagatgaatcgctgtctagggaccctgttttgtgacattctctgtatacacagtcattaagtcagatgtgtttgaatagtagacttaaaattaagcttttttttttttagtttaggattaactcttttctaagtgtttttataattaaagttaagaatttaaatgtacagtgaaaggtcttttgtattaagttaaatttattgtcgattcatgtggtggtctctcattgagtattaaaaatgacactaaagtagtttttagtgatttagataatgtttgtagtctaacattacatggacaaaaacccagaatacagtaatgcaaatacaccaagatcttataaggttacataaaaataagtttcagaagagactagaacagactacagtattgtctggttaatgttattcttctttcagaaaaggccagttgttaatctttgcatcttgtgtctgccttcatcatatgccatgcctaactcttgggattgaacacccatctgtgatttatggttgcttccacagaacttccagttcaaaacaaccaagtccaaatggcttgcaaaatatttgcaggtcaatgttttcccagggtttaaaacctgtttttactgatacgcacaactgtttttgactaattctcctgactttccctgggacaatggattaattccacacttgaataccctccttggctctgggaggccatgatgttcaagcctagagaagagtgactgacctgctctttatagaatgcattcccatctcagtggaggacaggaatacccaaatggagacaaaatagattcagggcaaagaagaaagacgtgctcaggacagagggcagcccagactgggattcagcacatctgtgcttggtccttgcactgctcctgctgcatgtccttcagataattctgctttcttgtgtttaaagcaaggtttctaaattatgcccctgaaatttctgaggagctttgattcctgggtggaagaatagatgtagggcctagagtaaagagagggtgtgggcattcttgccaggaaagnnnnnnnnnnnnnnnnnnnnattttcagtcaggtttaaaacctgtttttactgatacgcacaactgtttttgactaattctcctgactttccctgggacaatggattaattccacacttgaataccctccttggctctgggaggccatgatgttcaagcctagagaagagtgactgacctgctctttatagaatgcattcccatctcagtggaggacaggaatacccaaatggagacaaaatagattcagggcaaagaagaaagacgtgctcaggacagagggcagcccagactgggattcagcacatctgtgcttggtccttgcactgctcctgctgcatgtccttcagataattctgctttcttgtgtttaaagcaaggtttctaaattatgcccctgaaattctgaggagctttgatcctgggtggaagaatagatgtagggccttagagtaaagagagggtgtggcattcttgccaggaaagcttgaggacaaatgccaagttgactgtaccattggtcatgttcagaggaggatgctgttgtaaaccatgaaagagcttggaattgtgggatgcctccatggaacattgcaatggattgcaatgtttgccacctagatgctggctgtggggacttttagaaaactttagttaggaagaggactataaaggcctgctttcaggggacagcaaacacatcttgcagttaatgacaaattcctggcactagggatccataatggaaagcgtgactcaaacttaattttagtgttacaagtaaaatattataatttgggggaaaaattcatagctttccaaggtattaattgcaggaaatgacaacacatcccactgaagtgttccgtcagcggcatacagaatatacagagcagttctcagtctgctgatttcaccaccagttgcattttcatttagaaagagaggttaaatgattggaactttgtctaactcgggggaggggagtcagtcaatcaacaaaggggaaatttccctatatgcttcctggaagtgggtttcctgtgtagataacttggatgtgactccttacggctatttcttcatttgtagctagttatgtttcatcttctggtaccaatgaattttccaactacaatttatttattgggttgtatgatgaaaatatgagagaatttcatttctgatgtgtggtagcgcttaatatggtttttcgatttcctcccattttgtttgaagtaaatagggtaattactcactaaaattctaatatatttcagggctttagggatgaatctaaaacagaaccatataatgttctatctaagcaaatctaagttcttattagacagttcaccttaatgccattttttataaataaactttgttgtattttttcaaggattatttaattttgttgtggcactgcattctgatatctgcctgtgccacggcctgcaagatgtgattgtggttcaaacgtgaaaacaacttgttatttgaaaatggataaaccgtctggggaggatccagaattacaaatgagaaggactctgatgtactaccacttcattctttcctttctgctgagacatgggtatagtttatctgttcttgcataaggcatttgtgcccattgaacaactgacagctacctaagtaaataggaatgaagcttattataacaatgattcttgggaagctcctgccatgctggtctcatggtttgtttatggtccccattaactgtagggctttgtcagatatccactggctagatctggttttacttagcagactcaggcctgcttttctccccctgctgcttaagggacagtccttgtgctaccaggctcttatggctcctgagttcagggcaccttaagaattgaagctggcagccctgcaactctgcattttctgggaatattaacaccattgtagcagagccttggcatgtttgctctctctaaatgcagcacagtcaggtgaaacgagcaatttacttttaaatggagtagtcattttaataagtatgaacacatattcatttcactctagcctgtctcttcactgctttaaaaactgaaaactcttaaagcatggttggtgctctacctccacagccttatcatcaggtaaagtagtaagtggggttgggtgagaggcaatactctgaagattgcttcatcagtatctttccccagaggaatgttgtatatcctgggaaataagaatatgggaaggtatttaggcttctaagaaggctgttgcactttcctggtgcaaagagcctgcagtaagcagtccttgcatgctctgccttgagaatgctttgcccttctatccagaggggtgaggtattgaatttgaataggatggcaattctgtggtgttctcggcctctccattttagtgttgccaggaatggctcctgtagctgggcttaaacccggctgtgagaggcactggcgtttacagaatgagagctaagattaaccatccacgtgggaaagatctgtgtgaggagatctgaggagacactgcctccttacttttgtggatagtgttcaggacattcacattacaaaagaaaagtctcaggacattttgaaaacaaacaataggaactttttttttgtttgtttgcttccaactagctgtgaacttgtacaagaaaaacaccgaaaactggtcaggctcttatgcattaagcagagtagatgaaatgatttattgggttttatgcacattctgtaaagggttagcattgctaacagaatgagtggcagcctctgggagctgaacagaccccagggactagtctttgttcctctggtcttgacaggcatgtgcctctgttaaatgagggcttaattcctctcatatgtgaacaatttccaagcccaacaaaggcagccagggctggagctgttcaaaagaacacaggaggatgcattcttgaaggaagaggatgctaaaggctaattactctctccgcttagccactctcttatagtttacactactccaggtttattaacatggctttgccacatggttgttgtttgtttgtttgtttgtttttaactactagggtatatttttattctctgtgaaatagccatttgctgatctctgctgtttgaagagaggttttcccctcagtagtcctggtgtatatcatggaatattaactcaatagagggggaggggagaggccaatatacttgggatttctgtctcaagtggaaggaatttaaactatttactaagcagcacccctggaaacactatgaacctttcttttgacagcactgtcttcaaatgtggaggggtccttatggcaaccttttctgtaggagatttgggctttgaatctttcatttgtctcagtgcaatccacattgttaaagggtgcaggtgggaagtcacgtgaatattcccctttgcactgttcttgtcttcatcaggttcccacatttgccatgtttacttcattacagctgtattgtgttcctctgattgtatatcagccaactgtacaatgggcacaaacagatgaagatctgtccttctgccagaacagatgaaggctacatgtgcctcagcagaaaagaaaggatgccaaggaagtgcccctttgctcttcctcttgttttgttttgttttgacgactgatctttatctttgaagggttttctttttcagaatcagtactttccagcaggtactgcctactggagtccattttagtgtgtctgcatgggaatgcagggaattataaagatagggttaatcataagaaatgaccatcttctgactaatcgttggatttttatgttcttaaagcaggaagcaggaaacacgagttctttgggttattataaagggttatctgtaaatggagatctctttaaactctgaacttaggtctcaagaataaagcatggctttatgatatgaaataaattatagaatattcacaattgatgtgattaaaagtttcttccaaatactgttaaatctatatttaagatatataacataaaaacatccggaatccttcatatatggtatcctggcacaaactcagacacctcttgctcacttcgtgtagcactgtctagtgtacgtggtagagtctatgttacagaatagaaaagtggcaactattcattacagttgtagagatggacagcagatagacaccttatttgatggcatttgtgaagtggtctttgtgatgcatcattaacaggtgtgaagaatacaacttcaccccatgactgtttcaactagagtgcaggtgactctgaaggaaatggggtaatagctctattgtgagggtgaaaatattgactttgacttggggaagaaaataagtagaagctgtttcttcccaagtgctttttgttagatgccttgtttaatacccagaggcactgtcatgaagtctctgtcacaaagaatggtctagaagtaaaacactgcaagccatttaagctgactgagccacctttgctctagatctggaatgcacgagatgatgaaatatatcagagtactcagaattgagtcaaaaaaatcccagcactcttattaacatgtatcaatgaggttaagcttgttcccacttttattcgggggggggtatcccaaggtaacagtcggtaaccatctgtaagccccactccagtctgtttcccattcttatacacaacaacactactgcaaatccatgtcatttgtattactcactattataggtatatcatagaatcaccaattctagttcagttcacctcaaatgtccctggtctagcctatctgctttttaatctattgttatcaacaagattccaccaacaaattgctgaaactggcttaaactgcttccccacctgatggtctctgactctacttcactctgtatatatactccaaagcaatcatttctctttgtttctcttctgcttagatatccctaatggggccctctgccttcgaattttgaatgacttagcagtttttatcctatgtttatacttctagtcttgaggatgtgatggtatgtagtaccctctgccatgttaagttgccatggcagtgggaacaggcagaaagtgcacaaggtgagtaacattgcgtgctagtatagacaggagctggaggagcattgggggaaaggaatcataaacaggatgggaaagcactgatcaaaaagatgtcttcacagagactctaaggaattgggagagctagtcttgtggattcagaggaagacatttttaggatgagggaaaagcatatgcagaagtcataaggtaactaagtcagctgtaggtaaggagtatgaaggacccagtgtggctggcagacaggagaactctggtatcttagtgagataggcaaccatggaaaagaaggatgtgaacactgaccagggttttaacaagcttattctggcttgatccagatttggagtgctgtgaaggagtcaagagtgaacacagggaacactgagaaagttctggcagaacctgccgattgctttgaccagagctatagaaacagtagcaatgactacatactctgtgaaggcgaaaacagagagctgcggagagaatgggggttgagtcagaggtaacctcacctaaggggggatttggacctaagaaagtggtaaaatggagctgccactggtttgtgtaactcactgggaactggtgagagcagggaacaaggatgggcaatgggagggagagcagagaatctgaattaagtatggagctgagaaattgaaggagtagtagaacatgaggtagttgtgctaagcaggccagaagatctacaaatcagaattcaaaggagacattgggactgtgagggtaaagtgtgtcagtatgttatggtcttcagagttcagaggtctgagcctgaagtcatggctctctagatggtacactacattgcccatgtgcaaccttctgagcatgcttgtactttcccatgtgcaagccacctatcacatcatttttctatttgggatacccattgcagtggtttgagtgagaatggcccccataagcttatattttcgaatacttggtctccagttggtagaagtgtttgggaagggttaggaggtatagctttgttagaggaggtgtgtgcctggaggtgagcttaggtttcaaaagcctgcatctctacctagtggttgtgtctcaaaatgtaagttctcagctactgttccagtgcaatgcctgctgacctgctgacctgctaccatgttcccaaccatgatggtcattgacacactctctaaaatcataagccccaaataagttcttctctaagttttcttagtcttgtcttatcacagcaataatgtaaaaggaaccaagacacctgcccatgttctcacagtcctgtttacctcctagagccttggagatccattaagacctggttcaatgaagccttcactgatcacctgtgattggtaccttccatcacagttctttctcttctgactttccacagcccctcaagatgttcataccacttattatgggcactgactttagctatttgtacacgtcttatcctcctacaagataagtgtccacctgaagacaagacaagacaagacatttctgcagtctgaacatgcttacttggtgctttatacatggtgaacattggtgaatattgttggacaagtataattttcaacagttttactgtaaaacacacagaattactcagttttcttcttttgtgcatatattagttattgaagcaaatgttgaaaagcacatgcatgaaacaaattacactaaaatatttagctccatgaatgagaagaatttgttgaattccataggcactgaccttatcaaggtgaagtctgtccattgtggacatgtatttgtagataaattggctattaatgttaatttgataaagttagtagtctgaacgaaagagtctatagttagtgcaatagaaataattgtagcgatctgttttgatggacccttaggtgcattaaaatgcagcatccagggcatccctaagatgtgagatagctcttagtgtcttagaggttaccatgaaaggtggaacaattggaattcccaagaaaatacaccaaaaattattccaccgtaagtagattttacactgttttataatcaactctaagtaaatccatagttgtaaatgaattaagataaaaagaaaagataatatggactctgggaatcaaacccaggtgccccggaagagcagcaagcactcagctgctgagtatgtctctagtcatattttcctgcctttaagagacaaagagagttttcatcatgagactatatctggaaagtatatgtagaaagtgtcctcctctgttggattatgccttttcagagaccctgttcgacacgtggcttagctgtttttcagtgaaaaataaatggcacttaaagttttctaagactgagatcacatgttctgtcatttgtaatctttgcatcctgtttctttccaatcatggccctacttgttaaatttttcttttatgaaagataaaatcaagatataaaaggtctgagattcttttggctgggaggaacctggatggagagcagcctggtttactcattttcaatgctcctgacctcatacgggtttgtgcttgtgtatgacagaagctgaggttctgttaaatgacactcccttcccagaatggaccactctgtgccttttctgcttgggttttttgtgtttgattcctttcttttcctttcaggtcctcttctcttctatctccacatcccatattttcctgctagtctagtctttctgctggcattctatgtcactttctctgattcttcagtctttccttcatttttatcttcttgttcttatcctcaacacttattttcttcactcattttatgaaaatcttggtctctctcattttcctctgttctggtctgttgcattcccttccattccttccactctattctattcttttattcttctgtgctctgttctgttctgttctgttctgttctattctgttctattctattctattctattctattctattctattcttctatattgtattatattccattttattctgttgttctgtactctgttcccttctcttctctatctttgccttgtcaccatttctattctcactgacttgtcacaacaaaaataatattttttgaaacactgaccttggtcaaaccaatcaatcactgaggactcaggctgaagttgatggagatggcttttcaattatgtaagaaatgtgaaaaagcacacattatattccacaaaatatcaaaaaagaatgagatgctctttaagagataacacatccaggttatgtggccatcttagtaaaacctcaaacccaattcctcctgttttgaagaatataggatatagctagttgaagctgtaaataggactgtccatgtaaaattgggaaattctcagttatttttgcttaacatagttaatcaccatcataatgaatttaaagctaagtttactaacaagggatctgagttataggtataaagtagaaggcctgaaagctccagcacatataattatacagaatatttgcatcagatgaggtacacagaagaaatcagaaaattctattaatttattgtcttagtgccaggagggagatgagggacaagatagtgggtaaccacagtctgatagagtaggccacagcatagcccctgccaaaggagaggttggcatagtcaaacagtgaatcccagaaaaaaatagtaatttcggcctatgagagcctggggcaagctgaagataatgttttaagtgggtgccaggtgttatggcactcagagggccagtgaggaagaaagagaaacctgcatacatgggtgctacaggagccatctgactttatgactggtgtgagctatgttacctgagtgctacagaagccatctgactttaagactagtgtgagctatgttacatgagtgctacaggagccatctgactttgtgactagtgtgaactttgcctgctgtccacccagcagcttttatgtagtggaaattttgttgtgctgcataaacccaacatcctattttctctttgttctgcttttttcagaatttccatcatcttgtgccttcttaaagaatctgtgtgaactttcatggctaacaataaaaataaaatcgataaagtattttaatttagataacttggtactatttaaaatcattctcatgtttaccgttataaaaatactcgttaatgctaacatgcattttaaagatacagtggtgtggtgtaggaaccaaaaccgtgcttcacatgaaccagttgcatctctaccaaattctgatgcagggaaatcctattggttgattgaaatccgtgtgtaccaatggaaactgacaaatggctcggagcatgttcttcactgagatttggcttaccaaatctgtgatgggggaaatattgaagagaacaacaaactaattggatattaaactaaagctatttggcactacctgaggagccagaatcattagtgtagcaccaggagtttgaattcttcttgaagctttggtaagaatttgtatttgataataaaaaaaaattaagagaggccagttccaaacattcactaatttaaaaatatgttaaagttattcacagtcagaaataataattagccccctgggcccactctgctacttttgtagactccaggaaaaggataatttagaaattcaaataaagcctcgcctgacaaaatgaaacattctacacttaattttatcctcagtccaggagttttctaaacagtatcttgcaatagtctgtgcaccaacccactttaacataaagattattcttatgacattgatttctaaaaagtagccacatcatcttctatccctgtgaagcaatttaccacactgcctgtaatggctcaagctggtgtttaaggaaagtgattgtgacggaaattaggcaagtagtatccaaatcaccccctaagaaagctcaatgcccacccaacacaggaggacagcaacagactcaagcccacgaaatatgcagaccctgcctcacttctgtcaggctgtacaactctgaccctgcccttccctgtcagtttccatgggcagaggatgtaaatctgaagttgaggcatatttttgtccagataacagacagtgctctctgcctattggaggacattttgttaagtcccagtggtccctgtccctctgccctgtacccctctacccagctttcaaatgtggttctttattaaatatgtacccattccccacatttgtcttacctttctgcttttagagagaactcaccctgctgccgcctaaccacatccactagtatatgaaaggcagttttttcaggtatggtcagtgcagttgagccctgcactccccttgtaaggtaattcttttgcatagtcttcacccttactctatgagaaaccccaaacaaaaccctgtacagaagaggcttaacccacttctcagtacctgttctctgaccctgccacttgtgcatatttggttatgaggtttcactcagcccagtgctctgttgcattaactagcgttttataggtagaaacagacttatcaaaagtctgattgttctgcgtgccaataaaagtcagtagaaaggagactatttaatagcaactaaatatgttacaaactttattacattttaaatttaacctaaaattccacttggtcaaaaatttaaaagattccacagttgtgtgtatagttacatggttactaaaatccacgggtttatgctttagagtcttattttactcagagtgctgtataacagtcttttgtgctcattttttttctatcagttcacaagttcacatcacctaatattttttctattgaattagcttttgatcatgtgaggccaaatcaaaaaattcaaaacaggaaacatgtcttttcctgaatgagcagcaattcctccacataccggttttggagacctgaaggaaaatgttgagaaataaaatggatggatatgacaagaaacatgagcaccactaatcaccctgatgttgttagcagttgatgaagttacttttttctcatctgaggtgactttcattctctgaaccgaagtagggcctaactgaggcaccggtcactgccaaccttcaatgattctaggcgaggaacttatgtcagaattctggccagcatcagcagcactgatagtgtgcttgatgagggtattctctgaatggagtgtttttatttctctgttattagtagatatgactttggcatcaagtcctctggggactgtgggcattatctttctcctgtaaatgacacatttatttcatattctgctcatttctaaaatgcacaatataaaatgtttgtagtcagatggtgtgaggtatatttttccctcccaaagaccaggggaaaaccctgggttctaacacactggtaactctgacttgaagtttaaatatttagaggaagctattccagaatatccagaatatttaattccttcccttctttatcattccgattccctccacttcccttcctatttttctcgttttcttgttatagaagcagaaaggtggtggaagaggagtttgggtagatataagtaggagactagttatacatattattttatatgtatattagtcataagttgtttttcattacatgttggaacatgtttccctagctgtaactaattgcttgcttaaatgatttttagaaaaataacaacttttacttaaaactaacgttgactacactttgggtattgcactgagacaaaagaagaatgacacattccttagggcagcattgggatatgctgagcactgtgctgtatctgttcactcattgccaccacagggcagattgatgagtctgagtgaaatttgagccaaataatgtgagattggtaatgtgaagcagaataggagggaccccggcattgcaagggtacagaagagtgcttactggtagagtggctcatctcacttgtcagctgggctatatttgtaaccagctacaatcctagcagctgtgcaaccctgtgggggactctcttcatcagatcatggaagcagtaaaactcaatcttaaatgtgggcagcacctttgacagcagcctaaataagaggaggaagaagaagaggtagtaggaggagaagggggaggaggaggaggaagaggaggagaaggaggaggaggaggaggnnnnnnnnnnnnnnnnnnnnaggaggaggaggaggaggaggaagaagaagaagaagaagaagaagaagaagaagaagaagaagaagaagaagaagaagaagaagaaaactttcacctaattgctctcacctttgccagaaagttcctctattcccccatgccatttttttcaatttttttaattagatattttcttcatttacaattcaaatgctattccaaaagtcccttataccctcccccaaccttgctctccaacccacccacgtccacttcctgcccctggtattctcctgtattggggcatataatctttgcaataccaagagcctctcctcccaatgatggccgattaggccatcttctgctacatatgcagctagagacatgagctcaggggatactggttagttcatattgctgttcctcctatagggttacagaccccttcagttccttgggtactttctctagctcctccattgggggccatgtgttccatccaatagatgattctgagcttccacttctgtatttgccaggcactggcatagcttcacaagagtcagttatatcaaggtcctgtaggcaaaatcttcctggcaaatgcaattgtatctgtgttggtggttgattatggtatgaattccaggatggggcagtctctgcatggtcgttccttccgtctctactccaaactttgtctctataactccttacatgggtattttgttccccattctaaggagggctgaagtatccacactttggtattccttcttcttgagtttcatgtgttttgcaaattttatcttgggtattctaagtttctgggctaatatccacttaacagtgagtgcatatcatgtgagttcttttgtgattgggttacctcactcaggatgataccctccagatccatccatttgcctaagaatttcataagttcattgtttttaatagctgagtagtactccattgtgtaaatgtaccgcattttctgtatccattcctctgttgaggggcatctgggttctttccagcttctggctattataaataaggctgctatgaacatagtggagcgtgtgtccttcttaccggttgggacatcttctgcatatatgcccaggagaggttctgctggatcttccggtagtactatgtccaattttctgagaaccgccagactgatttccagagtggttgtaccagcttgcaatcccaccaacactggagggagtgttcctctttctccacatccttgccagcatctgctgtcacctgaattctttcaccaatattagagccagcttctttgggatttgtagcatagaccaaagatcagcagttctatagacctcaaagccagattgggctgctgggacatccatcctcatggactgagtagtgctgttcgttttggcttctatagtatgtaccagacatttggggactatcaggaatgcatcttgtaggccaatataacaaatcccatatgtattcagtctatcagttctgttcctttagcgaatgctaactaataatacagttgataagctgtgatgagagctgtttctcagtaaggctgtagtggtgtacacaagtacaggtgtggcacaatgaagctgaagggggtcttttcagtggacctcatatgacaaactataaccagttctctgggaagttaaagaagagaaaaatatgttatttgaaatccagagggaccattttgataacattgtgaagaatcgcatcaaagcagagtcagagtgcatctaatgtccaagcagcccgaaagggaagaaaatcaggacccagcctacagtggctctcgatatggagatggatttgaggatactgagtgcatgaatttacagtgagcaaatggctgggtttaagaagaggttaaaaatagtcctcacatttctgcctgggtctccaggataccaaagaagatggatatttgtctggctgacaaatgtttaccaggtacctaatatgtgctaataagaattttaagtattgacagcataatagcaaacaaaacttgacaagccatgaaattatagaggctaaacagtcaagttgccttaaaactagtgagcatagacttctttagtcaaaactttaaaccactgaagaaagaaatgaaatgcactaggaggtcgaaaagcagcctatattcatggattgcagacttcatattgagaaaaagattattgttgcattctatgcacagatttgatctctatttaaagttctgtgacattctttataagaattaaaaacatcctaaaactcacatggatgcacaaaagacccagagtagccaaaacattccttaatgtatcacatttgatttcaaattacagtgtacaaccagacaagagaaacagcaccctgccaacataaaaacagacatgtggctcaacagagactagaaggcctacaaataaatctacataactacagataatcaggttctgcaatgatggcagaaacatacattgaaggaattatagtctcttcaataattggcattgcaaagttagatgttcctatataaatgactgaaagagcattcctaactctttccctgcacaaaactcatttaaaaatggataaaaggtatgaaggcaatacccaaaaatttgaaattcaggaggaaaatattcaagatgcaggcacaggcaataattttctgaataactaatggaataataacaagaaacaacaaaaagggattgcctcaaattaaaaaccttatattccacagaggaagcaacagccaatgtgaagagataccatacaggatggaggaaggtcattgctatccataagtctgatcagagataaatataaatgatagatataaaagactttaaaaattaaatgtcaaaagaacaattaccaaatacaggaaggggaaaatgaattgaatggtcctcaaaaagtttccttttttttaagtcaatctatcatgaaagttttcaacatctttaatcatcaaggatatataaatcaaaaatgttctatgactctttatcaccctagtaggaataagtactagtgaggacccagggaaaaagaaaaccttatccattagatggtgggaatgtaatctagtctagtcattatggaattccagccctcaaaataaaaaaccaacaataaaaacaaagcaaaacaaagcaaaactaacaactaaaaatagaagtatggtgagattcaacgatactcttccagcacatatgtctgtagcactgtaagtctactggaagatactcaggcctccagaagtactaatcatgagggccaagttacaggcagatgaatacattaaacatatgaaacatgtacatggtcgtttatttaatcaaaaacaagagtaaaattaaactaaatcatttgctagaaaatgagtggaaatggagatcatcaaaagccaaatgtaaatgattactcatgcctgtaagcttagcacttgggagatgaggcaggaagattgatgtgactagaaggccagcttgggctacagagcgaggacctatttaaacaaaacagaacaatcatacaaaaaagcaacaagaagacaaatagaattctttctcatatgcagaacctagattcaaaaaacaaaaagtatacaaacaaaagaaccacaagataaatgtgaaagtaaaaaggaaatgtagtagtcagctttgtctagagtcatctgagagaaaagcctctaaaggaattatctagattaggtttgcttgtgatgtctgtcgggggttatcttaactgttaactgatgcaggaagggacagcccctaagtatctaagtaagctggctgaactagctgaacctgggctcatgagtgagtcagagcatgagcccaaaaactatggtcctccatggttcctgcttcaagcttctattggagttcctgctctgatttccctcaatggttggctgtagcctatatgctgaaacaaacttgtttttccactatgtttttaccacagcaacagaaaaggaggctagaacagagagttttgggaaagggaagggaccatatgtggggataatggagaaataataataagttgactatggtcaacctatattatatgcatgtataaatgtgtccactatagaacccattgttctgtactattactatatactagtgaagaaaagagaaaagaaatcatctgcttagagccacttacttagcttttaaggaaacagtactagagacagagtgacaccccgaggctacgtagtttgatcatgataatgatgggtctggaatttgagcctttggatttattttctttctgttcctctaacaaacagaaagaacactggtttagaagacttacaaagaactttctataactttggtcttaaatggaatgtggggatgggttactaatggagaggttatgggaatatgagtgtgatcattgaggcaaggaagagagggcatgaagcatatgaaaactgccttcccatctggggttcgaatagctcttactaggggacgggaagagacactcagcagcttcatcaaagtaaagactgtacttaagagagaggaagcaacaggcattgctgtggaagaggaagatggagaaacaagataggctgtatgcatagtggccggtatttatttactggtctatgtgtttgtaccaaaataaatgttcatatgctttatgccacttgattagcagagtaattctttgttgaccatcaagaaaacagaggtgtaagaagtaagataccagctgggccagatatcacactaagaggcctcatcaggattctgagtagcaatagcagacacgtagtacttcctgtaatctggatacttctctaaggctttgatacttgaactcattgatgccttcaagataaacctatagggcaggagatgtcatctcactcataggtggtaaaaatgagaaataataaacccaagaaatctgtccaaggtcgcacctttactctgtggcagagctgacagtcaagactggagtctgtgaccttaactgttgcatccactgcctctctcttcttcctcagtgtctccagggtaataacaactgtgttctcattattttcctgcatagcagctttggttgagagacctgtagattcctttgtcaaagaggaaagtggaactaagttagaaaacaaattcacatgcaaagcattttgttttatgggtttatattgggatgtaaactgagtaaataaataattagttttatgtatatttatctcttgtgatatttagctttggtcaagcaaagagtgcaattcaagaatcatctacagaccaaaaaaaaaaaaaaaaagtagggagcaatatagtctcaaagtgggaaatttaccaggctcacaacttgtaaaggaggaatgtatgagtaagacgtcaaatatgcgcaacccaaactgtcccatgcaaatatctgagcactccctggagggctggttgccccaggaatgcctggctataaattcaaggtgtaactcattttcaaggtagacaaatgtccgtatactattttgtgactgtacataagatgggtaaatggagatgggaaaatgtgatgtaaatatcactaaaattctattgttttatctttttttttttaaaccaccttgcatacctttcatggacttacattaagtggctttaaagtaatcaggccatggttgaatgtttcagaaggctgttatacttgatttattccagagctggggaggagaaaaggtcaggggtaggtgtgtgaagttgtcacagattcaacacagaagcattggaatgtggagaggagcatggacagactgctggcctccacactggagaggagggactgcttcggtgtgagtgtaaagggtgctgaacagagatgtgtggctcaactcacgactgacaacatgagaggcctttaaaaacttatgtatgtctgctagtgcacgcgtgcttgtgtatgtgtacaaatgaattatccacatgactgtctgcaatactcccttcctagctcccctatactgccagtggtgcatttaacttgaactgttttcatgtgcttataaggcacacttagaatcctgatcataacatacttctttgactctattaaggtttataattctgcctctggatgatttttagctctttgcatggttttgttatggctcagatttgtccaacacacacacacacacacaaatgaaaaaaaaaaaaaaacaggtctcagatgtccaggtagtggtcggcctctggtaaaggtgcaaatgtgctgagctaggaagaataaattgcagttgtacttcactgacttctgtattactgggcagaatggccagatctatgctctctacgctctgctctgctcttagaatggtgcttgtcaggatcaccgagtccattggcactctgaggaaaacattagttttattgtatttccacttgggatttagcgttcctagcattaagagtaactagattatcatttacatctagccagtaagtagtatgtaagttagaacactcaagttgggatcatatatgactaatctctttagttttgctggcatttgagaggtagcaactggaagatttaaatgaattgtgttcaaggagcccagagcccaatggttacagcagccaaagagtccttgagacacagtgagacagatggatttctgatgggttcagtgggcgtctgtcctgggtatattcagttgcttagtgcttgatgcagtgaacccttactgttactctgttttgggggtagtggaataactggatgaaagatttaatttatttgaataactggtcctattagaggctgtttgttatgtaggatatttgtgcagaattgctccgtagggtcatagaacaacaaacaaattggatgaagctatcaattcacaacatctttccttttctaaggatgttaattttccttccttaaaagcattaagtctgccagccttggtatcccttttggtaggaaagtgtgtgtactcatgtataaattaacatgaaactagaaaatggagggaagtataattcttaaaccagtatttatcaagaatatcccagtgtgttcttctatgtcagtcatctctactaatggcaaagtgttttctgattttcaatacatctgttccacaaacagcagcaattagtattttgttttgtttttgtaaattactgacaggccagcatcagactcccctggactgtactgggatcccatttgtgtgtcaagtcagcaatcacttctccagataaggaacagatctgtctgtgggtggggtcaaatatgcctgtgacttgtgaccagtggaaacagaggaaagcatttgtggcaagcagccacagcacatgccagacttctaaatcatgcatatctataaatggagaaaagtgactatttaaggttgcttccaaaaaagaaccattgtctacaaagaaggcaactgtaatgtaatatttgtaaaagcaaactctttgtaggcgaaaggccttgtttttgttaaaaacatcagtggtgtccctccgaactgcatgtgatctgggtaggtaaatcagcagagttgagtagtagagatggagttgacttttgacaacttattatgtgataaatagtattcattcaacccagaggatcttgaggccacctttaaactgcggtgatgctggctctttgccagatatatacaatgaaattctttgacctacattaaaggtgttgcctgaactgtatctagcaactgcagttagccatgtacgtgctcattacactctcaacttcttcatgttgacctcagtaccttgtttcctagaggtggtctcctcactgttgtaaggttaattgccatgaggcctgattgtataggactcaatttttttgacttctatatttgctaagtgcttgtatgatagttatgatttaaagattgctttgtttatgattctgaagatgatgagaaattctgtatctgattttatgttattttttcttttcttcaccaaatataaaaaaatgataaatttggtgatattctcccaaagaaaatgtaaaaatataaaattttaaacaggaattttatctctgaataataagcacattaggatgtattagggtttaaatgatttatcattgcttcctataatatgtgtggccatgctggcaggaaagaatgctgggttgatgatatggagaggagaggtactaaggcaaaattgacaaaactaccccagaagcttcctgagggggaggaacagaaatgcagtaaacaatctcacgtgtatgtggcagaacgtacagttgccacatgcaagggaatgcttctaccgataaaagaagcaaaggtgacggggttattgtcagaagatgcaaagttagttcagaagactgaaaagagtgagttacaaagcaatgggttgaaatggaatgtccagacagaagtgaccatggtacaggcagttactcagtggctgcaggactgagagaaaaagctggtgtgacacacttagctgttgcttaatcacactcgttagcctccattgtcagctccaaaaggcaactattccttgtgtttatacccagaatgctagtcactgaaacccagaacttctcaaaataggctgcctgcagaaccttgtatggatcaccttgtttgtttctgtaaaagatgcaaagaacaccttgtatcagagaaaggttcccacccccatttgtgtgttatgaaaagaggcactatttactataagatcaaaaagtattaattagctgcctttggtttaaataaaattgattgttaaggcagaaaatagaggataatatgagttctattctgccgtagcctcccaataaaagatgcagtgacccaactcattagccctttgatttaatatattgacacttgggttcgaataattccgtttagtggcttttgcttcccagggatcaatttaattagttataaaatgtgacttcttgtcaggagctagaagaaatgctgacgttaaataaagtcatacgcaatttaaacaataaagctatcgatgcctggttaaaagttaatgatgcaagaaaaatggcttaatagagacaacctcagcattgcaagtgatgctaggaaaattaagctaagtggatgaatgaggaatggtgatgttgttgaattgttaaaacaaattcggagctgctctgatggctcggcaaggttgtcagtggttatctttcagcagaggagacaggactaatgtatgttccttgtcactaggacttgagcaccaggtcagtgtgctgctttggtccaggtttggggtctgtaagttagcaaactctcatacttcatgagtggctccagcaggctggtcatcgtcatccctggacctcagtgaggtcttctctcagtgctcttgtgactgggcctctctgcagagtgctacaggcattcctagccccaggcctttcctgagaaatattgaagctgaactctagttctagactgtggcctggtatgctttctccccctggagaggtatctcctccttctgcagggaggctgatgaccacatagctcttcccattcagagatatacatagctctcatcaggattatttgatgccaccaacttctctgatgctctggctttaaccgtggcttgaatgatttttctgtgagtgtctctagccacagcagacttaaattaagtagtaagtgaactgacccagtgttaagcgactagatagtttctgaaatgctttctgacttccttaattcagtcatagattcaagcttaactgcttagtccatgaaatcaactgctttcagagcagtcaaaacaaccagtaggctggctaaatataccctgtgtcctctggtatgtatacacacacccacaattaactatctttaggcttgcctgctaccttaacactagttagctaaacaaaagataaccaacttttattgtcagacaaaatgtatatctcattctctcaactgttgcatttccaagccatttgctcactatgtaaaaacaaggcacatgttgaacagttttcaaacacttcctctagtcacagggttggcgtatgtgtgctgtgctaaactcttagaaacagccacagaagcctgcagtctgcccccagtttattgccaggcgccttcagtggttgctgggtgggaattcaagagcagggagctgcgttccagaaaggaagatgaggtgggattgatggccttccatctgctctctaacaccttcctgcacaccttgccgtggagcaagactcctccattgctttcctggagtgtactaagagggttcaagattgaagatcctgggtagaagcttactcttggaaatttgtttattctttctgctgattcagctgccaaggaaattactgtagcatcgacagtggaccatcaatgtgcaagtgtatccatctaggaaaatcactgaataacataccttgtctatttatataaaacgactatgctcgaaaattgcaataaagcacaaaagctttgaacttccagcaaaataagcacattaagatgttttggggctaaaatgacctggaggttcatttgtcattccatcctataatatatgtaaacacactggcaggaaggatgccttggagttgatgtggagacaagagggtgctcttgagaagctggcaaacttagcaaaaatgccccagaagctttgctaggagaagggcaaaatgcagaggtaaacaagccctctggcttatgtggtggagcattcacagtagccacatgcaaggaaacacaagggacgttgctgtgtataaaatttgtgccaatactaagctcaccactggagtaaaggttatctttttatttgcttttccttttgaatgttgggggaagggcaattagctgaggacaagagggaaattgttggggactgctgtaagataaactattttgtctttgtgttgacattatattggctacagcctacacagaggggattgcctggaaaggaaaaaaaagtcaggaaagagaggcattactattttttagcgtgtgtgggtgcacccgcagcagaggggcccgtgttttcttatggctcagatggcaaagctaagcattcagcctacggcaggaaaaaagtgccttttttgttttctgactgcagagtccaggcattcccaggggaacacaatgaatggcccattttgtccaacacggtttcatagacatagatctcttgttttttcatcattattcttgcccgtcattgggtgtgcacatgacatttgagcgtgttttaaagtcttaacacactcatgtgcctgcaataaagttactcataacaaccctgctttctccagacaacagagcagggtctgttgttttcataagtcacggcagctgggaggcaattgcatagacaacagcttaatctagctggaaaatgcaggaagaggacagcacacacgaaatttcctcccatattattccaaggtggaagaatgaaaaaaaaatcagccatgggtggtctagctgggtaactgattggcagaacatactttagatttttgtagagtggtaaatggaaggcattgcttttcctgtgtttgctaattggctagcaagcaggatcagacagtggtactcaggtccgtctcagtggtcatgtgctacgcatgaggtgttaagttgttgcagtgagtttgtatgaaaagacactgaatgaggcagttctaactcgatggcgagtcctctttgaaaggtttgttgaaggctcattggaggctcacagcaattcccagcttcatcaggctgtgcttttggtatgtagtcagtagtaggcttgaactctcacagtgaataactgaggttggggaagaagaggggagctgaaaaatcaaaacctgacctagaactgctgtccagtgcagcttgcaggccatgccctcaggatgctggagcactgttagtcacatgcatttctccttgaagataggacagaagaccagtgtgtagagtggagaggggagcttttcctttctctcccactggaactgagaagaagggattgcacagaaccctgggaaggaaatgactcaggaagcaagatttgccctgctgtgcttaaccatatcaaactctgccggctttttcctttcgaggaaatatgctgtgacagaacttgtaggctctttagagttacccaggtgacataaagcattcagtctctaagacataatggctttgctggtagttttactggaaaagatgaagctgtccaggctggaaccaactcagccctccctaggatctcgtgtctgagtaagaataatctggtgcatttccaactttagtagggaaatattaacccttattaggacacttccacaggaggcctaatggagaaatccaaaccacaggcagctggggcatgagctaggtctcactgtctcttctcttacatgctaagcatggagacaccttaaagattcagttttcagagcatctatttagctttttcttaaattgtgttttccttgctccattcttatactttacttaacacactcttcacttatccttggcagagggcaacacgggagggtcctgagccaagcccttgtgtgttaaaagccaggacagaagtcaatcctctgctgatctctcatgttgccacactccaaacccaaaacagagccattaaccaaacaggcctttatgttagtacttaccatctaagtttgactagtgatttgtagttatcatttgtggttcaagctaccaagcaccaatccagtttctttatgttaattttctttagctttaataagtatgcaacagcttatgttttaacttttgccacctagtagaagcgaaaactaaggtaactcgatggctgtgatagccaggggttgagcttatttctctttggctcccaaagctgtgttcactctgctataccaatttgcacccagtaaaatgaaggggatagcagtttgtaattagtaagaaataggacctacatgggaagctagaaaaacaaaaagcactttttacttcttattctccttccttatcttactcagattagaatgctaggaaggatctactaagaaaggaaactaggctgtaagcagccctgtaagacaactgcttatcatagtgattgtgagacatagggcccataaataaagactgctgaattcgggagcaacccaaggatgaggacatatgttcataacatagaagagatacacaaaatgtgtgtgtagattacacacacatacacacacatatatatttcatttttaatatacattcacacatatacatataaaacactgtttgatgtgctcctataattctttaggaacttcctgactttctgaaatattcattattttccctttcccatggtattccatatagtgagagtattatctttacctaatttttcattgttaacatacattcacacatacacacataaaacactgtttgctgtactcctataattctttaggcacttcctcactttctgaaatattcattattttctctttcccaaagagacacaagggaaagtatttgaggatatgatgtggctgcagtgtatagacaaccactaggggatactttattccagagatttttaacctttggatccaatgaccatttcataggcatcatctaagagcattggagaactcagatatttatattacaattcataacagtagcaaaattatagttatgaagtagcaaaaaaaataattgtatggttggaggtcacacaacctgagggaggaactgtatgaaatgtcacagcattaggaaggctgagaccactgctttacttccagtcttattctaacatttcattcacagaactgagaaataagtcttacacatgtattatgtatatacacatgtacaaacaactatatccatatataaataggtaagtcttcacattactatagttttgataagcagcatcatgaaattatattattattttgagttctaatctagcatgtgaattaactctcatcatcataagatgtgaagagcttagggaagctgctcggcaaccaacctagctagtcatggtgaattcagaggaggatgcacagggatgccgaagctgctggagggagctggctatggaagggcgtctacctagtctgaaagcatttgacacaaacaacattcagggaagtcaaagggaaagttcatcagtgtgatggagaggcctggccagtactacactgctcaggtgacactaacggttagggactaactcgacccccccagtgactgatgggatgtgaggagcacaacagagcagcctcttcttttggatgccaaaacatacaatccgaatttaaccataaagaacatcccagtgaaaagcaaagcaacttagggacagtctacagattagctggcttggagttctctaagttgctatggttgtaagatcaagaagaatctgggtcacttccatttcacaggagatggagacataacacaagctgggggtgatgcttcaggactgttgctgtcagaggatgagcatcacacttgcttggttttaaatcttacctatgtcaatctaataactatatgtcttttatatacttctgagggtgactgagtgcatcccactgttttgtggactggtggagataaagtgtgaaggttgtgtgcatctcctggagagcctgtggatatcaggaattatgtctgaattcctgagctttgttcttcctagacattgctgtgattgtggaaccatggtgaaacactgtttaaaacccccatctatagatgagtgatagcgatactaatgtggcactctacacagtatgtagtgcttcatgatagttcattgtcttacagtctccccatgtatttgataattttaccttgattcctcaagctaagcagaaataccattttctcatttatttctaaggaattcaagatcttatggttcaaatttaagatgatagaagcatgcagaggtgtagcatagattttacagatgggaacattggtctctttccagccattgcttcttgatctttctcagagccacatgcccccccaccccaagcaaaaatacctcattcagtcctttaacattatagaaattttacttttgattaatatggcaacggaatttttatctttcaagataatgtacttttcaatatttcagagtatttttatcttccaagacacatccttttcaatatttgcaagtttcctgtaggcagcgggaggtgagagcacagagccagtgactctcaacacatggatgtaaccatggaaaagccagcatggtctctgtatgttgaagagcatcattcctggcatgtggcatggtgctcttacatgctgtgataggcacagtccacatcctctctgtggagtctccaaggtcttagcaccctctgctttcccctactttctccttttcttataaccttaccctatattgtggcccagtgctcgagccttgaagcatatgttcacacaaggcacactaagataagagtaggataccagagcctgaattcaaattctgagccctctacctgtgagttgcctgaccttgaggggaactactgaccttccaatgctcatctgtaaagtaaggggaatggcagtacctacctcatctacgtgatttgagaattacatgtgttagttcatatgaagcccataggaaagcacctgacatgttgcagatgctggattggtgtggctttcattagtattattacattatcgttattatcatcacccatgtaattaccacagtggcttaaagcagggtaataacaccataatatcattataatgccataagattcagattagcatctgtcattacatcttcagtctgcccctcttacttttgtgtctgataaagtaatttagaatcactactgctaaccctctgtagacagttcagtgaaaaccttggtctttgtcttgtgaaacttttctctaaatacctttataggaaacctttaaagggttgtgcattgtgattctttgggatatgatctgctgctctttaaaacatgcttctgtgattcttaagacacatatagctgccaccccactgtagaacacacacgaatacactcagacatacacacatatatacatgcatacatatacacaaaagtagtagctacatacaacatgtccatacacccacaaacacagatccagatgtacacacatatatttgcacgcgtgtgtgcgtgcacacacacacacacacacacacaatttattttgcaaatcatttttcccagcttgttttttcagttgtgtattttcaaggttcattgaattttgtttgagtgaaggaagatttatttatgtcaaaatcaaagttcataatttggctgatgtggtttttttctttttagcttcattatgtacacatattttaattatttgtctaatccaatgtcacaaagcctcttcctacatttttgtctagaagttttctaaccttaacttttatgttatatattgatccatttgaattagactttgtgtataatgtaagatgaataggtaatcttactttttcgtgatggtatctatttctaacaaaatttcatttaaagaaactatcctttcttctttaaattaccttgacatccttgttcaatggcattttaatctatctaccacataatgtctttcattcatatgccaattatttgtatctatcatctatgtacctattatttctatctatctatctatcttatctatctatctatctatctatctatctatctatctatctatctatttgatttgctgtgctgagatggatcacaggaccaagggagcatgttaggtaaactctctttgagttttacacttaccccagatgaatttttatttatactgtattcaatgagtcaatatgaagagaattgctatctgaaccatataactcttctattctgtgcatatattactttcttccttgttatggtgttttagttctctcttttataattttctacttttatgtgctcaatatagtgaaatggagtggccacaccatcaccattatttcgcataagtattttaagataaaaatgccagaactttccacccttggccattgtcgaattacagcacagtcttgtctgcttggttctcaggctgtgaattgtgcttttgtgtcgtatattctatcaacatagaagtcttatagtttttggctaaacttttctcctttttatgagagcatatatggaatttataaaaaaattagtcgttcattgccactatttagaaaagaaactgctcttatttgttttaccctgtgtgttgactgttaagttattgctttttagttcttcgctttttataatattttgattccttcaggttttctacagtcatgatagtgtgttccacagattttccacattgtgaattttattttctttcaacaactgctggtttatcaaacaaccttgatgactgtggagaacttcccttccagttgagtttgttgaaagttttcttttttaaaaccataaatagattttaattaaaaattcttctctattattaacataatcattgttttagttttattatcatgaattacactgattggttttcaaatgctaaaccaaccttacattttccaaacagccctttttaggtttgataaattgttctttttatatactatattctacttagcctgcctatgtgtatgtagccttttaaaaattaatttcaggagtataccgcccccctcacacacaaaatttacattttactaaacagtttttggaaaactctgtatattgtcaggaatttgaaggtcaaagttatcattctgctctcagaattaattgtttcatgtattttgtaaaatgatagtgtgtgactaatttgaatacatgttataggcataaagattggtggggcaggtgaaaggaagaaaggtaattcccagtgtagcctgctagccattttggctaatttccctttagacaaagtgagatttgtcctcattttcttcccatgtgtggacttgtaacaaagaactcagagtaaagtttggagaagaaaagggtggcctgtttttaggttctatgttaagagacaaaaagaaactgtaagtggaaattaaagtccctgtaattggatttcagcagatttaataacatacatgttctttgcatggtaatgccaccaacaagtcaaagcatcccacatccttctggtctttgtcatatgtggccactggctctgtgaaagcaggtggcaaacaccgttctgaaaaagcacaggagtgctatcttgtctgtgtgagaatcactggactagaattctttttcatcccccaaaatttcattttctaatgttttgagtagtaatggaaacagactggccttcagtttgggttttgatctcaggttttgagaccttgacatacaaggtctctgggtcttattgtctctatgtttaagatgactatactgaaaaatgctttactaaaaacacttctagctttttaagattgtatgaatcaggtgattatttttgtattgtatgtatgtatactatgcacatcagcctgacaaagaacttactaaaataagataaataattaacattacatattttatgtgagagtattcaacatctttaataatggaaaatgaaaaccaatgcccacatagttaaagccatttctaattttaatgggagatacaaattctttcctggccatgcatttaaaatgccagcattgcatctgctgctctgaacatgcaagacaagagtcttaagacttctgtatgttttatatgctatgcttttcctttattattatttatagtcggttgtaagaaagcttcaaggaatacaagacattagaacaccacacctttaactagctgtggcataatacatgatttgagtccccaatattttctaacattgaggtttgtttattaaaaaaaccccatgctgtgactgaatcagtctaatagaagccaagtttgaagttgaacattcaaatgtctgcccatctatcttgagcatatatcatacgtaatgatgcggggtctagacatctttctgggtttgtttatgtctgttatggattcccctcattatccatactgtttgagggagaccccatggattcagcgagtttattgcatacttgctgtattttaagactaactcaggtttttaagcattttaacttggaagattcttctctcactctcctgttttatggtgatgattaaggcaaaatcgagtacgattttaaaaagtaatgacatattagagtgtgaggctcttgactgcttcgggtacagttctataatccttttgtctattacaccaatcttcctaattcttcaggcaagtttgaattatagcatctgttttcctattttaaaaattaaattacataccatctgctgtctggtcacactgattatcactctttggacacacacacgtatgtatgtgtgtatttaaagtttaaactgtagctattagtaatgttacagtttgtgcataatcatactctgagtactagatagagatgagcaagtaaactttatatataaaggtgtaaatatgaagaagagactttaatttagaaaagcaaaattattttccatttctagttgagattcgttcttattctagttactagttattttcagcacagagcagtgaggtcataatgagatgagggcagcactcttttccatcctgttgttgggattctcctctaatgtttttcacagttatgtatctctttgcaggactatttatttaacttgaaggacatgccattcatagcctttgtgagttacaaagttatcttcttcattaaatgaaataaagaaatcaaataacatgatcagaatttgtaataaacatttgtcaacagcacttatcattatggatatttttggaggaggtgccacagcacttgctgtaaatattcatcttgttattgagtttaaagatgtttggatgcaggatttcacgtgtgtttatgctagtaaggaacaaaagaaactcagaaactgaaagcagaaacgtaatcgagccacccacttaaaagagaaaccggaatcaacgcttttcaggggagactgtgccttccgtgtaaaaggccagcgtagcaaggagtctctattcttgatttctttagacagtgagagccttgtgccttgtctagttcctgcgttttaagagcttgttctgtgtagcagaaataatacaataaatgggtttaaccacatttgtctcagctagacagtctgctttgtcagagattgctggtacaacgtaaacaaattacgtgtttgtagtgctttctaatgaaagcccatctaacagagctgagattgtgttgcagcagctgtagatttaatctcctacctgtcagttaaaacaggcatttcctgagccagataaggactagctgtagaggagggaagtagtcacagctggacaaagacctattgttattggctgataatttccatgtacattcagcccttattctaccaaggaaactgcagccatagtgtggcattgaagaacacaacaagggcttatattttaaacttaaattaaaaaggctaaagagaatgaaaggcaggctttgtgccattgacttgggaaatttttagtgtacatttaaaaaacaattgcccttggctttgatcatgattccaaataattgtggacttgataacaaaattctggtcagtgtatgctcataaattgacagctaaatatttaggagttcaagttgtaaccaaaaccatccaatgtcaaaaacttatatctgcagattgagtctttttccataagcactgcagctggagacactgatggactgggtccttgtgttaaatcagttctgtaatagccatgtggtcatgtcagtgtgtgcttctcctggactttagtttttaacaaaaatcatgatttgcctttagctactggagaagtagtgggcagggacagtgtagataagcgataaataaccatctaaatatctttgctttctctttcctgcccctttggtgaaggggtacagtagcaagtgagagtctctttctttgtttcagttttgtacttatatagaaatctaaaggcttaaaatgacttatataatctgataggcttgattggaaataacctctctctaaatgattatatggaataataaacaccatcttctataccagtagtagctagtgttggggcactgatagatcagcccttgtatttatattggtatgtttagcaatctaaataccctacttttcaatagtcatatggaatttcaatttaaagcaattcccacgagtgaacatatggatctcaaagcataagaacctgagctcagatccccagcacccaaaatgccagggattgcacatgcatgtcatcctagctcaggggggtggagactcgtgtgctgaggtagctggatctctgggtgcttgccagtcagccagtcttgccaaattagtgatctccaggtttggacagagaacttgtctcaataatgtgaagagtggtataggaagacactggaagtttgatttttgacttctacacgcatgcaaacacattatgcatatatactctcacacatgtgtacatacacatgaacacatgcatagctacacaaaagaacaatgaaaatatgtgtatgaaagctttttctattcttttgttgaaaaagttttttttttcatacaatattttctgattacagttttctctcccctggctccatgcagacctctccaactcctgtgctaccacaaaacaaacagaagaaaaagagccaaggcaaagcacaagaagcttaagtagacacagagatgcacgttttctcacacacatttttccatgtattaaagctttcatagcaattacattttgtaaggagcttttggtcactgcagcgttcacacactattccaaggtgggttcaactcccagctctggagtctccttttgctgaagcaaggaacagaatggcaacagtggagtcaaactggagtccatagatgtcgctccctgcaagaaggcacctttgcttctgtctgtccttttccttagtgttcttgctacacttagccatctagttcttcaacatctcatgattaggacaaacctgtacaccaaggttcttttaatgatccagaagtttagggatgactttatatgggcatatgtttaaatctgtgctgtgcattcttttcttaacttcccattaagaattgttctcaaaggtaatgcaacattgtgcttaagtaaaaaccaaagcatgaaaatacagaatgaagaaaatcttaaaatccatctctgtctctctttcttctttccccctctctctttctccttctccctctctttctccctctcttgttctctttctctctcctttctctccctcttttttcctcttcctctttcattctctcccccttattctccctcttcctctctccctccccctcttcctctccccctctacctctctctctctttttctccctccctttctccctccctttctctccttctatttctccttctttctctctctccttttctttttcacccccactgttttcttttctagaaattaagtcttttctgtagccttgccttagaacttcctgtgtgaactgggttgccttcagacttttaggctgtcctgtttctgcctcaaagctactggaattataggcatgtgccatagttagcttgatctgtttgttctttcccctctatagacagagtcttattatgattaagccttatcctgtggcagtcctcatgctcccttctcctaagcaccatcaaatattttcaccccatccagacaagttcttagtaagaggttttggctcaagcaatcatactaaagagtcaggagtttcatttgccaatgtgagctctgttctttctttatcccactggctcaccagcatctttccatttctcatcaccattgggttccgtttctttacttgtgattctgctgttgagttattaattgcagtgagttagtactaatctgcacaaaacaacactattggctggtcattgtaccagcagggtggcaagaagtgaatgactgttacatctgcctttatactagagagcccatttttatttaccaaatatgacattacccttattaccaaaaaatgtaaagaaattctttcaaccaatatttgagccagtttgcatttattaaattctgtcattgggatctttattattgacattttcttataaaaaggttgcagttacctttaagtgttttaaatatttattttctacaaagaaatggaattaagaatttgcatttagtttctgttagtaactttctccattgcctaaagttttggtaagggacatagtaggtaggtgaacgttcctgtggcacagcaggttccacccaggtttgaagatctactcatctcagctgcagcatgaaggagacactagattcaaagggtgcaccttcatcttcaagggcacacatggcttctcaggagaccaccataaaggagcatgggtcagccaacatcacattccctcttccttgtttgaatttggggatgctcccctcagcctattgtgatgtctgccacatgtttccttccgcttgaacagagaagttatgcaagagtgaaatatgcccacatcacccctggttgtggactactgaggcagtttctaaatgagtctccatttccaatttgcattgtgatgagcttaaattaaatctcaagccaccactctctcttcaagccctcccagggactgtgcctcactctcaggaggatagccaacttcctgagctctttgctaccctagaggatctgtgtatctaggactttttagcctctcctttcccctctctgctagctgtattctggcctcaccacccctgcctgacattattgctgccttagggcctttgtacctacaaccccagagtcactgactagagtcgctttccactcagcttacttcagtgtgtattttcccactatcttgtcctctcttgctaatggagaagcatctgagcatccactatctttcttgccttccacaacatcttccatgtggcccaatgactgacttgttcatcaagcttggggaggatctaggattgtgtgtgtgtgtttatacatgtatgagaatgcatatgtgtgagtgtgtgtattttgtgtgtgtatgtatggtatataagagtatgctgactgcatgttttatgtatgtggtatgtgtatgaatgagcgtgtgcgtgttgtgtgtatgtgagtgagtgagcatgtgtgcgttgtgtgtgagtgtgtgtgatatatgagagtgtattgtatttatgtatatatgtggtatgtatgtgaacatgcttgtgttgtatgtggatgaatgtgtagtgtataaaagaatgttgtgtgattttttttgagtacttacggtgtgtaggtgatcctgtgtctattatgtgtgaatgtgtgaggtatatatttatacagtgtatttttaagtttgttgtgttatgttaatatatgtatatgatatatgtacatatgtgtgcatctgtgtgtatgtatatggtgtatgtttagtatgtgttgtacaaatgtggatttgtgtgtgatatggtgtatactatgtaagtatgctttgtgtatatatgttatgaatgtatgcacatgtgtggtgtacatgctaaaagtacagtaggagttgtatgtaatgtccaggatgacatcatagtgaatgggattttgttgttgttgttcaaagcttggtgggtatagtagatgaccaacttgaaggccactaggcttgtggtgacagttaccgtttatacctgtcctcagtacccattttctgactatcacctgcttgccctccaaccacacacagtgtgcagagtagcatcccactgatatctcctaagactatctacatgccagacattgacagcatggaaaccttatgttctctttacatcctgcacagtgtcttcctcaggccttgcttgagaaagaacagcttttgttctctgaatgagttgaagcttaaattttcttctagaatatgtactgtatagccagcccaagattgcatcacaaacatttttaaatcatgacttggactattacacttgtggttctgttgagagcatatcatcctcttaggcagggatgatgtagttggtgaaggttcttagcatcatctacaaattatactaaagaagaacttcaactgactgatcaaactagaaaaaaatcttgataaaggaattaaatcaattttaatttttcttattaaaaagcaaacctggaaattagattctggcatagcaaactcaagtgcaccagggtaagttgtgtctggaggtttctcctcttgttacccttgtatgaggcttgcagatatgaggtatttgacttaatcaagcagataaaagtcttcagcactgccttggcttagcttttaagtcaagtacaagctttggatacatctgtcacaaattcttgagcatctagtttgtgcaaggcctcttactgagtctggtgaacacaatgctcctacgtttaaggtgtttgaacagaactttaacaagacctgcagttccaaatataaacctgcatttctagacgaagaatttaataattgaactctggtcattgctagcagaacatgcttctataaaacagttcaggagtcaaacccagtttgccttcattacaggtcaaaagtttatgaaaggtttatatatggatgtagctgctacagagactgaaacaccacattctttacaaatgggaatgtacgtagatggcattcatacaaaatatgaaaaagaaataattttcatcttggcaaaacactctgatcattgtgtatttaatgaggtttccacttaagaacaacaatcatcagtctctaaaaatgcttcctacttctccagacagaagacaggatagcataggacattcatcttcactagtctttggaaatagccaaagtaattgactagctcggtcttctctgatggcctggtgaccactaactgtgactatttgcataatagtcaactcttcacttctgtagtgataactgtttgtatctgattaaaattaagactgttttacttctcttgacttttccagaagttgcaaaaattgagatttgctgttctgctttaaccaaacaaatgcacacatggggataacaatatgctgactttatgcagattttacagcacggatctgaataaaatgcccactaatagacccttgaggagtaataaacacacatgaattttccttagtcgcactttaaagtgattttaacatactactagaccttaacaataatatttaattgacaagattatgcatttgtatggattgaaaaggtggtagatatctaattccaaatgaatcataaattttacttttgcataacatgttttattaatttctttatggccaggatattctatctccctcctggtgagagtttcttaaaacatagtaaggaaacttaagcacatttaattaacatttatcatctttttaagaaaattatctgacttatgtcctcataaatattcttgtttttttctggtgtatacaccatggaaagatcatggagcaatacctaatggatttttttttggccataatttgattttctcctgaagcaaattcttccttgcttggttgacattatttcaaagcaatctgacagacagaaggacttatattagggtatagtgaagactaacataatagtactttataatgaaatgaggctataggcactttatatctctagtaacctagctaccagccatgcagtgatagagacacaatacatgttttttgaagagttgaaataagatagacactgcctccttcctcaggaagtaatgctcctcctaagaataactgaggtggctgtgtgtcaagctcttcattttaggaataagaaatgagggacagtaagtaagagatggtagaaagtaagtctgttagtgtcaaattcatgttcttttctttgaaaagttccatacttagaacatacatagacaaaccaggattaaagcaataatcttcattattgagatctggtagattaaaaagatgtcagcccacttaaaatgctagtggggctagagtactcagtgtgcagtgagaatgaagaggtgtcaagaaggacaagtgtctccatcaggactggctttctctttggggtgtatctaaagaagtggtgtagagcttgtgcccattgacagacagctgctctgctcttcctcgcaaagtctccttctctgctgaataatcaaggaagaaagcaaagagagctgggctgggtggagggtttgaatgattgtcttaaggacaattgagcaaactgatttaattttgcctacttcaatcactcgtggtaatggtgtggggacaaagaaaagctggggaaaagctgtgtctcttttatttcttctgtaaatatttcaaatgtttcactatgtaatggtctgattagtaaggagaagtaagtgttgtagctgctctcttagattaacttcttgttgatgtgtaatatatggaatagtgtgctgcttagcttgtcacagcaatctgagagagggatcaagtcagtatgcaacatttctccatgatctctgcctcagttcctacctccaggttcctactgagttcttgtcctgccatccctcactgagggactgtgcttgggaggagtaagctgaataagcccattcctcctggttcctttctgtcatggtccctatcacagcaacagaaagcaaataggacaaatggtatccatgcaatataaagttagtgctttttaaaatttgattgcagaagtagatgagtgaagtaaaaaattgagttttgtaaaggatgcttttaaactataatatatttagttggttctacctttgggggaatcttcttggctaattagtaagaatttggagaattctaggggacaatgaattatataaaaattcatagctataattataaaaatttatattataattttttaaattataaaaaacaatgaacaatgatcacaaaatatcttatctattatttccccaaaaagctgagaagaggaggagaaagggaagagagaatagatgaaaagagagggaaagaagagagggccagaaggaatgggttgataaaataccaccctgtccccagcaacaaacaggagccaaagatccctttgctaatggactacagtatctacccagtgtatattcattgccttttggtgggactctgtgtacaaattctctaggagatgtgtatttcaaacctgttcctgccaggatttccctttaattactttttaactgcagccagctagagatttgctatatatgtcaagcaaatgcagacaaggttatctcaagatgtgctttgacattttcctatcctttgcaggtgtaagcacaatgttatcacaatgtggaagttctggtcttattctgagtcactggtcagccattacacagtgttcattatgttcttatacctttgttgagagtaatgggggcagattaaaatgtaaatgacactggccattcagcggctttgcatgtacctagaaagacatggcaagtgaactgaagagcttagtagatgagggctgtggtcaaccaagaggactctgtgtgaacttcctaagaaaggacagagcacagtcacctggtgtcacacttacttagcagaacacttgccactgaacaagtttcttttgggggaaaaatatatgtgggacagtgttaagcagcccattttggttgaattaccttattaactgctcttgaatctgttatcaccctccatttacacgatttctttctttcttttttcttggtttttcgagacagggttgatctgtatagcctggctgtcctggaactcactctgtagaccaggctggcctcaaactcagaaatctgcctgcctctgcctcccaagtgctgggattaaaggcttgagccaccactgggcaggagaaatggctcagcggttaagagtactgactgctcttctggaggtcctgagttcaaatcccagtaaccacatagtggctcacaaccatcctctgctaccatttgtggggccgtgggtgtgggggaaagaggggagtgggagagaaccagagtcccactagagttccggtgctctgggcgggtggatgtgggaggactgccacatgctctccacgcagccccaagtgggtgtctggctgtaggaagccacggaccccactggcgagtggtggacaagaggcagtcctaggcaccaggttcccagactctggcatctcaccctggataccttggaggagctgagaccagaatgggggccggagagtggcactgggccccagggctgacgggaggagaggacaggggcactaaataattcccacacgggcgagagtccttggttaggtccgtggctggagcacagaatggccttctggtgggaggttagacgcagctcgttaagagaaagcctatcccatcattaaagtgttaaagaatggcgggccatgatgatcagaaatagtgtatagttttagagctttattgtagaaaggcaggggagaaaggcagggaaaagagagaaagtaggagagagagaccagccatgaccatgtggagagagggggcaagggaaagagaggagggctagagagtaagaaaggtgagggcttaaagagagcgaggaggggccaagcagccactcttatagttgcctgggctatcttactgttgccaggtaactgtggggaggagcatacctgctatagtcaggcaactgtggagatggagtcttaaaaagagcgaggaggggccaagcaacccctcttatagtgggctgggctatcttactgttgccaggtaactgtggggaggagcatacctgctatagtcaggaaactgtgggggtgaagtcttaaaaaaagcgaggaggggccaagcaacccctcttatagtgggttgggctatcttactgttgccaggtaactgtggggaggagcatacctgctatagtcaggtaactgtgcaggtggtgtctagccagaatgcccgaagcttgggacaccatctgcatgactgatagtcacagaattatggacaggcacctgattctgggaacgtggctcgcctttctgtcccttgtagatttctctactgggtcactggagcaagccctattcaaccaaaattggctgcttatcacagtcccacaaatatacactaccaaatgggaccttttccttcataatctcccagaattaattactcaagtgttacagtttgctatgtactgtttggcagagagacaactcctacctgcactttaaagctcttcatataagtttcttgggccttttattcattctcctagatgttgcagtttttaaccttggaataatatattatataggttactcagctatcctcagcgatgacaagtgtggcagttagggaaactgatccctcttcactgtctgtgtactagttctgcctctctctctcagtctctgctgtctctccccaacccccatcttcctctttctttccatcatggtgtacacatattggagattttctttccaacatttcaaaagactttctccaattaaaccataccaggaattattttctggaaataaattatttaaaaaaccctgacttgcccagtctttaactcaagcacagacattaatatgtacatgatttttcaatacaaatacttattgcatatcactaaaaaaagtggaaccatcttcatgaaagagaaaatgaggccccctgagtgtcactctgtttgcatattagcacgaagccaggtctctgccaagttgctctgactgactgctacagatgctctttctcaagtattctgagtcagatctttagtgcaagtcttcagggacaaacaatagcacctgtccctcgcaagctatcaggcgagacttagcccattcatgtatctttaatgaagctcgggggcagatggcaagaaatggcatcgtcaacaacttagcacagggaaaacaaaggcatgagtcttgacacagcaatgctatttcacaaatttggaagggagcggacccaagtgtttcacatgcatctgctgctgtcttccttcctgaatgatgcgtggaacaccccaccaattaaaatttctaggcatacagcctgtatgatggagaatgtgttctctactctctctaaagaagggaaatgtgtcggtcaggggttgcagaagtgtaggacagggacacagtagtacttgagagtcgtttgttccttccagcatgcactaagcttgacctgagacgagatccttctttcttgttaactcactagataccctgccaattagtgctttttttccacagcagtagaaataatgacgttttcatgctgagatttattttggccacatcaagctttattctctgcatttataaagtcatttctttctctttatctatagaataattaaagaatatctcaatatatacaaggaaagttacaatttcaagaaagagaaatgccatctaaaatcttgatatagccacatgacaagacatgtggagactggttactctttgatggagtgtgggaaatttgattgcttttagttttcagtaaaatactttgggaagctgccgtcttccatatgactacccttcctcacatgccaccaaatgggtgagtgggacagaagtcaggatcacatttttcagaacacagaattttatttgtttccataatgcttcatcagccctagtcactggcactcagagcagttaccttagttcacagcccgcaggagaagaaaatactttgtctgctctatggttcttgtatagccaccaagccctctttcccaatctttattgcttgctttccctttccttcccgtgttcatccaacagtctgttagtgagcacaggaagagcctgctggggagaagactgtagaaggtgatacaagtaccaataggctttattaaccttgctaatttttaagacaatattttcaacacactgggcagctctgagtaagtggtagagatacaaatgtgagtccctttgtgctattatggtgtaaattctagcatcttcccaactgaaggacactggataaaggctgcctatactctcactgtattgtttactacaactgagtggaaatctacaactttgcctcaaagaactgcattcccaatgccatttagatctgctttgaaaaacccgacttcatgcttaatatagcatgacaatttgtagtagaaccttatccctgacaagtacaaactttgatcttgatctgaccttggatcctgtacatgctacatttttatttgatgaagttattctagcaagttattttagtgttgtccagctttggctttctcattcagtgagtaagaataaaattgagtgcctcatgggcttgtaaggattaaatgagagagggtaaacacatcaccttttcaatgggaggtataaggggaacaatggaagatattggccatcatcacctctctttaactaaaactcaaaaaggaaatgtcctgtctgcactcagccttcagtctaagcagtggttgtctatgctggctttaataggacactttgcttcactacatccttgctttactcataataaaagaaggacaaagtgctggggatctaacctggtagtagagctcttgctcacatgcacaaaggggatttgattcccattgcttggaataagacattaaaggcaattttattgcttggagctaaatgattatagctaatgaatgtattgtaatcagtgatcagaattagtgacagtaaataccatgaacaataagttctggataacaatgagagaaaggaggaaactatttaaaatttgacagtgctcccattatccaaaccctagaactgtctccaagaatatggtcctgacgtgcaaattactatcagctggaaacctctaggtcccttggctaaaactgatctctctttttactactactgaaatcaccatgtaataacaaacaactgtgtagagttattggcagttctggactctaggtccagctgtcagaggcagtgtaaccctagccttgtatcttatatgatcactgttagtctgtttccttgtgtgtacaatttaagaattggactaaaatgaggattctcaaggaattgtccctggccagcagtactagcatttcttgggagctgcttagaaatttccatgctccagcttcacctccagtacagattccaagttcatgagggtagggcagagccttgtcagttttaaaaaacacttgtttgtgtgaatgtacatcaaagcatcaccactctccctgaaatgttggtttacatatttggttcacctcagagcattgatcggactcagaagacatgctatggacctgaagaatttgctctgtgaaaatgctgctgatgctgttggtcagaccttatcttgacacctgttactgatgctattggccagacctatgtcttgacatttgctgctgatgctgttgtccagcctagatcttctcggagctctagtcctggctctgttagttagcactgctgctctcgtgctgtctctatcccgacttcttgactgaaacagcctcctggataatagttaccagtaannnnnnnnnnnnnnnnnnnnctatgtcttgacatttgctgctgatgctgttgtccagcctagtatcttctcggagctctagtcctggctctgttagttagcactgctgctctcgtgctgtctctatcccgacttcttgactgaaacagcctcctggataatagttaccagtaaggggtttggtgtttttaaccttgaagagcatgacagaaaggaatgaccccaaattctaactgcatatgttaatgcaaaacacctacaattatgttatttagcatgcaaaaacaaccccagggactggagagatggctcagtggataaagcatgtgatgtgcaaatgtgagaatctgagataaaatttgaagaactcaggtaaagccaggtgtagtagcatacatctgtcattcagtactcctaggaggagaagggaggcagagacaggagcatctctgaagcttgcaggtcagctagcctggcatttacagtcatcaacagcaaagaaagtcttaaacaagttgagcagtgaaggccaaccagtacccaaggttgtcctctgacctccacaggtacactccacagacatatatgtgttcatgcacatgaacacacagagtcacactacccacaccatatacacaataaataaaaacaaacacagccattttacttagatgagagtggtaatttcagatggacaatcacactcaacttctccctgtgttgtttgctcacctgatggaaaattaaatttctaagatgctgattaacaagggacactagaagccaccatgcttcatctccaggcaatccctgtaattagtcccacttcttccttttcatgtttttctagaaacttggtactggattacacaggcatagcttatctttactactttgtgggttcttctttcttccatcctttccccccacccttccagtccagtaaaactagataagggagagagggaaaaaaggataaagaggaaagagatccctgaataaagtcaagggtcagaaaatggggtgatattatccttggactactttctgctcattagggacgttgagttccttgggggatgtttgatattcaccattagtttatctaatttcttcttgttgttttcttctttgcacatgactacttaacaaaccatgaccaacaaacagccaacaaccaactaacaacaatacgccatgccccctgaggccccagcatgtacacaccctctgaaaaatgcctagaatctcaaataccacacaatctcagaaaatatctgcagctggaaaaatcacacctctgctagagcacaaggcaaatcatagacagctgccatggacaatctggagcagccctgtatcccatgtctgagattaaaacaaaaatgtatttttatatttctgtgttttttaaagaaaccaaaatttcaaaattgttactatacacaggtgaagcacagtgtctgccaaatgctgacaagtgtcagctgtctcaactgaatggtccagttagctcgcggttttcttctcgaagtagagttatggataagatctactgtcttctgtttaaccataatttgatattttcctgttaccaaacataaaaaaaaaaccaaagagctaatgttgactacaatacaatacaagtgttatgttagggaatgtgctcaggcttgagcttggttctcctttcctcacggtgactgccgggcacctagtcagtgtttgcaagtgttaactgacaggatcaggagagttaagtttttgaagagcacatggctcaggaagtacaggggacagacacttgggcttgttcactaatggagactctgccagttttcagtaaatacatgaaaggaatgactacagtcacacgatgttcttttaaaagtgtttttgttaattcttccaacacagtgcgtttttatcatgttcacgcttgctctcttctatccctacttctctacatcctcttcatggcttcttttcctttttaaaaagataatccatttacttctattttatttatatgaacatatgtatgtgtaccacatgcatgcctggtgcccattaaggctagaaaagggcattgggtccccctggaactgtagaaacagatcactgttgcaagacattataatgtgggtgctgggcacgaacagttgtcctccacaggagcagcaagtgctcatagctgctgaactgtctctccaacctccatccaccccatcactttttaaagactcatttaatacaatgttaatgcccatattctcctggttgtgggaccatcaaacagactatggccaacctctggggagtggtcacatcctttaaaataacttactccctgtacctcagaagccatcagctgtccacagctcctcagttagaggtgggagctcatgagctccttcccctgccatgttagaatgtttacatggttcaccttgggtaacagccatagttgtagtgaatacagtgaccctgtcacatcctgaagacacttttttttctcatcctctctgatctctacctcttagaatctttctgctccttcttccgtgatggtccctgagcttggtgaggtagagtgatgtcaatgttccatttgtggctctctgttgacactgtcttcttaatgatagctttttagtaatcatagaatcacaaagttggaatggctccatgtgttttatatatatatatatatatatatatatatatatatacacacatatatatatatatacatacatatatatatatacatacatatatatgtatatatatatattcacacacacacacacaccacacacacacatgcatacacaatttatgtagaagtatacagtacctctagggaaagggcaggtactgctccatctcagagccactattggataaatccatctttgtacaaagctttcctaaaagccctttctcttgagatttattctgtccctataattgttcagtctcagcaccatcttttatatgtggcacatagcatcttatcctttctctctctcttaagctgagtagcagtgatttctttagctgcttctcaaacccctaagacatagtagcagcttatttcattgttacatgaaaaaaggaagggaggaagggaggaaggaaggaaggaaggaagacagacacacacaaagagagagagagagagagagagagagagagagagagagagagagagaacaaacaacatgcagaccctcactcttctgtgttgcctcctcttcagggtaaggcatttatatggtgctctaggcccatgctaggaccacattttctgtagggatgtgaagggatgtcctttgacgagtagtcactcataaagacatnnnnnnnnnnnnnnnnnnnnattgtcccctggccagcagtactagcatttcttgggagctgcttagaaatttcccatgctccagcttcacctcccagtacagattgccaagttcatgagggtagggcagagccttgtcagttttaaaaaacacttgtttgtgtgaatgtacatcaaagcatcaccactctccctgaaatgttggtttacatatttggttcacctcagagcattgatcggactcagaagacatgctatggacctgaagaatttgctctgtgaaaatgctgctgatgctgttggtcagaccttatcttgacacctgttactgatgctattggccagacctatgtcttgacatttgctgctgatgctgttgtccagcctagatcttctcggagctctagtcctggctctgttagttagcactgctgctctcgtgctgtctctatcccgacttcttgactgaaacagcctcctggataatagttaccagtaaggggtttggtgtttttaaccttgaagagcatgacagaaaggaatgaccccaaattctaactgcatatgttaatgcaaaacacctacaattatgttatttagcatgcaaaaacatgcatgttcacgcttgctctcttctatccctacttctctacatcctcttcatggcttcttttcctttttaaaaagataatccatttacttctattttatttatatgaacatatgtatgtgtaccacatgcatgcctggtgcccattaaggctagaaaagggcattgggtccccctggaactgtagaaacagatcactgttgcaagacattataatgtgggtgctgggcacgaacagttgtcctccacaggagcagcaagtgctcatagctgctgaactgtctctccaacctccatccaccccatcactttttaaagactcatttaatacaatgttaatgcccatattctcctggttgtgggaccatcaaacagagtatggccaacctctggggagtggtcacatcctttaaaataacttactccctgtacctcagaagccatcagctgtccacagctcctcagttagaggtgggagctcatgagctccttcccctgccatgttagaatgtttacatggttcaccttgggtaacagccatagttgtagtgaatacagtgaccctgtcacatcctgaagacacttttttttctcatcctctctgatctctacctcttagaatctttctgctccttcttccgtgatggtccctgagcttggtgaggtagagtgatgtcaatgttccatttgtggctctctgttgacactgtcttcttaatgatagctttttagtaatcatagaatcacaaagttggaatggctccatgtgttatatatatatatatatatatatatatatatatatatatatatacatacatatatatgtatatatatattcacacacacacaccacacacacacatgcatacacaatttatgtagaagtatacagtacctctagggaaagggcaggtactgctccatctcagagccactattggataaatccatctttgtacaaagctttcctaaaagccctttctcttgagatttattctgtccctataattgttcagtctcagcaccatcttttatatgtggcacatagcatcttatcctttctctctctcttaagctgagtagcagtgatttctttagctgcttctcaaacccctaagacatagtagcagcttatttcattgttacatgaaaaaaggaagggaggaagggaggaaggaaggaaggaaggaagacagacacacacaaagagagagagagagagagagagagagagagagagagagagagagagaacaaacaacatgcagaccctcactcttctgtgttgcctcctcttcagggtaaggcatttatatggtgctctaggcccatgctaggaccacattttctgtagggatgtgaagggatgtcctttgacgagtagtcactcataaagacattgtgttttgttttctggtatagaatttcccactttcatcttggacatctcacatttgtacagggtcatagcaaactggggttgaacagcaaacctggtatttttcctccaggctaaaggtgaggcacgggcactagaggttcagctccaatttaaccaggcaaagtttgttctctcatgtacaaagcttgggcttacctcagctaaaatagaagaaatagctgctcaaagctactttctttcacgccccactggcaaggtagtaattgcacaaagacctttttattataacttgattttcctgagaaatgaattcagaaaaaaaatactgtaaagtgtttattttttgcttgccctttattaacccacatcttagggcattcccccgagaaagactgctggcaaatggaacctctcagacccacacagaagcatttacacagtgtccctggctgtgaagggacagagacaggagaaagtaagctggtaccatttagacaggggcatcagctcatatatgggatttcatctaaagaaaagatttaggaatttagaggatgcatttggagtttgtagaactgctggaacacatttctatcttaatgtttagttaagtgtataatgtagtcattttgtgtcaccgaaagccttagatctgtctaaaccaaaagactgtgccttttgacgcatctctgttctgatctttaaatgaagaaagtcccgtggctccgcctatggactcaggccttaaaggccaggacaaagcttccctgctctgctctgctggaaccagggcagcttgctagagaaaagaagggaggtaggaaattaaaatgtgattttcaggagcatgattctgtcatagctctgatttcctttatatagagcacaaatactgatgtagactgaatgtttttctcttttgcatttttgtggtctttgatacgtttattgaggtcaaatgaaatctgatatagtaggatttattatgagttgctcagtggatacaactccataattactgagctacatggcagtgcataaagctgacaagcaatttatatgttacagcgaggtgtgtatggcaaaggatattagtttaattgggcgccaagatatagtagccttaaatctgaagcgctgtgtgtttaatataatgcagtgaggctttggaagaagctcatggatgagggagacacacagcttctggaatatataacaattagacattactttctggccacggatgctaaatactgttttcacagtgaagcttagaatgtagtgcaggggaaagggcagaacctctcacctacagggtgagaggaaagcagagcatttagttttcctgctctttctttcacaaaagaagtctagaaaaacaagtcaagagagaagaaggccactgaccaccttgagatgaaagcagggatgtggtcagtctctggtaagacggtggtctgctcacggcaggcagctaaggagaccagttaggtggagtttgcctgagtgttctcagcttcagctctgcaaagaggtttgaagtgggcggctgtgtgggcagcagagcagctccagcaatgggagacaagtgcttcttggtaacatctgctccctgtctgatcacaggctctcttctgtttagcaggttcaggggcacatgcctccgctcatgatcccaatttttccacatgaccagcggaccttggcagcagctgctgctgcccaacagggattcctcttcccccctggaataacatacaagccaggtaagtggagagccgcgggtacaatttttggaaatgctcgggcccacatgtttttgcttagtagtcacaacaaacacaggcacagacaagggagctatggataaaaacaccataaaagcctatttcaaagtaaaaccagagctggggggggcattgtcataactaatcggtctctagaacttttacttctctcttttctcattagagtttatttcgaactcacatataaaagtcccacatggttctcactccattacccttaaccatttttggttgtccacaggtcttttgcccatcttgagctttcacactgggaaactggtcatgctgcctttgggttctgtttacgttttttttttccttttcttttcttttattcttttttctttcttttctttctttccttttctttttttttttttttttttccttttttggaaaatgtcctttgggaaaaaaagttaaaactgctgatttaattatttcaccactgatgggtaaagttcttttttattttggtctaaataatgaagcattcagtaatagtcttcattcatccttgaactcaaaaaaaaaaaaaatcaggtcatataaccttgtagtgaaatgtgctttgagatgatttagcaaatgctatgatttttcttttttcctctgagtttcctggactcctggggaattcaattaggggcataatggtttgaagttctttcagagcctccttgtaaacatggctttaaatgtttaaagataggttgccaaaggaatccaacgtaagaaaatagccaagtacacagaagccaacctcgatttcatttgtgcgttctttgtaagtgaccccagctcagaggtagtgaccttgttttgctcattaataattcctgtgtcaagttccttttaacatattagcctgattatatgaactacctagtcagggtacagccaatctgagggcagcagttcctttatatgtgtggcttagaacatgaacaaaggcattttaatatgcttaagccacagatataaaccacctcactgagattctaaggaaactgatgaaacagcccaaaagcaaacttacaattaaaacggcttctgaccatagatgcctctctgtgtttggtagggaactcaatttcctatgagagaaggaatctgggggagactcagatgatccagggatactgattctaaggatgggtccctctgagggctgattaaaaagtcttcagacacaaacgagtcaagggtgagcattctggtttcaaaaaagaaagtattctgaaagtggaagtagttggtgtcaagatgacattgaaaagttctggcttttaaaacactatatatcatttttttcttcattggtaaatctatgcaaatattctaaaatctgaggtagttctggtttccacattttagactaagggtcctggatctttattcccatgaggtttctagaagtcacccctctctatagagttggtctttacattcagtataagagaacatgtgttcatcagtgttcacactctgacctagttctttatggtagctccattttgaacattgatttaaactaagctggctgtttgatcttgatgctgagctggcaccagaattcagtaatagtcttcattcatctgacccagtcttgggaaccttgcagtaaaccatacacaaatgttatctgttggttgagtattcttaccactagttctttccccagctcaaaaccacacaggggccttgtttttgctactgtagttttcttatcatcttgttatctaattttattactgcaatgacattatttctcataggggtagatattgctatatgttcagtgaattaaagttgtttctcctccaaaggtattgatgaggttgtaccatgttaggtgaacaagtatggataggaacaactttgtacaggatttagtgactcagagttgtgtctttggatagcaaatctgtgtttggttaggctggctaaacctgttgagagcagtttagtagggctggatttgtaggaagattctcaattataggcaagctgttctctcaaggtattttctattaaccccaaacttatataccaaaannnnnnnnnnnnnnnnnnnnctcccgccggcgcctgtgccacaaacctctcagccaggcagaacccccgtgctctcaccaggaaaggtggccggctgtctggagctgaagatggcgccgcccagaagctctgcgactctctcgcccgtcccagaaacagctggcactctgtattccacacggtcacccgtgcagcctgccctccgcggagtcccggagccaagaaaggctcccgccggcgcctgtgccacaaacctctcaggccaggcagaccccgtgctctcaccaggaaggtggccggctgtctggagctaaagatcggttgagtattcttactactagttctttccccagctcaaaaccacacaggggccttgtttttgctactgtagttttcttatcatcgtgttatctaatttcattactgtaatgacattatttctcataggggtagatattgctatatgttcagtgaattaaagttgtttctcctccaaaggtattgatgaggttgtaccatgttaggtgaacaagtatggataggaacaactttgtacaggatttagtgactcagagttgtgtctttggatagcaaatctgtgtttggttaggctggctaaacctgttgagagcagtttagtagggctggatttgtaggaagattctcaattataggcaagctgttctctcaaggtattttctattaaccccaaacttatataccaaaacaatttaaattttaaatcctttagtactttggttaatcaaatcttaattatagataaaaaattatgttggcaatggattaaaaatatacacgcttaagctatgagtagagaacttatagatttatgcaactaaacattgcgacctttttgtcatcacagaaattgggggaacagtattgggttgagtccggacaagcaaatattttactccaaactaaatcatggtcacttcaattaaaatgaacatgagcagctactgtatttggagaggagatacatagtcctgaaatggcacgcgttcatacctgggcccctaagtgnnnnnnnnnnnnnnnnnnnnattgatgaggttgtaccatgttaggtgaacaagtatggataggaacaactttgtacaggatttagtgactcagagttgtgtctttggatagcaaatctgtgtttggttaggctggctaaacctgttgagagcagtttagtagggctggatttgtaggaagattctcaattataggcaagctgttctctcaaggtattttctattaaccccaaacttatataccaaaacaatttaaattttaaatcctttagtactttggttaatcaaatcttaattatagataaaaaattatgttggcaatggattaaaaatatacacgcttaagctatgagtagagaacttatagatttatgcaactaaacattgcgacctttttgtcatcacagaaattgggggaacagtattgggttgagtccggacaagcaaatattttactccaaactaaatcatggtcacttcaattaaaatgaacatgagcagctactgtatttggagaggagatacatagtcctgaaatggcacgcgttcatacctgggcccctaagtgagaatcagaacacgtacctctctggtttttacaaaatagaacataaactcctctctttttacttcccccactcttccaagaacagccatattttggtgtttatgagccaagtaagctgatttactggttgaacaactgtcctgactaccagaagtaaggaccatggtgggggggcactcactgcttattgaagttggccattttggatcctatgttagagtagtgtcacaaatatttggggctctgagttatcactcccatccaggtgatctgacctgcatctctggaaactgtagtatgccaggtatggtgcataccacatgagatctcccacctccaggtagctgaggaggcacagtgccaggatgcagtgcaggactttaggcagcagctcttagactagcttctctacaagtagctttactaacttctgatccttccatctttattcttctattagtcttatcattagagacatctttctagatagggatccactggggccctgaacatataggtctcagacattagctggtctgcttcctcacattgtgagactgagatgcagtggtcagggaggcagtaaacacacttgctcacggacactagaaatcaaagcaggaagcctcctccacagttactagtgtgaacttcagaacaaggctgtgcctgaaaaacaaaatcatatctactctcctttgcattaggcagctgaacactgtcacgtgtagctgggagtttaaaactatcatgtgtgaccagcacccttgactttcctcagatattctaagaacaggatgtatgcttgtacctggacctacagattctccatattccatgctagtacctagagcttactgtactactgccatgcaagagaggcatatacaagatatacaaattggatgtctgtatcttttgccagagtccgtctagtttttctcacaccatttgctgaaaaggccaccctcttccttttaatagttgtggcacctcctcaaaaataaaacaagtgtatgtgtgagggtttgtccctgacatgtccattctgctgtgctggccagcctatctctatgtcagtgccacattgtgttagcaactgttgatttgtagtcaatgttgaggtgctagtcttctgctttattcaccttttgaaagatcactgcagttttgagggacccttgtagttccacataagcctaaaaattcatttctccattttataaaaaggattaacagggattattatgtatattatacataattataacgtaattataatgtttattataatgtatattatatataatattaatatgtatatttctctgaatagtattgacatcttaataatgtcttcttgtcaatacagatatttctttctgtgtatttctgtatttcttattgatttaaaaaaatccactgacaaatgaagattgtatgtatgtatgtgtgttgattcatggctagattttacaatgctcagtcaaggaaagccagctatcttctctagcatttgtaattttttaaaatgccaaaacacttaaaatcctttcttcctttctgaaacatgtaacattccattgtcatgacccacaatcatgcagtgcagtgggatgtcaggtctcagttctcataactgtaactgagtacctattgatgagacagtactcacatcttctccccttcaagtttcctcgaatatctggcaactgctattctaccttcaatttctatgggatcaactgactttagatttgcacatatgagcaggcacaggccatacttgtccttctgtgccttggtttatttcacttaacacaatgttggccagtttcatgcatgtcgtcacaggcgacatacttggtgaaatagtgttccattgtgtgcatcccacatttttttccccatttttaagttggtggacacttaggcaatattatgctttcattatttatttcaacagtgttttatagttctagggtgtaactgtttccatctctttggttagatttatacccaggtgttaaattcttttaggcggtattacaaatgggctttctttatttccttttggtttatttatatctattcctggcacaaataactaaattgagcttttgtgtgttaatcctaatatgtctctctctgtctctgtctctccctgtctctgtatgtgtgtattctaaaatagaccttttaaaaaaacttttcttgacagtttgtatatttttctatattcttcttgtttagtaatatggggtggagctttcaaaacagtggtcaattttcttgttctttctgttagaggcaaagctttactggattttgctgttgatacagtgttagctaggaatcataaccctggttgttctgagtttgttttcttgtagttctaggagttatcgtagaaaggttaagcatgttttctgtataattttgagatgatcatgcaggactctctgctccccccacccttgttctattattttaatgcatttcattgatttgctgagatgaaaccaccttataatttcttggataaatcctacttgttatggcaaatactgctttcaatattctgttagatggaatttgcttgttttcttaaagagattgtgtttacattcataaaggatattgattttcagttttcttttcctatgacattcttatctgtcatcaaggtatttggggccccgtagaacaaaggagaaacttctctctcctcttttctggaagagcacgtgaagtggacgtcttagctcagcatttgacagagtgctagggaatccttctaatgcactcatttctttattaggagcttggattactagttcaatatctctgattgttatgggcctgttgagattttctatttgcacgtgagtagttaggcagtttttgtgttttctatttcttctgagttgtgtaattggctggcatacaatgcttgcagttgttagctgatgtttcttttattgcataccatttgtttgccaagataaccccgtgtgtgtgagtaatctcattaatttttatatcaaccctaagatataagtgggaataagtggtattctagtttattaaatgaaaagaataaactaaaatttttagtgttaattaagttttctaaggcttcatacctcaaaaatgatggcatccgcattcagatcgaaagttctctgaatgggtagctcatgttcttgaaacatagtctaaatggatatgatcttaaggaactctaaattttttatttagaaagtaatttttcatgtgggcttatccaaacaacatcttacaaagccagtcattgctgtcttccacaatatttcagagtagagctgtgtcaccaacacagggacactggttacttgaacccacatatctaggacaaacgcatcttcatggtgctcccatcatttgcctctgcttttagtgtgagtgctgaggtccagaaagaagacatactcacctgtccaaagcaacctgtgttataaacaccgaggttgatttcctgtgtcctctcatgtttagagattctgtcacagataaactgttgttagacatgaactttgagttgtcatctagttgatttcttatggagatggcttgtatctgttaatccatactcactcacttaattgccctcatgacaacgccctggtttttagaagattggccaagggcataagatgtggtcaccaaataattgaagggataaatacggtgcatgattcttaggtttttaaaacgcatgtagaataatctatgtgatagttaaataaataaaactaagctaaaaatattttcacctgtaatactctttgatgaatagaagagaacattagcagagaaatgagaatatgctgctatcaacaattctaagtttttgtgccctaaacaaactgaaagtattgtgttagtttaaaactgactagtttgaaacaaactgaaagtattgtgttagtttacgtgtggggggcttttgggatagcattggaaatgtaagtgaaataaatacctaattaaaaaacatgtcatattacctgaaaacctttgcagcaatatagcagcacacagggataagtctggacctcctctatcttctcagaggaccaagagatggtgttaaaagagacacaacaaagtctatattagaaacgtttgtatattgacaagaacatgcatagctcacgaaagtatgctccataggtttgtcaacttctaatgatgccaccataataatttgtgaaggtatggatgtgtaaaatattgctcttctctgttggagggcagaaaatgtgataggagactttattcccatcttgatcgagttactgcagaaacggagtcctcactcctagttctaatttccttcttccctttgacccctcccaagtctccaaacgactttcacagtgtattaatacctataattaacaatcttaggatctatgaatctcccaatatcttgcctttctacggaatgtaaataagtggacagaattttgctcttgagactttgactgtgtcttcctgattttttttttgaaagtaggatttatatatgaaatgtacctagtaggaacattttgggaggtgtctggtgtgttctagagtcttgaaataagttctcctcctctagagagtgattaagagcttgaagatttggccacatctggatgtctctggaaattgaagaatttactctctcttctcatctctctctcaattgggatccttggtgaagaatggatgctagaggaacattgactgttctgatgaatgcgccagtgtcagccacattcacctgggtctcaattctgtttagtgtgtgctctgcaatgatagctagaccatcagaagatgggcttataggatggcccttgcttcttttattggtgtttgtggactgactgcttagacttgaggtaaaaaaggccagattacagtcatgcctaagcgaacctgtttcaacaggctacctcttcctttgtacaaatttaaaaggaatggtcctcatgcaaacatttcacatccagagacaaatttgaaaaaaattgctgcaacatgttggctgattccctgccaagtcagccactgcaaacttttcttgatcaactgttactaaagaaaagtagggtgggtaaaggaaatgtgtaactttgatatcacaaactagactcacagtgcccaaaaatccctctccctggtacatttttttttcttctacaactaaccgtcatccccctctcccggctttgtgctccccctcccttctaatcatcctcagtgatatactccattgctctaatagattcattttgacttttagtactgatacaatgatgggttctggagaaatagctttctgaagatctattcagatatgcagattcaaacccgcagaaaggttaaaaatattttgaaaatatgcttgtcaacagtggaaagaaagctgtttgtagccagcaggtgagctggagagtactacagggtgtggtagagacagtcataaattaactggcaagccagaaaccatgtaaaaagccgactatttcacggcacagtggcatgacagctatggagaaggagtgccctggggaattctttcagagtttgattttttaaaatatgtttgacatgaaaaatgttttagtacaaataaagccactggtattaaacttctagggaggggattgtggtgtggagttgcatgaataatgcatgacatttaaagaaagaacagctttaaaatgtttggggaggaggtctgtgctgatgggtagaatggttattttttccctctatttttgaaacatcattaattcagtatcatttgtggtttttttaaagctgataagatagccaccaaaaaattaccatttgacttagatcaagatattttttcttcagataatttagtttaaatatcaagaagatcagtagacttatttaagcataaagggatagtcatttactataaaaataattttgccaagttgtcttttttaaaacgctcctagagtggggcagatgaaaatcagcctcatggaaggggaaaaaccagatcagacattttgaacattgctccataggagactggcacaatgtggccttagcgagtgcattgtagcggcactgcgtttgcaatcagaagccaattgttactggactgtgtacaggcgcacactgtgctcaatggtctgatgaggtattatggatatgatgcaaagagaccgtgtagatcagaagctaacaatttgttaaaagtgaaagcaacttaacatttacattgggccagctgagtagcactttacatggcaagcagggatgagttgtaagaagctaggggtaccagacacgctgtgggtgttagcatctatgcagacaggaaacaagaggttctcctgctttctagttgacaaccccagtgcctggaattcttcttgcaatgtctcttcattattacattcagcgttcagtgtggaaaagttcatgcaaaacagcatgattattataaatgtcaaaaatgtgtgggggagcagcctattaaaatatagcctagagatagtatataacactgactttaaataagtagctggagccagcatgctactacattaaatcactgatattgtgtgattcacccacaaatattaatttttagttcacttaccacaattccaatatgtccttcatcctttcctcttggctgtatgggtatctggccatgcctgtgttctcaggtcacaggaggtgtttcaacacaggtaggtattggcttgggcttgaagcgccttactgtaaagcataaagaatactcccagtttttcagtgcaggcagcccatgcagaatgtgaagtaattgcattgtcatcaccaaaatgcttcaatcagtgccttgtgtgagtgactgtctaccaggtttcactatagtaccagtggttaaaccaagacccaaacttcccccatcagtagggtaccagcattttagggtaccaacaggtaagattggccatattaaaggggatttttttcttatcgctttattttctatggaataaaattgagcattatggcttgtcatatctttttttgtttgttttttttactctaattctccattttatttaccaagtccaaactttctgtttctctaagagaaaatccacagtgtgctgagcatcagcctggctttaatttatttattttttttacacttaaaaaaatgatgtattacaagatttgtagtggagcgaacatgcttgaattgcacatttaatttttttcaacatcacattcatgttttgccagtttgcctaccagctatctgttaacaaaaagttccaaggcggcagtgcaagcctgtgcccaactaagccttttgtttctgcagatgtttgggcttagggcaatgttgtaaagctcaggcgatccaaggaccatgtttatacttgtctgctgcgattccctgtgcattgtctaaacctgtgcgcattgttctttccgacaggtgataactaccccgtacagttcattccgtcaacaatggcagctgctgctgcttctggactcagccctttacagcttcaggtaagtgccaggaggaaaaaggagtgtgggagaagggccagtgcttgagtggaaacctgcaatccagctgtgttctaaataatggcctaaatgttaaataattttttaagcatagtccagagaattaacaccttctgtacttaacatgctgaaatggaagagaaaggtgccagttccagccggctttaaaggaaatccgatgttacaatttggttctgtgattctgtgtgctctctcttagcaaattaagagttttacattgtttaaggctagttgttgtttgaaggtattagcttttttcttatccacgtttcatctgggtttccattatacacaggtatacagacaggctttttttttcccatcagctttagaccagagacaatgctgggcctcttgctccttggagctcagggaataaggagtcattattcctgggtactttgattatttagcaaaatataaacacactgctcccaagtctgtagtgtgaccttgttcttgccagggttaaaggtctaggcatggtgcccaactcagtcctggatcagtgtctcttgtttatcaaggtaatcatgtttggaggctgactgaagaattattgcaccgtatgttcctcacagtaaaatgaggtatttaaaatagttctgcgcagcctttgcacacttaacaccctcgtcagagccatgaattgactttaaatatgaatagatatcagtgctaaaaacaaaaagagtcaaactcttagtattaacatacttagaaatacataagttaagtttccatacagttcaaagttccttaagggcagtttttatctgctcttcccttttgaacccagggtagagcttccggacagacagcattttcgtgttgtcattgcctgtgcaatttgaacataaagggaatgtcattgtcgtatggaaaggaaactacacacacacacacacacacacaccctataacactttaaacattttcagttgggtcaagaagaaaagaatttttgcaacacccgagaagttttagtcacaagcctcctctggtcagcattgaagctgtccccattagaggcacctgggacagagacagcttgctagcagatggccagccacttctctcacagacatttacctttcacactcccaacactgggttccaagcagcataggaagatctaaaagaaaccctcccattggtggccctactttggtcctcctcatcccactgtggagctagctgtactgtggtgctttctgggtttagagacagaggttcttttaccagtttctataaaacagagaccgggtctgggactacgtgccgtcctttgatgtggtctataccctgcattgaattccatgttgtttcatgagttctgacagtatgttttgtcttttttttttctgaatatgccattaaacagaagggtcatgtttcccacccacaaattaacccaaggctaaagggcataagtgaccgttttggcaggaatttggacccctctgaacatggtggtggccactcttacaaccacagacagattgaggtatgaatgcttctgttggtgcttctttgggtggggcactggatgtttccagcatattttaggccttttgaaaagtggcaaacagcctgaatgctaaagccaatctcctgtctcctaaccggaaggccttaagctaggttctattctgcctttttctttcgaggagcttcaaagctgttgttccacactcttacccagtctcatgtagtatgtcttatgcttaacaaatacttaaactttaaagattatttctatttgaccatattcttccctgtaaccttgatcaactataattctgattctagagtcctacagttaagggatagagcggtcctgagagcccaccacagctgttaaatactcggggccttactcacagctgctgactctgcctgagctgggtttcctgacttagttttcataggctgaagttgggtgcctgggcctggctgagtcaacaagtttctcaggtgttctttaagtatttaatcacccagaaaacctttttcagtgttgtgggaaattgaaatcatgtccttctgcatgtgtgatccctttagaacatgaaggccttctctgcaatgggaacctggcccttctctctgtggtgtctgatttgactgcatccctctccggcatcgatcattagtgtccctttctggctctttcagatatgggagtgttgtaatgtagctactaattaaaaaaaaagattaattttcataggtgagaccaagtaccaaactttacaatctaacttagatactttacccattgcactcctctaaaaaactctaattgtatgttattcagccctttggtcttatcactgtagacaggccagctgtccttgacctttggcatgatctcctctgcctcttttcagtccacatacttggaaatgatggtagatactgaggtggtcatgcctaaggaggaggacaagataaaaggccatcttgaaacagccaaaggaagagttgcaatgccctctgtcacctccctgctctttgatggggcaggagactctgatatgactagacacagactggcatgctatgccgacttctgcatagccaggaaagctttctttcagaggcctttctgttggctgtagaaatgcgtccatgttcctgagcagtgtgaaaatcagctcattccagaaagtgctaaagaagggtgtatatagatgggggcattctttctgtataatggtaggtagcaagctgacctactcagaacacccagcccaaggagctatgatgtgcctaaggagactgggaaagcaggggatctccgtgcaagctctttgcctttggttctctgtagagatatcgtgttctgtcccttcctctcccttcagctggggtctaccaaatactataatttacctcatgcttctctcctgatctcttccctcacaggcacatatgcctgctgtatcaaatctggctcccggaaaccatagtgtcatagcttcccagagtcacagtggtactggggtagaagctaggcagataccacatgtttgtcactctaattgggctcaccccatcctatgcaagagcttttacagctttgtagtttaagtgtatctggtctgagagtatcctgggttttatttgtactatgttctcttgcctgcattttaaattattgatttaattaaaaatttcattataaagacatatctttattgtgatgaactcacaaataaaaatgtcagatagctggtttaaggaacccatttccaaattccccgaatctcagtgaacttctgtacagttatattggccacttgagctttgattagggttttgcacttactacagaccacattcttatgcacgtatccaccccaaaaaagaagaaaacaaagagtcaaaactagaaaacaactagctctatagccccttgcgtagctcattgtcctttctgcctgcagcctgtctttccttgttagctaatgttaccctcccttggtttcctttctaaatgttacactttatccacttttataattgtctacatgtagaagaatatacatcacaggctagatccgcatccatgggaggacatgcggcttccattaaaaaaagtatttttctgcatgtcaataagcctttggagctggttacacttgtatgaaaggcaggtcttccagattttgtggcctgagcacagcatatttactggagcatctttaaacagcacagtagacacctgcatctaaactgctggacagtaatatgtacaaaaatattaggatatttagagagaaaactttatggtaacttgctttactgcagttaaatcatggcctctttaagctggggctttgttccttcctgtggtaagttaatatgtcatgtttctgtcaataataggggtcatgataaactgtgacagtgccaggatttctttacaaggagagtgtcctgggagaagaactctacagcatactgacccttaaccaacacagtgctcagggcttgctctacctgttgatttcccttcagaagctggcatttctatggtcacatgtctgcaaccctagcaacactactcatattctaaagtctgaaaatttgcatcaaggagaggaaaggtattaaaaatgggatgacccttctgatattagcatattctagctttgtctttaaattaaggaagacaggaaaagctgttctaatctaagctctggtcatctctgcctcaggggcacaatatcagcagacaggaggccaaaggtgctatttttagttaaacagttcagtagatagagcgacaaatactcatatatctgaaggctgaggtgcttgaaccattaattttgataatgtatttaaccctgggaactatgggaaactgcaactctaaggttacaaagcttttgacctttccagaacagagggcactttcctcagtaaacaagatactatattgctactcactctagggcgctcaccgtatacatttctgcaccatttgccatttgcttttggtagctatgttagcactggtccttaagtaagtcaaaaagaatgttcaggaaaggggaccagaataatgaggcaatcatgtaactatggcctttaaatagatacagttagattctgtctgaagattcactgtcacaaaacctgagttctggatttcttttctatttatagtatattggttcattttacctgattactgtcaatgatagatcccagtgtaattttgctttgttttgtttttaattgggagcaatgctgcctcatagttgtagcttatattaaacacaatctggtaccatatgcaaagtgatacacctgcctcatgccttcttattaaatgatgcatgcttctcttcagcaaatccagcagttaaataccacacagcttaagaatttctaattaaaatatctccacatgtcagcatattggtaatgtattattttaatccatttattttgtttatgaaacagtgacatatgtttagattgtgaaatatatgatccttaaaaatcattttattgaagaaaattaattcctacagaactgtgtgggtaatgtgttcactcacccagccagcctctggcaatgctgccagtcttaatgtcgagtcggctctacagctttgtccatgcgcagtcttgaagggagcctcgtgattcattttcttatcatttcttttcctctttttcttgcttatgaattcaaacctgcccctctacatacaccactgaacacttctgctacccctttaaaaatacaataaatggtggaactagatattatataaatgattctgaaagagaaatcaaaattaaaactagctagctaccttttcaaagttagacagtaatttgtttgtcagtggggagatgtttgggtcagccctgagataaagtgactgtcagcagttattcctccaagacaagtaatttccctcaatgcattgctgacagattgctcacttctctgaatcaccagaggaaacaaacttaatattgtcacggcagagtttctgtcttcattagcccctgagaaggatttgtgagcattcagagccaccaagctttagttggagcaaattttaacagactggttcctatagtggtagcatggggagtagcctaaatgaaggaattgggtgtgcaaattaaagacaatatcaatagaattagatttccaaatttgttggttagtctgttttgcttagaggaaaagtcttgccaagtttacaaagatggaggagcatattgaaggctttgctaaaatgaaaaggaacatattttttaaaaaacaatattgtcaaatttattgcttcatgtggaaagagaaactgttcccatttgtgtgggagagagactcccttgctattttaactctggcttcatctgttgtgtttaggggctctctagctgctaggacggtgtcttttttgtgacaattgtaaacatgcctcatgtcagggatgtggatgctggtgcaggttagctgtgctggatggcactgagagttaatacagaggtgatcagagatgcagagcactacccaccccatggaggagagggaattggttgattctaagcttgtcttgaggataccaatcgcgtggctgcattttaaggagaaatgcttgccttgtattaatcagccttcacaaacccactcctcagcttcttttcttgactttcaaggggtatgagacttgatagaactgcagcagctggatcccatgtgccctgagctaatgggatggagccctaagctccgctccctgccattccttacttgctgtttgctgagcactacttccaaaatgcttacttttgttagcctttttatagtgagaaaagatatatattgtgtgtgtgtatacacatatgttcgggattgtcatgaatagtatataggatcataaatcatatttccccaaatgctggcaactatataaaatctttacaatatcaccaagttcctcattgtcatctgactgtcaggcactgaacttagatttgggttttcttttcttttcttttctttctttcttcaatataaaatccccaacattacttggcattgcatttaataagatgaacaagagtgaacaaattttgtctttggtggccatcacatctaaccttctttaacacttttcttaaaacatttggtcctatactctgtctgtagggatcatataaattttcacttgcagattccagtttaagaaaatttgcatgttcttgaggaaccccaacagaagctaaaggaaatataagcaagttaaagggagatacagaagcattctccagcccttggacatctgactggttattatagtttacaaagtcaaatttgtactcatctactatctgtgtataatcaaacaataggtggtgggagggttcctttaagatgattgattttcacttagttttaaggcagtgcaatgaagttgagagagttggctcttctcctatagaccctgataccttttgtttgttgtctgattcttggggcattagactataccctcagagatagttcaatagaagacagaatgctggaagcacaaaacttctactaatatgaagagccccccatccccatcaagagtcattcacctccaaccccatctgtcactcactccacaaccaagaatctcccgctatgcaaaaatggtcagcccttacttatttgagagcactacaatccatgaatccaaccatccatgggcagaaaaatgtcttgaaaactgtgcatctctactaaatgtgcacaggttatttttgtcatgactccctaaataatacaagtatagcaagtgtttgcatagcatttacattgtattaggcattatacaagatctagagatgagctgaaggacaaggaaagatatacagaggtcctgttttatagaagggtcttgagcctccggagacttaggtatcaagaaggggtgagaacaaatccctcacaactactgagggacagttgtccttgcatgtaaatagacagtgacaactccttccccaagaatactgctatcattgtgtccccacataagcttggtagcattttggattggtattgtctgcatatgtctatactggaattagagcatgagctgactgagcatgtattagaaagtttgaaaaaaaatcctgtgtcagtagagactttcatccggttttcaatgacaggatgagtgagtagagccaacagttacaccatttatatatgggaaagatatcacaagctaatttgatttgtcaggtaacagataagagtgatcaagactaaaccattcttagtgatatttaagtaaaagagactgagaagcgggacagggtcacaggtttctctcatgtcttagcccaactgcactacaaaacttctgcccatgaaggttggaatggattggttagccttatagagctgcctttctgctttacccctgggagagttcatatggtttacaggtttgtaagagtccacccaattgtcagtacagggaagttttgtaatatttcaccctctacataattgtttgaaaccatctcaatttattttgactattctagaatttaaggcttgtgataatgagttataatttttcacatattatatatttagagaggtagatataacttaaatgttactaacaccctcatttctcagttcattgtaaacatcttctctgtgctgaagaatacacatataaaaataaccactgtatgttctagtcactataattagtgagagtagcagatatttacatcaaaattttgagaggaataaacactcccttgacccggctttataaacagacacaattccattatatcaataaacaattaatgcagaatttgtactcttgtttaccagactaaaaagaataaaagctgagtagaactgaatacattttccagggtctccatcttcctgatcagttggtgaggcaaatatttaagctggaattttcaagttctgagaggttgtgtgagagtccatttggtaggctgtatgggagttctcttattgtcttttattgtcctgttccctttacactagtgaccatacctgtgaccatcacttggcattgtgacagagcttaacctcgtcctcatctttggtgccttgacggtaccgtctctggaggtattaaccttgagcagtataaaggaaagcagaagtaaaaacacgtgtatgaagagcagctatttaagacacatccttcacttaactgtctcacctcctacggggggcagtctattatgcttgaatccagttgggttatctatcaactgtttactaatttacctgtccagttaagttaaataatgaaagaatacatatttaaaaaattcatcctactggtcgatatggaacaggtggatcttggaggagttggggaagagtgaatataatagaaacattgtataatattcttagatgaccaataaaatcaaagttcaagtatttgcttgaatatgaccattaaacttaacacttattaagctggtcacagaggcatatgcctgtaatcccagcacttttgcaggaataaagagttcaaggtcagctttgccacatagcaaattttagcccagccagggatacataaacactgtaaaataaataaataaataaatcccacattaaagttgttttaagatatatctttaagagagtctataagtgatttgtgctcagcaagtttgaaaaatgaaatatatgtgtgaaaacagtggttaccaaggtttggggtaaagagggacaggacaaggcaggcatggaaactgtgaaaatcctctgagaatataaagtcatacttggtggaacatagagcatgtgcggctctgaatgacgctgctgtagctgagcacaccagttgatacggctcatcctcagtaagtgctccactcggatgaggatgctgataatggggagagcatgtgcacatcagggctgggatgcaaaagctctgtgccattgtaactttgcagtcacactccaactgctctaaagttagtgtctttttgttaagtttataaacaaatccaaacataagaaatttagtgattcagtccttctccagtgtttacatggtgcctgttgtgcagcacacactgttctaggtaccagggttgaactgagggcagttttctcctgaaggcttgattgccagtgtctggagacactttgctttgattggcagagagcaatgagattactgtggcatcagataggaagagatcaccagacacgtcatcctgaagtcactgcaatattttgatagccattggcaacagaagcacatcctgcctaaagtgccagcagggctgagcttgagaaaagcatgtatgtagatagcaggaggtatcagtggatgctcaaagcacctgcctctactgagtttgtattctggtgggaggaggagaaaatagaggagagaataggacacagcaatcactcactggagcagaagtatcctcatccaggttgaagtatcctgtccatccagacacaggcagattgttacaaatcaagacctgtttgattgtctgtcctcagtttgtttttctctgatcctcaaagctgaaaggtttctaatagcagccacagcacacctgatggaactaagaggcacacagtatgtgcttgctttccggagggagtgctggtttttatctttaacagcacacacattctaggagagtggtgtgacatgagacttggtgtgactatgagacttggtgtgactatgagacttggtgtgatatgagacttggtgtgactatgagacttggtgtgactatgagacttggtgtgatatgagacttggtgtgactatgagacttggtgtgactatgagacttggtgtgatatgagacttggtgtgactatgagacttggtgtgactatgagacttggtaaggatgtgggagctgctcattagctttggtgtggggatacttttccttagagccagtagtatgaatgaaaccattcttggcagaggacctgtatctggtgtattaaataaatgatacaaaggaaacctgaatttctttcggatacaaagcaaaagaaaagctaggcatgaacatcattaaataatagccagttgtgatgatgtatgtgtataaaaatgacaaaatgaaatcgatctagttgtatccatgccagttgtacatggcagaatatcgtaatattgtgtatgtgtacacatgcatacatacaaatacatatatagcaccagttgtccagtttaaaaagcaatttatacttagcctttgtaagaaatgtttttaatgttacttccatacgtttgaagaagaaatgaaagctcaggagaatgaagtggcttggaccaagtttcttccctagtgactaggcaggactctagtgggtggctgggtatattctagaatctgtttctcagtgaggatcctttgcttcaaactccactgaatggcggggcgcaagaggaggcacaatgcttgcaggatgcacagccatttagaactccttcacaaagtgttcttctttcagcaacatggaagtgaagggaggccgacttaattaaatcataaagaggacatttttcaaagtcagtgtggtcttttccacaccccaaggagtttacatacttttcaaatttgcagctgtctagaagaaacttcaagctgaaaaagaattaacaagcccgagaactactatgaggaagagcccatctcactccttagctctctttcctcagaggaaacgctttgaatgcttctgctgtgtgcagctctgtcctttagagagtgtctggggctgtcttgccatttcagagttttgatgggtctcctaaaggagctgggaactgtgtccttggccatccctcccccgcacagctctcagagtgtgttcagcaggttgcctgcctgcagaggaggcagatgtttaaccatactggagtgagcgcctgctgcatgaggagctgcctatgcctcctgacatctggctgtggctgggtcgccttgcctgcctagggccaggaggctgcgggagccaggggcagagagcacagagcctctgctgctctttaagcgattagtgcactggaccagtgataatgttgaattatcgcttggctgcctctttcccgggaacctcgggacaataggagagtcaggaaggagcattcgcagtaaagtcatgttccgagagacacgactgattatggagtattaaagggctttattttaaacgatttaatttacaaatagatccagacagtgcatgaaacttccagaaccattagtggagcagctgaggagttttctaatttaaagtggccgggacagaagcgccggttcagcaagctccatttttagagtttgggcaacttgtccagttgacgctgtagacgacagggtgtctgacacaaggagaaaatatgctgatactgtagtgctggggaaatttctctaacttgaggggaaagtagactttgtaggtaagaagccagctgtcttccacggaggctttcactgtcggactgcattcatgtgaaaaccgggttgcattggttccccaacgccgaaaccatctgttccgccaatttcctttatggtatgtgttacttaagcacaatggatatggaaattggtagtttgaaatgtgtttttctatgaacagttgtcacattatggtgctttgcctcttataatttttcatcagtaagacctctgggcttgagagtcttcttttaacagataaccttgtctgtgcatccaggaatgtgttgaaaaggaacagtgtggtgctcccagttaaccgctcccattctgagtgatttgtatttaattaacactggtgaaaggctgggagctccattttccaagtctccctctagtcaactgggagagaaagaaaaaaaacatcttttctgaaattccctgtaactaagttatatggcaatgggccatctaatgctcaaacctacaaaggtattgcttcagttactgaattatatttagctccctctcagaggtcccatttcaaaactcagtaggaaaagtgctttagtgtggcattcccattggatgatcctttggtctgcttgaagagaaaagcaagcaagcaagcaaagaaagaaagaaagaaagaaactttaaaacaaaggagagccaagcgtggtggcacacacctttaatcccagcactcgggaggcagaggcaggcagatttctgagttcgaggccagcctgatctacagcgtgagttacaggacagccagggctacacagagaaaccctgtctcgtaaaaacaaaacaaaacaaaacaacaacaaaaaggagaaatgccacctagggcgttctcattgcttctgccctcagcatcttgaatctatactactgaataagaacaagaagacatccctcctggtggggatgctggtcacgcacttaggaccccttccttacatacagaatgtgttgactccacacccagggaaccacatagtatatagataagggatagggtcagacatagcattagtgtgttgggtgaggtaggcaaagagagaagcttcactctgataatggaggtctatgtacgactcctttgacataggcgtctcaattttctatccactcaccagtggtctttagaaagagacattcaggagttgtagaacaaaaccaccctctagaattcctctccaggaagccacaacctactagttctgcacctccatcttcaggggtttcctgaccacattgtgagacctgaaggtcattttaaatcaagtcatggccagtgaccaaagatatatgctactctctgtgtggcagctagcttgttctctctctttttaaaaaaaaaaagtcactcatttatagtacagagaagttcacgaagcagcagaggcatagccacactatgtcccatatgaggcaggagaggcatagccatgctatgtccaatgtgtggagcttagataaggttttgggacttagttctttccttctactttgttactgtggcttctgaggattgatctgacccagattgtaaggcttgtgtagccatggcttttaagcccccgtgccatcttgcctgccctgacttgctcttttctctgtcttcacaatctttaactttgtgagtggcttggaggtttcatgcaagcagtgcttcctgattgtacaagatccctgtagttataagaaccaagtgaacatggactaatttcttctgaatcgcaatctcctcacctgtgaagtgggaatcccatctcccacagggcagtcaggaggttaaaggaaaccataggcacacaaggcctgctacatggttagatgcttggtcgcctttgtgtctgtgcccttgtattgaattctaatccatttacttatttagcaaacattttaaagttatgtctgatgtccttcagttaagcaagcaaattaagcaatttcctaccctccagggaggaaatcagaaacacatagtggttcagagcgaagtgaacagataacacatcggtgttcattggttgaggatgcttctgtatttacaaacccttgtatctaaatgctgaggaatattttgaccgagtatatgtatctcatgctcctgacttcaaaagccatgaagccaccccccccacggtgtacttatggcgatcacagccagttggcaattagagtactttagttttgatttcctactgataaagaacaacaacaacaaaaaaaaaaaacccaaaaagaacagaaaatacagaaaaagaattttcacaagtcaatagtaatattgtgaaagccacagattttcatagctggaaagatagaaaacccttgaccagtctcacctgccaagtcctatcttgagcctgttgcttgaatttggacaaattaaccttcccagtacccagatccttctgttaagtggttttagaaatgatgtccattgggataaaatccccaaggaaagtgctttgcacactgccaagtgcttaatgaatattttgattttatactaaagaaactgtgacccaaagagctagattagcttgctagagctgcagtgtttactggtggcctgggtgagggtgcagagaaatgcaggcaccaaggcaaagaagagcctcggtgcttagtgtaaataagtttgggttgaataaaaacagaaagcaagaaaacagtatgctttgtatttttatctatttttggtgatatagatactaggtgtgtgtgtgtgtgtatgtgtgtgtgtgtgtgtgtgtgtgtgtgtgtttgcatttggttgcacccacataattaagattatccattaaaatacaaaataaaaaaaaaccttgttgtagcgatggtaggcattataaaagattattcagttcacttatacattagttttccaaatgtgtgctaaatggctactatgttgtaagcacccttttctgtttgggatatagaaatatcaataaagctcaacccttgccctctgagggcccacaatctagcaagcagcataataattgttaaaatagatgtgttcccagtttgaaaacactgtgggaggaggaagcacttagctctgcctggggcagttctggcaaattcctggggtgagatgctggcaatattgactcctggtaagagagtgtgaggagggaggcacaatgacagagacctagagagatccctaaacaaacagcagcatgggaacatggggacaaaagcaacaatgtggcacctttagaggtccgtggtccaggttgaatgtgcagagcaagcagaggtaagcctggaaaggccagcgtggagtcagagagcagcagccttttccgcaacatgagggggcgtctgcaatggctgtggagaaataattttactcctgccaggaatagtaaatcagtacaaggtctaccgagtaactttagtgtgttctattcctatattaatttgatctctagtttacatttcccattatattggaattaatagttagggaactgtgtttggtaagattgatattcccttcagtacaatggtgccctgtggcaagtgacactgtacaaatagtgtaatgatacatgctgaataaacaacactgtggaagattgacacaaagccaaggtccaaccatttcctggggatttggggaaatcccgtaatctgcagtttgtgaagcagaatcaaactgcttctccgtgaatgggcctggatactcttatcctgaccaaaacacgtaaggagaagttaaatctgtagagaaagactctgttcttctcattgttagcgtgttgtaattatgcccctttctggaataataaaatgttccctggcagaggtcaggatctctgtcactgacttatttaacagatcccctaacatctgtcctgcagactgctcactttattagcagacaagagaccaagcagccgtagcctgctgtgtacctttttcacatccacacagctgtggattaactcagacttaccagaagaagaccaacaagaagggacagtaatgttattggctgactctaaaacgacaggaagaaagagcagaaacaaatgttgcctgagcacaattcagtgtttttagggtgacaattaccagtctgtttgaaaaggaataaaagcagctatttcacaaaaaataaaaagaaggaaagtctattcatatctgtgtgggaacctaatcaggctcttgtttccaacaacgatgactccacagtcacaccaggtctgtgacaagaatgtgccttttgtgtgccgataatgtggaaacgataaaatttcctttaagagacatatgtgtttatatcacgaggtgtgttacttgacaaaacgctttgttcttctcatattttccacacagcattcatgctgagaggaggctggaaatctttgattaactagaattagtcgctgaagtcaaatagtcactttgttttatgattcatcttactgtgctgtaaattatcacacagcatataagggatgacagaaagaaatgctgatctgaacctctgacccaagacaggcacaagaaacataatattattccttcaaagagctgcacagagacataaatattccatggtctgttggaaagatgctttcttaacaaaccgaagctgcgatttgacatcaggaatagagtttttcagacatggtacagtaggcttagaagagatagtaagagccataacactctccataaaggccagggctttgaatgtttaaagttcttttctctctctctctctctctctctctctccaagaatagacaataacaacaaagttcaaacaaatctcctattccctagagaatagcatggtacttcccctgtcaccagaggggatggtaacttttataaatcttgccacattcactctcagcatgagcatcttatttctgtagtatgcaacctcccagtgctggctcaaaggaacaggctggaaggagaccatactaaacccaggccagccgtgtgcagggattgggctctttctgttcatggtgattttacctttcagctagcaaagggcctatttctagagcttccttggagcaaagctcagccaagtgcttttagtcaaaactgttcccagccatggtgtttccgtcatttgtaaatacttttctcagcctagtctttgttttcctggttttttgtttgcctgtttttatttctggtctattttttctagtgttagggattgaatacagaattttgcacatgctagacatgtgctctaccactgagctacatccccaaccaagaatgtccactctctctctaatctcccaccctctctcccacctcacaggctaagtttgtgctctatctgccaagctccagcctcggccctacaaatggcctcttaaggaaaatgtgctatacgaacaagaagtaccaataatgagttcagtttactgccacagtaatttgtggagaaggttctgcctgtgtcccatttcccgtctgtgagagattaaatggcttatagaagaccacacaattagtgagcagaggtgatagctaaaggaggtgtacccttgggaaggatgtaattctgcttctcagagaacatgtaaaatcttattttctaaccctttatgtagttataatctgttaaggttccatggaagttgttgagctatgtgtctgtgcctactgacaataaagcatgttgtgtgctgttatccaccatttgaatggttttcactatggccaccacattcaagctattccctttctgctaattagagagtaaaccatgggtatcactgcaagatgcaggtagcatatttacatactacaaaatatgacaaagttctacagttggcaatagtaataatttgctgtttaaacagtgacagcagaattagccctgaaatagggcaaaacatttgcttgagtttaaagaaagcatagaagaaaatctgaggaaattaagagaatattttacatgattcctcatagttgacctgattccttactggtgagttccgaatacacccctttctccctcaatagttctaaaaatgcaaattttactttggtattaatataaatggatttttaataaatgtgtggattttattataggtgtgaattgtgtttagtagcctgtttctgctctgttttccaaagtttgtggagaaatcaaaaccaagttcatcaagaaaatagcacaatgttcttacatagtgaatacttccagtgaacaatatttgttctgttcaatgacttgagcagaaaggtagcattgggaaaacactgtattttggtgtatttttgtttcatacatatatatatatatatacatatatatatatatatatatatataacttaaatatttatttaattacatagttaccataattgtcttcattctgtattggcttggaagcttcatcatagataggcttttgatgaccatggaagccaggctgttgtagactatttttcaagcaataacagctggttccttggcaatcttgtgagccaatgcaagactcctggactgtctccagattcccatgttggtactgctgagaattttgaggtcagccatgttgttttaacatggtatttcctagaaacccagaaactcagtgtgggctccaaagtccatttcataatatataaggcctagaggatgcaaccctctgacacattatcctttctctggtgcctgtacaacttactcctcccacactggattccttgattttttgagggcacctctatcaaagacctgccatccacaaattccaaacccaaacgctaggctcatggatgagtctttctatcatctttatagagttgagaagtacttgtctggggttttgctggtgaactctggctctgtgaatagaaattcactggaccagtaatacattcacagaggtagacttctcagcagggcctactcagctcctggcatggagctgctggtttccataatggtggttgccacctgtcctcaatgtcaccactttgaatattttgcttcatgaatcatttcagtgattcgcttttatttctatacataacacattatatgcttttatattttctttaacaccaataaaagaaaagttactcaaaacacacatacacacatacacacacacacacacacacacacacacacacacacacacacacacacacacacacatagggggggagggnnnnnnnnnnnnnnnnnnnnagagagagagagagagagagagaattttgcttattcttagcaaattgtaccatgcagcattatcaggcaagggactactcttaaactgtagttcaatgtaatcagtgcaattggagaatgaatctcaacatcatttctgtaacagaggattggaagttttgccatctgatggactctcacttttaaagaagtttcttgagcctctctatagtctctcttcttcatagccatcaaattccctgccctgtttgctgagtcatgcagaggaccaagttactgaatgcttgagaactaggcaaggggacatccagtagggatacttttctttgcattcatttccattattgtcctttatgatgtgtctgcaagaagtagtgaatctcatgccaggtcctggttctcagtggctctcactgactcccactggcttatagtcgctaaacttgttctgttttgctttggaatattacacaaagaccaagaaaaccctcaggcctactcttacctgagatacatttttacccctttatctataattgcataaactttacttttaaaaatccaaaaataccttaacatgattataattaccttaacctaattactgtggtggcacttttaaatatgtacatttaaaaacaaatattaaaaaaaaagttctccaaaataagtcatttctgggtacccacagattaggtcttaattatttttcagacaaatttatctttgataaaatgtgcaaattctatctgcaacctattccctatgggaacacaggacacagaagcctgagtgcacatgaaggtgattggagaagccacagccctgagctccaggtgttgctcttctattacttgccagctaccattgtacagcagaccacttttatcctctagacctgagatttcctcatatgtacggaggggagactagatgattatattcacagtgatcctgctaacttcacactgcccagtgtttctgtgtaaaagaactagtatatcacatagtgaactcatgtgtccaaaacttcaggactacagaaccaaagatgacctctgtttttcattttgaggaggaaaagattgttggaagaaataatagtaattccaagaagatgtcacagactagaaatgaaagggggttgatggccagtgtgagcaggactaatattaaatgccaggcattaccttgtttactaggaaggaagattaaagaagtccctgtctttcacttcttagtaagctcaaaattttgtgaaagggaaagacatggagaaaattagatggaaattcacaaagtctatgatgttagagggttgagaagctaagggagagggaggaaagggctcacagagaaagggcattttgttctgtgtttcaaagaggtaggactttggcatagcagtgtgaatgcaggacatctcatagccgccgcctcctcccaccccgatgaagagctacaggcaattaatgactacggagaaaaggaaaattagccaccacccccacccagggatgggccctttaaatggttatttaatattaagtaatcagccctgaaaaacatatacatacaagaaataccaaacagatccagcagcttgtgtgtatatgttcattctcacacacatacgtgcgtgcacaccaatagtcattaaagaaaaagaggccatgaatttgaaaaggggctagggggaggtcatggaaggggttggagggagtaagggaggaaatggtataattatagtttaataaaaattgaaaaaaaagggaaagagtgcaggataaaaacatgcaggaaagcaagacagtcttggcaatgaactcatacagagaatgaaagctgcccgcctcctctgtttcttcctttcccttctatcccctcagacaggattctttagcctcaaatattaatggagtagccacacaagtaccttctgtgttgaaaacagggacttcagttctgcccttccagaaaaccacagctgtatttcctggatcgttctgttgacattgaaggtttatgagaagtaaaagtatttgtaaacctttcaagtaattatttttaaactccctcctcacctctccttctgtctggaatggctagtactgacatattttcctctctactaaacaagcactaaatcaggctccttaattacctgcctgtgttcccacctcttcacagctgagcttgtccagttttacagcatggcttcctgggtaggcaggcagaggaacccaggggatccctggagagctgagctaggcttggggcatcagccaggttaataatggcacttccttcagaatgcttccctttcttacccagcttgttacttccaacttctcttgtcccctttagcagtatgtcacaccagggtagggtatattaacctgggtgtgaactaagctttgggttctcagatgttaatggggataaatatgaacgtaagagttaaatctgttggtaggaacggtgatatctggttttgttgaacagtatattgccaataggcaacttatgcctgaggagaattttccttttcttttgagaaagaagtgggcagggcactctgtccttgttagataaaatgacatgtagagagaatttattccaaaacgaactcagaacatggaaagttattgtttggtttttgtgttgattttctatttgctggaacatagtaggggtcttttacccctgtctattgagtcatcctgtccctacccatatcctgcatggttctgctctctactctgcagtctgtgaactgatgttcttaggtcttttactcaggcttaaattggttgaagattaagtatatgatacctagtggtaatgttaacttttatttcaccatttataaaattataattatgaaatgccactttgaatgagcagtcccagttatctggagttgtattatgctgattgagaactcagaacaggggctacatcagaatcttttttagctggaaaccagatatgggtttcattatgtgttcctgtttagttatttaaaacagtttgattttaggagaaaaatgagagagactgttattaacatagtaactatacctttcttatataattataataaatattaaataaaataataaatccaaatatttagcacagtaccttagtttatttcacagtatgtggttgctgaattacattgtgaatgaatgggagtgttcaccaggtgatgggaagaatagttgtgtgaacatgatatgattatggataaaaaaaggccgtgtacctttctctgtggaattctctactggagatcttacatgaaagaatacaaaaaaaatattttttcaatatgataaatgtagattcatcatgtttcgaattataacttggtatcacattggttgtttgctcccaagtcatgggtctcttcacacatacacgcacgcatgtgcatgcacacacacacacacacacacacacacacacacacacacacacagtgctatggcatcactctggcacagtgtatctctctctcacacacacagagtgctatggcatcactttggcacagtctctctctctctgtctctgtctctctctgtctctgtctctctgtctctgtctctgtctctctctctctctctcacacacacacagagtgctatggcatcactctggcacagtgtatcagccagtatggatcccagaagactctcaagcatgtttgccttggtagaactcctgtgcagacctgcttatgaaagtgtcattaggatacaacgctgaggaaggtcttattcaggctggtcctgagactaagctcctgatagtgttgttagaggtatatagtttgtaggcttgtacaatnnnnnnnnnnnnnnnnnnnntgggtaggcaggcagaggaacccaggggatccctggagagctgagctaggcttggggcatcagccaggttaataatggcacttccttcagaatgcttccctttcttacccagcttgttacttccaacttctcttgtcccctttagcagtatgtgacacaccagggtagggtatattaacctgggtgtgaactaagctttgggttctcagatgttaatggggataaatatgaacgtaagagttaaatctgttggtaggaacggtgatatctggttttgttgaacagtatattgccaataggcaacttatgcctgaggagaattttccttttcttttgagaaagaagtgggcagggcactctgtgtccttgttagataaaatgacatgtagagagaatttattccaaaatgaactcagaacatggaaagttattgtttggtttttgtgttgattttctatttgctggaacatagtaggggtcttttacccctgtctaccgagtccccctgtccctacccatatcctgcatggttctgctctctactctgcagtctgtgaactgatgttctaggtcttttactcagggcttaaattggttgaagattaagtatatgatacctagtggtaatgttaacttttatttcaccatttataaaattataattatgaaatgccactttgaatgagcagtctcagttatctggagttgtattatgctgattgagaactcagaacaagggccacatcagaatctcttttagctggaaaccagatatgggtttcattatgtgttcctgtttagttatttaaaacagtttgattttaggagaaaaatgagagagactgttactaacatagtaactatacctttcttatataattataataaatattaaataaaataataaatccaaatatttatcacagtaccttagtttatttcacagtatgtggttgctgaattacattgtgaatgaatgggagtgttcactaggtgatgggaagaatagttgtgtgaacatgatatgattatggataaaaaaggctgtgtacctttctctgtggaattctctactggagatcttacatgaaagaatacaagtaaaatatttttttcaatatgataaatgtagattcatcatgttgcgaattataacttggtatcacattggttgtttgcttccaagtcatgggtctcttcacacatacacgcatgcatgtgcgtgcacacacacacacacagtgctatggcatcactctggcacagtctctctctctctctctctcacacacacacacacagacagagtgctatggcatcactctggcacagtgtatctctctctcacacacagagtgctatggcatcactttggcacagtctctctctgtctctgtctatctctgtctctctctgtctctctatctctgtctctgtctgtctctgtctctctctctctcacacacacacacagagacacacagacagagtgctatggcatcactttggcacagtctctctgtctctgtctctctctgtctctgtctctgtctctctctctctctttcacacacacacacacacacacacacacacacacagagtgctatggcatcactctggcacagtgtatcagccagtatggatcccagaagactctcaagcatgtttgccttggtagaactcctgctttgtgctgcgtctgtgcagacctgcttatgaaagtgtcattaggatacaacgctgaggaaggtcttattcaggctggtcctgagactaagctcctgatagtgttgttagagttatatagtttgtaggcttgtacaatcttcagaggattttcctaatctgtttattttaaagattgttgaatagtaatagcatgcagaagatgcagtgcttcctggttttagttaacttttctttctaagtacctgactttagagataaattctaggattatgaacgtagcctggcattggttggatatttatgttcccaccaaaagtcctatgctgaaagctgtaatccccacctgatgatgtcagaaagtaaacctgcaggagaggatcaactcatgagtatggaaccctcaaaaaaggagcctgaaagagaacacttgcttgctctgtcatggaaggtcaaagtgggaagagtcttgtaggagtgtgcagaccccagccagacatggaatctcctagtgctttgggcttggatatccctgccttcagaactgtgcgaaataatttgctttcatttcttcatcagtccattcatgttgtgtgacaatggttacaaactgaaatgaactaaactgcccacctaatctttcaatctctgtgcactcagcagctctaactaagttcctaagttcctcaaaagcttgcctccacatccacctcagagccagaatgctcgaggtttttcattctggaaggctttctgttaagcgtcccacctggaaagctttttacctaagtaagatctatcttctttggagaagctgttgttgatccttcagacactatcaagtgctctatttagtgagattcctgaaattctctccttgtgagtctcagaggtttctaactataactttacaagcactgtctaggcagctgtatactgtgagttcctcattaaatggagtgttgttttagagagtcttgttgatgtacctccactgtttaatacaagacttaatttataagtatagagcaaagtttggtcaatgaacaatcagtgctggaaatgtatttgaaaggtgcaaagatcgagcctgtaaccaatttctatttccagtgacattctggtaacaaggtgagagtgagaagtttcctccacttcctgtaataaataattgttcttgggaaacaccgtgagctccttagaacctcagtttaccaatagaatgaggacatcaggctaggccccttcaggtctctatgtgccatggtctacttcccaaggtccagtgctaagtacattctttaaacctctgctagtaaaggtggggctctttcagcgataagattaaaaaataatttcttaatgcactgtaaaatataagtgcttttataattttaaaaattcaactaggctcaattttatgtgcatttcttttgtatatagtgtatatttaagccacagttcagtatcccagacaatcactaagcattttacacaacttaaatggaaaaaaatctgcatttacaaaagtcttcaccaaattgaaatgtttataggacttttactaagcttgccgtctacttttctatgttgctgattttttcagacctcagctgtggttaggagccactgttcatgatcatctccagactgtgtattctggcctgagaatcctgcatccaatgaagcttttataaaccctatgagctacataatcagagtttgacctttttccttcctaatcccctggtctgcaaagagatcttctaactaaagctatgccattagaataactagtatttttatattcttccaaagaagatgcagtatcgggaaaatgttagagctctttgtaaatacactaaaaagaaaagcctgatgctattccttgcttgtgctcagacttgtgtctgtgagacgcttgagcacactgcactagcagtcacttgacacctggtaaatgtgtcatcaaatcactttaaagggccatttttgtgaaacaaaataattcttaaaatttatgttttagttcgttttgaggttagtatataaagtaatgggcttcgctgggacatcttcatacctatgtgacttacacactcgtctcctctcccctgtcctcccccactatgcactgggaaacaatggattttagcaaagattgagtgtatactcctttgatttgcttttctagaattgaacataattctcatgacttataataaatataactgagtgtgattctcttgtttgtataatcttttctgccgtgcaatgattgtgtagtgtgtcaattcagaagtgctcctcgggcacctgttcctcccaagctgctgtcattagtgtcaggcatgcaagaattaaatcactcttgtcttcaggaaatttaccgtctatcatagacagtaaccaacacatgcctgactcaacacaaggttcaaaagggatggacaccttaagaaagctgtcagttatgtgttgggcatctccattcacacctccagggctgaatgttggtccaatactttggatcctctgttcctggtacagaactttgcaaatggaatatattaagctgatagtaatttagaaagtgaaccatgaaattgttttgtaaaattatgcctatttgatgaatagcattcttattatctaaattaaatataaaatctccaattaggtagaattaggtagaatatagtagctttgtttttgttgtattctattttctgattttttttaatctcaaggctagttgtactgaattttacattacatcctgctgtccacttcacttgtggctcttcatcttgtttccaatgcaccaagagtcacaactcacaagaaaccagttctgagcaggatgagtttatgggatcctgccacttttatatagaccttaatggatataagtgtgaaatgattatcataactttagagaaaacaatgctgccttatttctaaaagttaactatgttgtccagtaaatctaaagggtcattgaattgagttagatatttaaaatatagacttatttctaaagatgtgtttttgcattctttagtttcctgaaagattaaaacgaaatgaacttccttttgatgaggaatagatcattcctaaggagtatgtctctaagacctaatggctctttaaaattcagctattggttatagttccccaaaccagccaatgtgtctttttatttgaagctacctttacctgcgtcattcactatcgagcttcagtggcttagtccaagcagaaattccatagcagatgcttgtgtgtcctaccaacttgttttgtgttatttatttagagccatggtctcgtgtagttcagactgacctcaaacttgatatgtatggaaggatgtccttgaactcctgatctttctgcctctacttcccaagtcctgggattacaaacattatgctacatccctggttcatgtagtgtcagaaagggatccactgtgctaggcaagcacagtgccaaatgagccgcatgctcagccttgttgaatttctttttccttttttgtttcttgctgaatttcaaaaggaaaagatccatcaaagtaaaaaagaaacaaaccacagccttttctttgcctaaattatagcggtttgactcttacttgtgaatttttcttgccactgagtcattgcatacagaattaagaaactttaatttctttagaggcttgttatattagaaaaattgttccaaagaaagcaacaatcatgacataggcacatctggctcttgcaaattattctttattaagctttcatttaattatatgtgctgaaaggtctgtttttgattactgtaattttttttatttgtccatctgaataatagtaatgcttgaaatacacaaaccacctgttttttctcttctactaatatggtcaagtttgacctattttttttctgtagttgatgaactaggaagctttttattatgatagaaatctgaccatcaaggtaatggtttaatcttgattataggtagaaaagaaaatatttgaatgatgttttcaagaataaacagtgttaagattgggatatctgactgtgggttaccacagtaaattaacagattcatgtattaccagttttacataagttctaataataggggcatctaaggattggaagtagcaacctttgactacagatagaaagaaagatctttataagtttgggggacatgagaaatggatactagagttataactgtcatcagtaaagaaaaggtgatgtgtcgtgcaaggcagaatagaaagagagtggtcaacaagatggccatgtaaaatcaagaagagatggcacctcagcctcatgcatgataatggatactgcttcatcttacccatcattagcagcacacaacctagcaagggactaagagactcttgagaatctgtattaatagttatatttttaatcttgggacatcagatataataatggcattcaaatgaaccctcccacggagacagaatttgggagtatccctgtaagagtatggtccagcatgagtgatttttggattctccaagggaaaaaaaaactactttctgcaccattcttttctatggaagtctctcattccatatttcctcacacttagaatccccacccacttctggtgatgttacttatatatcagtcaaccatcaccagagacttttagaaaagcttccaatgaggaagagctcgaaagattaaaagagataaataagtgcagagaacagaaaaagaaaacaaattcaaagccatcattaacattacccaacagaaaagtaatcaaaatgctttgtataagcagccagggaacaaaaggacccttaaaaatggacagctgaaacttaggaaaattcatagacctcttagaaactgataaaaaaaatctgtaatagagtaaagtaatatgttgcatagtaggagacagaaggaaaaactaaggtccatgagcatgtctaacgttgattagtgtgagttgatgggaaatcccagagcattgcctagagttgaaacacatgattttatacattagacaggctgggctccagaccagtgagtgccaaggcaacaggcagatagaccttggggtgaaatccttacatttggtataaagggaaaaagtcaatgctatctcaagagacaactaatttcatataaagaatctgaagtcggaatgacatcagacttttttagcaaaaagagaaaaaggacagtaggtcattgtctttggaattctaggagtcatttttaacttagaattctgtatcaagagaatataataacagtttcctgaattattagttcctaaaaactagcctcataggcactttctcaagtatttccttgaaggtatttactacctaaaataagacagttaactaacagacaggaagctgtgacagacagaaaacagaatccaatatgggagacacaaaggggattctatgtagcacagcagcctaatgaataaactagttcagactggagcaagggtgtggagaatcctgagtacggtatctctaagggatttcaagattagctgtatagtcaactgtattgtgttgagttttcttggtcttttggagagtctgggaattacaaagtgatagttacagaaaccaaaaggagacaaatgaaaaataaaatgataaaaaatacaaatactaaatctaacaaaataaaaagttaaagagaaaagttgctgctgtatctaatccatgtacatggcaggctgagccagggagctcacaagtccaaggcgtgtctgctttcagaggcgttcaagtctagcctggacaactttgtgatagcctttttaaaataaaataatgaagtctggggatgtagctcagtggtatttacctagcaagcttgaagacacaaattcaatccttgtatggcgagagcaagagcgagagagcaagtgagagagtgagcaagcgtgcgtgagagagagagagagagagagagagagagagagagaggagagagagagactagagaagagaagaaagaatgaaatatagctctttgcatagctcagctttgaatagtgccaaggtagaatggaacagtgagactaacctaaaatgtgtaatgttaacattaagcaattggagggatacataaaagcacaaatggttggtgatgtagtaaggccaagctttcatcctcctgtgtgaggtcaaaggataagggcagaacagcacataaacatctgcaagcaaggtggaaagttccagtaagaacagtcaaccaagctgaaaagagatggtctccacagagtagacatgaagtggagaggccagtgcgggaggccaaggccatcatggatggcttataggggctttaactttttcaaggtgctcatgctgttgtgatttcttttatttaaaagccttaaagtaatattgaacttatggaaccatgtataacattattttgataaaatctaaaattatataaaagtgagactggcttatattccagtcttgggtctacattcagtttcatcaatgtatttaatgttgatcacgttaagatttacagtatcaggtagtctgtttaccttgcctcaggaagaggagctcttgtaagatagaacagaggtctactaccaaagagaacctttgcaaattcttagaagagcagatgaagctggaattgcaagccaaagagaattctgggagacaccaggagagctattctaggcataaagaagccatttggttacctcattcagtcctagggccaggaaaagaaggttaacttttgtttctatggctaccaatgtggccataccctgtcaaagaccgttatatggtgcctagagataagaccttgagagggaagtggctgctgtcagggagcttagaggcaggactgatctccaagaaggatctgatcgccagagaagtatggtagaaccaaggtgtctcagggaagtttgggttagtttcttagtccacgagtggactcactggacattaaagaactttgtatagtaatttccagccctagaaggaccctcagagattgcttagccaaatccttttagtgcagctgaaaggactgaggtgtagagaccggtctcctcctattgtcactgctggaacagccacgcatcgtgtttctcattccagccctcttacattctgagttacttagcttttcttattttcctcttaaacaagcaaacaaacaaacaaacaaaaacagagaaaaacttaagggttctgagagctgttatctgacaatacggtaagggttttttgaacctgtttcagctgtatttaatgagaccgatgtttgccttctctgttttgcagcagctctatgccgctcagctggccagcatgcaggtgtcacctggagcaaagatgccatcaactccacagccaccaaactcggcaggggcagtctcacctactgggataaaaaatgaaaagagagggaccagccctgtaactcaagttaaggtacttgctttgcaggattgtggaaacggtttggaaaatagctttgtaagaaaggtagtgaagcgggctatgctgggagtaagcagcaggaacgcagcaacataaaagattcccaaatgtgcctctttatagggatgtcatgattgagcactgagaagcaggtgttccccttttgataacaatagtgctatattgagagatgcttaccgaactccaaaaactcactcctcaaaaatctctcccttcagagtctggctttccttttttaatgttcactggcagaaatgactgtgcttgtattgtcagtctttgtcatagacttgcaacacttttctccttgatcctcaaacaggtggggagccccctcacagtatcagagtaggacctagaatccttgatgttaaaagaggatggaaggaattctaatgccagacttggcatagtctgtagagggctgtcttagcactggccagccacaggagctgaggaatagagcaccactggctgatggtacttttgacgtcattatgagaggataaatgtgctctcgcagttatgggaagagtgttgatatatggttttcttaactgatttgtcaatgtccccaaactggtcaccagagggatacttgatgacaagagaaatgatcaggcacttcaaatgtgtgctacatattgttcctatacaaaatataagttgtcttgggggactgtatcttcttccaatatcgagttaataaattcacactgtttggagaaataattgttgtgtgtaattggccatgaccttggagagttgtgctaagtgtggctacatgactgtaatgcatcagaagcattgtatctggggagtctgggcagcttttgactcttcacataggaaacacttgagatgaaccagcatcactactgagtgttctgcagtcactgaaggggttttattctggtcaatttccagatagcaatgttgagatttcaaaaattctgtaaaaataatggatttcaattattgaagaccaaaaccatgagcatccccaaggtagcctgtttggaggtggagacccccaaatattaacttaatgacatctattcttttagattctctagagaaataaggtgaaattacacttaattgttagaaatcttgagctataacaattaacacaggaattgtaagtttgtggaaacacattgttttatgttccaaaagcttatttgtgaatacaagacctagcataccagctcaaacaaggactgagtctcttcatagctgttagagaaagaatatgtaaaacaccgcaactctggctatttgggtattaaatattttaatgtgaaaaagtcattttgtaatttaagttggccaactggaactgcaccaaaccaagcctttactagatgagtaaatgttccctggctaaattcaagtttctatctgcttttaccattccagctttgtgggccaacagattttattactcacttgaccacatgcaaattcttaggcataagagttctgtatggtttgacttgactattttatgttagcaacaaaggacccatttcttacatcttagatcatatattatgtatgtgagtagaactatataaaccaaaatataaagtgagcatttaaattgaatgtttctattactgaagaacttctgagaataaactcagtctgctggctgtgaagatttgatcatcagatacatcagggttctcatgatataaagcactattacacattgtatagtgaaatatgacatggcaggatttgtcgaaggtaacagcgatagacagggggttttcatctattaaaagtctgtcactataatccaggagttggtggtcatgaaggaaatgaaggtagtttcagtgttggaatagaagtgtctgcttgcatactcccataccgagaaagattgagaaatgttgagctgggctgtgagtatcatgtgtctgctctatatacagcaaaagccttctcagcctggcaaggcgcttagtccctacagcctgtcccctgacatatgccttgtgctatcttaacctgagtgggggtgggggggcatacaattattagccctatcaaaatgtcacaaaaaatgccactgttcttatatagaaagaacataaatgttttctctgattgcatttctagactatgtcatggtctgcttgcattcagacctcctataagttgctgtttttgtttttctgtcttatctaacgctactatctgtgccattctgatgtttgtttgaaagcagttgtatttttctcttctttattcatattattgtgcttctgtataagctcacagttattgaatagatattgatatattgatatattgaatagatactacatattttgaatttcacagtgttgactactaaagtgtttgcatttctttaagtatctgaaatctattctaagacacaggacttttggatcctctctggatatacttttcatatttgttaagttcaaaacaaccaggaatcttgaggttgctaaactaccaggatgaggcaacagcctcctagaaactttccttactgccctgtatgtccatcaagggacctttgcactgtggtaatgtgagagtaagccttctcagtcctttatgaacacacagtcattttgtttactctcttcattctccccagcctcgggatgccttctcacatgcatctgctactagagctcaactatatcagcatgcaagccagtctgtagatctgtcctctttagtaccccccaaaagttatgtctacattagcaatcataaattctgaactctctactcagggagactacgtcgttccctgtaccacttcccagaaactccttctagatattaaagtaggaccagtctagaattcacttttttcaggaatcactttcccaagctcctagcatagatccctctagagtactgtctaatgggcatcatgtcctgtgtcctgacagtgagttgttttattttgttgttgttgttgtttttgttttgttttggtttggttttttcgagacagggtttctctgtgtagcctggctgtcctggaactcactctgtagaccaggctggcctcgaactcggaaatccacctacctctgcctcccaagtgctgggatcaaaggcatgcactaccattgcccagctacagtgagtgcttaacctggaggagtaagcctgttcctgtccctctgtcatcatttacaatggagaacttcttgacataaattatgaattataaatagtaaattagagcatatgtaaaactgaaaacatgttgtaaagttcatattttcaagaaaattgaagaaaacataaatataataagacaaagcacagaagtaaaattagttgcctataagtggtaagcgcagtagtgcaggtgagcagtcacttaatagggttaggagcagttcagacccacaggagaaaaaaaaaacatggaaatcagagcaaaacaatgcaaagtagaacagaagaaagactctgtcctggggcaatgtcacttggcctaacttgcatgactgaaagaaagaagttgacttacatatgaagaaatagtggtggaacatgtctctaactggacaaacactctaaattcaggcattttagaagttcagcaaactccaaataaaagaaacatggagaacacaagtgaaatacttagcatataaatcgctatgattccaatatgagtgaaggaagtgactagtttaaatatcctttgagtcaagggcaaaaagaagcaagttaatttagtacatcagataattttgacattcatagtggatgtaatcatgtttccccagaacatgccctatactaaatatagattaaagcgccttgcaacacagatgggactgagcccttgcttcctattaataccaagcacaacaacaacaaaacaactcaaagggacagagacaaatgatcatttttgctggttatttggtagaaagggcaggggcgagatttgaagtccagtaagttgggttcaattttttctctccctatacagccttgaggagggagttttggttatctggaagctcatctctgcatttgttgggtttgagtggtgcagctcatcctccaggggcagcagtggctcagtggctcatgcactgcaggtgccagtgtcctgcctgctgcatggtcagtgtgcctgcccttctgcccctcctcctccactgttattttctggcatggttgttggttgacatcccttagtatatggctgtctttttatagataaagatctaagcctcagtgaggtcacatgtttaccctgggagagaatgttctgttaccagattctgttgtgcattctcaataatgtcactgaaaacaagtcccctgtgtcccagaagtgagatgggatctgacatttgctgctgattttgcttcagagcgaataatgcaaatcttaatattgaacctttaaatcgcatatttaaatatgtaaaatgagagaaatattgtctgtagctctttgacagttggataaatgagacaaaatgaaaacaagttgcttaactttcaagccactggctaactcagagttccaagccagagatgaaaatactgggcttggtgtggagggatatgggtcttaaaatagacattccataaatatatgtagcaaagattgtaacaagacatcactttaagcatgaaaaataaattgcatatagcatagcatgtaaaacataattataatgtatgcttgctcttcacaaaaattaattttaaacatgaatagagaccagaatataaaccacaagagcacccacacccagaaagccacatagaagcctgtggtgtggcatgggactctgagggcaggggccttggagagcagagatggctttccatgtttccattctaaagtacttggaattgtttgatttaaaatatatattaaaaaattagctgcggggactatttatagtcacaggaacttttcagagagactaacacaaaagcactacagagctactgaaattttaaataattctttgtaaatgccctaggttaatttagatccctgaaaacacattaggaaattaagctgtaatgtgagctaattcagattttaatttggcaaaaagaatgatccaactacacagttaatgtaaatagaagcataacacagggaaattaatgaggtgccttccgatgaatcttcaaggaggtgggtaattagcttcttttgttataattgtaggagaacatggcattgtctcggaggtgtaaaataactgtggctttctaagtgataatgggcttcatttgtctttttttaaataattatttatgttaaacttttgtaggatgaaacaacagcccagccgctgaatctctcatcccggcctaagacagcagagcctgtgaagtccccaacatctcccacccagaacctcttcccagccagcaaaaccagccctgtcaacctgccaaacaaaagcagcatccccagccccattggaggaagcctggggagaggatcctctctaggtaaatggaagagacctgtgaactgggaaagaaagcaattgggccagtgccatctagccctgggtcacgtgttccttgggaaggacagcgatgcagttcccactgaagcagactcaacttagtatcttgtgcaaactagaaattttagaaatcgtcacaagtcctgctagcgtccattttattttgtttgttttgtttttttgtttgtttgtttggtttttttttttttttttttggatgatggcagatcctggtcatcagacacttagcagggtctgagttttgtcagttttgccctgacgtagttttgtaagggcatcaagaattggcttcatacaagaagcatgtcacaatatgcctgttccttcttgccctctgaagggcattttcaagaacttgaagggattttcttgcccctgtttgaaaagtatacagtaaaagcatgggctttacaaggacacagctgaaccaaaaagttagtgactagagtcgttttggatttcctaaaccctgaaaagtcaatagtattgtgtagcttgtgggcttctgcaggcctgaagagaacagtccacctgccagagtctccattttgaaagacaatgataggtggatcccagcatgcttgcctgctttggtaaaatgaaacaaagacaggaaggcacttgtcggcaggaacaaagcaagcactaagggattgttagtagacttttcacacttttcacgtctcttggtttccaaataaagactatgggggcgtgggtggtggggattagactggccattttcttactatgtcctcttccttgtggtattgaatcatggagccttattgcctatcaggaagctcacagttagaagtacactcaactgggctgagtgtgagtgtgtcttctgacagtaagatgtgctgttaccaatggcagttgggacgttaggatgtggacagcagtctgttctgatttccagttaggctcctctcctaggagccacagattcttacaccctgtcagggcccctcagggagaggatggagacacacatccagaacgttaacacgaactgtttcttttggctgacatcttgggagttgggagatgagaaaagagaaccaacataaggaaacagaggcctgcttcttgaagtggctttgtgcagtcactttcacatgttgtttggaaagtacttacagcctggactgtgcatccaaagggatagagacagagctggtatgtcccaggccctgctcctatcagcagcttcttaggtcagaagccagatgggcaggactaaaagcattagctgctggacagcaatcttgtgcaaatagtatttcacaaaagtggtcttttatttaatcagcaaacttccaaaacaaaagaaaatgtttttaatattttataaagtaactgacttttaaaaacattttcatagacagtttttggaactttttgcaacattttctatatgtaggtatatatatatgcatatatacatatacgtacacatatatatgtacacacattgtacatacaaggcatgtgatataagcttgattgtagtctggttttcctgttcctgtctctgtgaggtatatgcatatatacatatgtacctctaacacacatgtgtggtgaaatacaaagggcctcacacaagtagattgtgtcaaatacactacagcagctgaaatctatcagaaatcaaataattgccctcctttgtctcaaaatggaaaaaccaatccaacaaagtatttatttaagctgagacaatgcaaagcatagaggaaaattagtttccatttcattttcccccctgggttacacagaacatattgaaggaaaatgtttattcttacttgattttaggatttgtgctcatgtgaaagccatcgacacacatactgcttcactgtcaggagcgggagtgggggagagggctgggagcagtgggtgtccaagctgggggtggggcagggttgtcatcctcttggtaaataaccgaggcagcatgataagaagaatgcttcattaaccagccagctcttggagaatggagaacgtgttgtgttcctccccgccccctcactcctgcagtggacacataacatacacatacagatgtcaccatagtgcacatgtgccctcttaggtctcattctgttgagcttaaaactgctctcctccacatagcacacaaacagaggatggggacaaatctcagctgcctctctgcctacccctgtcttgtccatcccccacagatcagcaaagattgtacgtaaattacagatacatgcaaagcagttaccctcccagtagacctaggacaggaatgtaggggcattgatactgtaggcacaagcagggaaaatactccccccagtatatacaagattagaaccttggaccagtcctccgtgagagggtagaaaacaaccacacagcctgcagtactggggtatcctccatgtgcaacctgcaccctgaacctgtacagcttggttgactttctgttctctaactagtgttgtagtttccttaataacaaatgtgccccttccttgttcagagaatacactgttaccctggggaatggatcatagccagcacatgagagactatgtccccacacgcctctaataattcaccctgtgtatgcagatatactatccagtctcaactctcctgccctgtttggggaccaggacacagtgatgaaagccattcaggaggctcggaagatgcgagaacagatccagcgggagcaacaacagcagccacacggagttgatgggaaactgtcctccatgaacaacatggggctgagcaactgcaggactgagaaggtaatcctgtatccctctccactgcatggcaggcccaccagctcgtctgcatctcttttgctttaggcctccaggtcctaacttgctaccaaagatctgggcttccagcttgagggccaccttgtaatttatcgtcctgtgtcacatggtcacatccctgctgatgggcacttaggttgcctcccaggtacccaacctacctgcctgttgctgtctctctgtcccattcagggacatacttaggaactttctaataaaggctgtaaattatccaattagaatgaaaatctagtgtaagaatgtttaaaagaatataaacataagctcacaacagttaagtgaattgttgctcaccattaatgctgtgattttccctcaaaaagtaaaaaccaaaaacaagcaaatttcaaactgtattcatttttatcattttgatccagcaaatcacttatgtagtacctgttctaagatagattcatgaagcatggagctaaacagagcacacactaacaggggaaggagaccatgaagaggcaagcaagtatgtaaaacagagtgaatacatgttaggagccaagaagaaagttaaaggggagaagccactggcagtagtgactgcctgggcctaagactcaggagagagacctgaaggaagccatggtgaagccacaggaacaggacggaaggcactccagacagagagagccaagggtgtacagactagtgtggccagactgtcataggagagggagcagcagaggacatgaggtaaaagtcatagcctgggaaaagcatggtagacctggcgggttctgggaagcctcttcagttcatgccacgctggatctgtcctgggtgtgaatgagatctggttgacatacaggagacatttggcctcttgaagaaatgtggaaatggggtgactggaaggtgtatgcccgataagacaactcattccttttatacatacaaatacttgcccggcactaagttatgagaaaatgtttatttatttacttttaactgtggaactactgtagagagacagatgaattctgtgatagacagtagtaatagtagttaagtaagtgttaaacacttccatgtgtttattctgtaaactaagactgcaggctgctgagctcaggccgggaacctcccctttgtttcaatcctcagtgactgtggtgaggagacatggcagagtttgcacaatggagaaaagcttgtggtttccccagttccctgcagggcttttctgtttgctcctgaagaagttggaagtgtatggtgctttttgtagtcccctgtgtggtgtgatcatctggaagctcaggtgtaaaaccctttcctaagtaaggacgcattggcttgtatagagaggcagcgacttcagctatgtggctctggaggccagtccccaagctgtgctctctgcagctctcctggcatgacctcccccttattttcctggcttctaattgttgcaggaaccctggcttgtgtctattctacatcgatttcctcctgtcttttctatatgccttctgtcttatgtgtctactttctaacccatctaatctgttgtgaccttactctaacttgcagacatctataaaaactctacttcaaaataaggccacatttgtagccacataaggttgagacttctctcttaaggaaacaatgtgaacctctacaaggggtgcaaatgcatagctcattcccaacctcttgaccttactgctctattcttgggtcacattcaggagacatctggagtgcagggttagatggggctgatagggctggtaataagatggggcactccaagccccatcttattgcactagattaaccccagaaagagctggtctcccaaagtatagtaaagttgggatttccccctgagttctcattggactgtggctgcccttagcttcctacaggacctggcacaccatacataaattcaggcaacacacctacccatagaatcagaaattaaaagtagtaccttgcatcttatgtagttacttacttactctgatcagttggagctgcaggtcaaatgtggacactatgcacttcaaatcccaaagcctaatttctatttcccactgacttttcttaattcgtttgggaggaagaaatctgaagttaaaaatgaaaaagaaaactatgcttttccttggaagttatgagagaaaaatgagaagtgaggttgactttgaacacactaataaactacaacctaaaatataacatgctgaagagaaccgagtccctcaaggtaaacggcaatgtggttttcacagaatcaggaagctgtggtttcccagctgaagggtctcattgtgtcagtagctagctttactggggttgaatttgggacactggaagcccacgcgctttagggatgctatgcatgttcagtacaggatctcagacctcctgacctccggcttggggaagtttgtgtgacctgggccttgttggcctctagagggaacatctgtgcttgctaggccggtcgctgttagaggaatgcatcaagagaccatccagagccccgaaagcagctttgtctctcgtatgactcatatctcaatcctactttggtggctttccttccataggggcaccactatttcttctcaccttttcttctaaatcaaaagggagtatataatatgcagaaagactaggaagtagactggtacaaatccaggttactatctggcttgaaaattgccacctttgaactactggcccagttttctttaaatataaagacctttaaactagacttaggaatttgttctttggaccccatatcacagttttaggtaagttttatagcattgctgtcacaagccttgtcattgactaagcatacttctcgctcatacttgatcattctttacaaaagaatgtagcacacatacctgggctccctggggagcaagccattagctggatgttcatggcaggtgtgtatatgtgtgtgtcagggggtgactctccaaaagtgctgtctgtaggagggacagggacaaagcaggactgggtgaggaaatggtggccctgtgcctccaccagcaactcctgcacaagctccagaaccccacagttactgagaactgctccaagtttagagagaatgagtttttacattagtgccagtcagtcctttcgtgaaagctgctctgagaagaggatttgacctgaggtgactgtctttagctgaagcaaggccaagtaacatacatagatagacccttccagtgctaaaggcgatggggaattacatgccggtgcctaccactgcctgtcacatttatcactctaggtgtcattaaatagatactgtatgtataaccagggtggactaacatttatggacctggaacagaaaagccatgtttccatagcacacacaagctcacgtgtgtgtccatatgaatacatatttatccatgatctgtttcactttattgagcaaatgtctgctatgtcaaaacatcactgatttgattggtcagaacagccccagtggagcatctctcttcagggtctgctaaatacatagattgtggggacaatagactgtaacggcaccccaggagctcttctgcaccatcatctccaagagcctctgtgtgcacaacacacacacacatacacacacacacacacacacacacacactgtgagcatcctgccagcagaaggctgagtttccatcctaaattagcttttcccaccaagaacaccagccggccccatctgtgccggagcaccagtgtgattagatcatattatggtaaattccttaccacactttattgttctgataattctaagtatttttgttgtgaaaatcccaggctgaatttcaatcactctgcttataaatgtcctagagctaactaagctcagggcatctggctaagggagaggtgaggcagggtagccctcttaatgaatggtctgtggtgcatttgacctatgaatggactcagcgattggctggagaatgttcttgtgtgggcatcatgtcaggttgcagtgctcagaaatgggcaggcttcacaggcatacacatgtggcttgagccaccacctctggaaactgctgagaaagattttggccctcagcagatgacaaannnnnnnnnnnnnnnnnnnntggtggccctgtgcctccaccagcaactcctgcacaagctccagaaaccccacagttactgagaactgctccaagtttagagagaatgagtttttacattagtgccagtcagtcctttcgtgaaagctgctctgagaagaggatttgacctgaggtgactgtctttagctgaagcaaggccaagtaacatagatagacccttccagtgctaaaggcgatggggaattacatgccggtgcctaccactgcctgtcacatttatcactctaggtgtcattaaatagatactgtatgtataaccagggtggactaacatttatggacctggaacagaaaagccatgtttccatagcacacacaagctcacgtgtgtgtccatatgaatacatatttatccatgatctgtttcactttattgagcaaatgtctgttatgtcaaaacatccctgattggtcagaacagccccagtggagcatctctgttcagggtctgctaaatacatagattgtgcggacaatagactgtaacggcaccccaggagctcttctgcaccatcatctccaagagcctctgtgtgcacaacacacacacacacacacacacactgtgagcatcctgccagcagaaggctgagtctccatcctaaattagcttttcccaccaagaacaccagccggccccatctgtgccggagcagcagtgtgattagatcatattatggtaaattccttaccacactttattgttctgataattctaagtatttttgttgtgaaaatcccaggctgaatttcaatcactctgcttataaatgtcctagagctaactaagctcagggcatctggctaagggagaggtgaggcagggtagccctcttaatgaatggtctcagcgattggctggagaatgttcttgtgtgggcatcatgtcaggttgcagtgctcagaaatgggcaggcttcacaggcatacacatgtggcttgagccaccaccctctggaaactgcttgagaaagattttggccctcagcagatgacaaagtgagccacagtgacataaagaccacactttacctgtatctgaagtacatgggctgtgactgaaagtacagagtagaagagggagttttttggtggagaacctgttcatggtcctgggtttgctgaaatctgataaaaccaaacctttcaactaccaccaccaccaccaccaccaccaccaccaccaccaccaccaccaccaccaccaccaccaccaccaccaggccccttatgtgaggggatagaagggatttttacatcttacctggtagaaaggaaggcacttcctgacatttcggatttagagcaaaaaacggatttaagtcttggtgcttctcatctgaagactgttttcacatagacaattgtatctgattcagttagcaactttctatgatagttttaatcctaggacatacaaaagaacttgtgtattgactgtcccaaacctttgatggcacaaggaaaagctagacatagagcagcatgaacctcctgctttctgtctccacagtgccttgtccctgcttggctattctttggctctgggtccataaacagaaggttgagtgatgcagatatacatctgtctgtctgtctgtctctctcttcctcctcccccccacccccgtgtgtgtgtgtgtgtgtgtgtgtgtgtgtgtgtgtgtgtgtgtgtgtcttaaaaggcaactgttgcatttttccaagcataggtccttgttccttgcctgactttgcaaagctcagcccatcagcaccgcagtgtataaagctcccttctaattggggaagggaaacaggaagcgggctctgctgctcatggtcagttgctacagcttcttgttatttctacagctgattcagatatttactgttgcatgaccaggtaagcataatcaaaagatcaatgcagccacacagcagtaactgaaatggggctgagaggaaattatttagcaaacagcagaatgactgaactccttatacagaccagtgggattttactgttttcaaatcaagtatatgcagaaccaattgattgcgattattgtctttacagtttgactggtgtgatcagttgcagtgttttctatgtttcctttgctcccaaaactatactatggaggaatgtagaccacagtggaaatttcacaggaaggggcagaatctatgatcacctttgtttgcaaaggagagcagcagtcagttcaaaagacattgaatgattctttgaacatgataaacaatacttaaaaagtgctttaggctccaaaaatactatctgttacatacagtgtgtctctcttgatctgtcaaggatatgggctttgctgtccctgtttcttggttgggaagcaaaggccagctaagactttaccccagcatgtcttctcccatcatcttgtttgtgttccgcacctgcagaagatggagagggaagttttacttagaaattaaaccaaggggtatatcacacctccaaaacatacaatttactgaacatgtcaggagcatgctacataagcacgtgttcctggatgtttttttgagatgaacatatatagttatacttaaagaatgtacacaaatcagaagctctatacaatttgaaaagagcaatgaggctttattagtgctgcattttgcatttgaaccagcagcactgggcagctctgtgtgctgtgtgtaaactctggctgaatgcaaccattaccttctttctttcttccctgttgtcagggctatttcattggttgcctagctactggtttaaggcttaattcattaaaaaacaaaaaaccaaaaaacaacaacaaaaaaaaaacccttacttggttgtgtttcttatttcttctgcactctcactgggaggaacggtgaggactggtacagggtttcaggactcacgatgctttttaagaacagaggtgagggtctggggcagataggaagctttcagttttacttacaagtatctaggtcaaaatgcaaaatctagttatcacttctagtaaatgtgttaagactcaacacagtcaggtagtggttttgtgcccagctctggaggagctattatctgggcaatgtatagaacatagaacatacttattaattaagcccctcactagggcaggcactttttttttttttttttggtttggtttgttgagacagggtttctctgtatagccttggctgtcctggaactcactttgtagaccaggctggcctcgaactcagaaatccgcctgcctctgcctcccggcgggcaggcactttctaggccttcatccttgtagatctaacctttctcctgccagggtgtcatcaacccttgaggttttagggcccttccacatttctgaaaattattaaagacttcaaagactttgaatttgtatgatctatactccatggatgataacaaccaacatccatcatattagatattaaaactgaaacatcagaatacttatttaacacagtagcaaattaattagttatcaatgttagtaacatttttaacactaaccatgctatgtaaagcaaacatatcatgtggacagcattgtttttaatgtttacagtcccctttagtgcctgactcactttggaaataggctctctttctctgctttgtcactaaaattttatccttagtcatgtaacattttgagcacaattgtgtgtataataaagaaaggaaaggaaaggaacaaataatgtctcagtatgattgtggaaagaattttggcatactggatcctctaaggggcccgtgaattttcagagcagggattgtgagctgttctaggttgtaccatacacctatctgcatcagtgactgagttgcattcaccttaattttaaaacatcttctattcaaacatcataagtatttagcaataagtacagttttgagatttagtcctcttagagttaagggagaaaaactgttaacagaactatatggtttgccttaatgcagaaaaaagtcattaggagtgatttgcagtggtacaggtaaataagaactacagggaagagggctactgggaaaagaaaaccaaggacaacaactggaaagaaaccaaagtagacatgtgaaggtgagacgaagtcctgtaacagtgtaggaggataagcacacaagcagttttgatgttcatgtttgtttaattgctaatggggtctctcatagatttctgtgtttgaatgcttggccatagggagtggcactattagggtggcttctaaccacttagtacaggctctcgccttatacctgacggaagtgaggcagaaaggactggagctattgcctactccaaaacgaaaggcgttgggaaagggtacaagacccagctccccagcatttgggccagtgtgcatcccaggtctcaggacagcatctatttcctaaggtcacaatgatagtgagtctcaagttttcatagtatgacttcagtctagtcttcctctgttacatgcacatatgataaatggtacacacacatatatagtatatgaaatatatatatctatctatatatgtatatctatatatagatatataaagtatatattatatgctgtataatgcctcattagagttaaagttcaaaggacacatttttttctaggcatgtttatttagtacacaataagcacttagtagcatatgaagtgatttaagtttatgccaataacagaatttttttacatccattttatatgacattttagttctcactagttcacacttgttcaaggtttacaaaagtctttctggcagtagccaggtgagtaacactagctctcttctttacctgaggagattcctctggcagttgcagttttgagactatgaggatgtcagtgtttagtcttcaaagcatttttgttgttgttgttgtttttgttgtttatcaacagttgaccctcacagccctccttacagataatttcctatcattccgctttgcaggtaaaaatgaggttccaggagatgaaatcattagctgatctgcgtgtaggaagcaaggaaagtgacgcttttcacagtcatggtttcatagccaacatcttttctattgtagcagatagacttcgtcacttttcaatgtcaggctctactatgtatccaagtgatccctaaacagtctttgtctctgtctcttagtgtgtgtgtgtgtgttgacccagatatacatgtgaggctgctttaccatgaaatattatgtctatctgtgtttacgtctgattctgttcaactctctggatggtggcgactgttgctttgtttgatcattttcagttggtgggtctcaatcctgcctttgtagtagtgagaattctacaatagatgtgaccttctttccttcctggctcccctttcagctttgtcttgaatctggttgtcccaaatgtaccttcaggaacactctggcaaaggttcacttttagctaagatccagtttgtaatcttgacatttgcaactaagattagaatttcccaaagcactgtcttcctgctatggagagaaatgcttgcttttatttttggtacaaccctgatttgccctttatgtctttttataaataaagtcaacagcactggctctaaagaaacacaaagagtgtcttatgacacacactgcccactagccctagctcacatatcttcttggctgccagtcccagtaactcctaccaaagatcatttgaatttgttttattatggagaatcagcatagtttttatgaaaaagagaaatcttaagtttgggattttattctatgttgatagtaagctatcaacattagaatcaacctcagtttttctgcctctaaaatagaaacaattttaaagaaataatttcatgaattcatggtttgaaaagccacattgacctatcaagaacttctcagtgctaggggttaaagctcggtgatagacttgcatggcatgtgtgggaccctgggtttgatccccagcataagcaagggggagggactttggtgatagacttgcatggcatgtgtgggaccctgggtttgatccccagcataagcaagggggagggactttggtgatagacttgcatggcatgtgtgggaccctgggtttgatccccaacataagcaagggggagggactttttgtccttttacaagtatgaagtcccatactaaattggtaacacctctgtagatgagtttaaagcagatttagtcttttgtattctagaccactgatgtagttgctgtaacataatatccttaggtctagtctaacatcatcagtggaagaaggaacaaaacatctttaaataagtccagagtgaagtcagagtctctgctctggtctaatgaatgctccattcacttcaaccatgtggccttacaccttggcctgttactttcgagtgcctttgtttactcactgggaaggcaaacatgataaatacacaaggctgtgggcaagagtgaagaacattctgtgtggggtaaggtgggtgagtgaatctgactgcctcatgttttccagcactaaagctttgcagagaggtggtcaggaagtgtttctcatctgatgagcagtgtgtcctagaaagactacagagagatccagatgaacaccccccccccatgtagatatgccaggacatgggcatttgtcttctcatggggcagtaatgaggaccaggctccaagacagggtgtgaggttccaggagtcttgaataaggagtctgagggaaagtaagtgattggccatgactgagcaagagaggaaggggtgaaggagagagagagagggagagagagagagagagagagagagagagagagagagagagagagagagagaggagacaaaggaggagaaaggaaggtaacagtggctgaggtaaagaatatttccccagataaataaactttcagacaatgaacttgttacatagcaactaataagttattttttccaagcaagacaatggtaggcatgtgtggctgtaaacagaaacgaaaagctgaagtaattagcatggtttgtgggcatttatgactaataagttgtctggggcaagagtctcagtctcctgtcaggaaaccctggcaaagcccttattttctgctgtcctctctcaagagaaaaactgagaacccaccacttcctcctgtggtcgccttcctagccccactgtgtcttactgttttggtaattcaaaggaagagcccttgtcctaatctcctccatgctcttccctgacactgaatctaaaatcctgattcattaggtatgtgctcatgagcagaaatgacttcactgttcctctgccccactgaagctatagtttcctttcaggggtctccaggtatgtgtgtgtgtgtgtgtgtgtgtgtgtgtgtgtgtgtgtgtgtgtgtgtgtgttattctccagagaatacagaccttatataagtgtacctcttgccaggctccagagggctttgcagtcagaagtcctacttgctctgcctcactgctggctcttggtgggtgaggtgtagcctgtgctctgctcggtctatgcctccacatgtgtatgggggtgtattcctctttctctgatctgttccctaagccctctgctgcccttctcctcatctgtcttctccctatctccctacctcactcccaccacaaacttaagcttgctgcagttagagtgcagtgtctgactactggtgatttttctccaaactcttgcaatggaaagaggcaattgctggttctaggttgttctggtgaagtgttaccatatgaaacgaacgtgtctccttgtacagcctgtgacttttgtagcaacacatacatgggagctctagcttgtgcatcctgtgaaagataccctaaacaacaaaggaattacttcatgaggaggaggttgcacagtaagggtgtggagggtgtacagacttgagcagaagctaagatttgtttcctttatttaaatggcgaatgctaagggcatgaagtctccgccttgggaagcttctggaatttaaattgatgaagtcagtgctgagtggcagagctttggaagttgacatggatagccatcttgctgatggcctgatctatgcctacaacaaagtgaactcttggaaatgaagccatgcacaatagcaggagggattgaggctaggtgctaaggcatgaggcctgttctctaggggactcaggcaaggctccagatacttagcctccctcagagagttctgaagcatcagtagattattgcctctaatatgattttaggcacagggcttgatggtgtgtttgatgtcaccatggcttgggtagggggctttggtgtctatgaagggggtctgggaagtgaggcagtggcttctacttagaagggaactgtggccatactctgggcttgctgcctgtagcctctttggactggaatgagcttggcagccttaagctgatgcataaataagtagtgtgtcctctctggttttccataaataaagcaatttttttgtttatgatccttgtgggtggtagtggcaaggagagactgtggagaggaaatgcagtccatttcaagtaactcagctctgttgtgcccaagctctctggtgctcagatgacactgccccaccagcagcagtaagtgagacctaaacgttagctaagcaagcacacagacatcttgactgttcttcatgggaaggctaagattttaaaccagacagctcctaaatagatattcattttcaggctagtttctttgggtctcagccttttaatagtctgtcctcagatcctagcactcacaggagagcaagctctcaagtcttgtttgaatggcaggtcttaacctgcttggttgagtttattttaattaattaatcaaccaacttgctacttgtttggctatcaccttatttattaaaactgactgttctaatcaataaaatttaaacatgagtttatttaattggttaaaaacagatttagtcctttttttcccttttctttggattacatatgtcagggaagttttataagaattaaattttactaggcatgttgcataccgttaatcttagcacctagtaggcagaggcaggagaaccacttcaagttcaaggccagtctgatctacacagcaagtttcagaccatcaaagctacatagtgagacttctctcaaaaacaaaaatcaaacacaaaatggaagaagattctatttttaacacttcaatagtttgtgtaatcattattctcatggtcttaggtcatcgattggtctaaaattacagttaaaaattgtgcaaccatttagaacctctgctaattacactattcccattggaagttcgatttgttgtctttgtctccttgagactgtgtagtccattttaagaacccttccttagctggtcttgggattgagtggacaacttctttgcccctgctggtttttcggttctcaagtttttggaggagttgttcgtgtttcatttagaaaacagtttacagggatcatgggtgaagcaccttttctcacaccccccacacccccaccagctctttttttaaaattggaagtaatacattttaatttttccactgatgatttatttactttaaagcttcccccctcctctcagtccctccctcttactctcctctgccctccctttctcccgagagaagggggaggcctcccatgattttaacctgcctcagcctatcaagttgcactaggacttgacataccttctcctattgagcctagacttggcagcccagttaggaaaaacagatccaaaggcaggccacagtgtcagagacagcccctgctcctgctgttaaagattccacatgaagaccaagctgcacatctgttacatatgtgtagggggcctaggtttgtctcatgcatgttctctggttagtagttcatcccatgtaagtccctatggacccaggttagttgggttagttagttctgttacaagtgtaacagaatatcattaatagtgtcaggggtaggctttctctcatggcatgggtctcaagctggatcactcattgattggtcatcaatttctgctttgactttatccttgcacaccttgtaggaaggacaaattgtgggtctaaggttttgtggctggattggtgtctttatccctccagtggaagtcttgccttactacaggaagtgactattttggactccatattctttctctattgctaggagccttagctaaggtcaccctcatagatgcctgggagtttccaggtttctagattgaaccaaacctcccaccaattccagttctctctcccagatctctcttttccatcctcaccatagttgatcctccctgttctcctccccaccttttctgccactcagttccatccttccatccactcctgatgtctgttttatttccccttctcagtgagattcagtcatcctgccttgaactctccttgttaattagtttctttggatctatgcattataatatggttatcctgtaatttatggctaaagcatactcatagatgacaacataccgtgtttgacattctgggtctgagttacctcactcaagatgatcttttctagctccatccatttgcctgccaattctatgatgacgttgtttttaatagttaagtggtattctattgtataaatgaaccacattttctttatccattcttcagttaaaggacatctagattgtttctagtttctgactattacaaataaagctgtacagttgctatatagttgaacaagtgtccttgtggtatggtagaacatcttttgggtatatgtccaggagtgctatagctggattttgaggtagaattttctgagaaactgtcaaattgatttccaaagtggttgtacaagtttgtacccccaccagcaatggaggagtgctccctttgctccacaccctcgctaacatgagctgtcccttgaatttttgatcttagccatcttagagtcatagaatgatgggtgtaagatagaatcttaaagtcacgttgatttgcatttccctgatgactaagaacgttgaacatttctttaagtgtgaagctttttctaactttgcagaaacagctgcctaaatatatagaaacatttgttttttaaaagaattaaaatcccacattttaaagcaccttactgtttagagtctgaccctgaatgatcatcagctgggactcaaatttatgaactgaattagattctgttccagtgttgctatcaccttggtgtttaaattgctgaatcataattctaacaactgatttctgacttactaagaagtaaagttggtgcagtcccaaaattcattgtctctgctataatgtaaagcatttcactctttcatttttgagtgtggagatgataacctttcccccaccccaatataatgacaataaataaaatactccatgcaggctatactttgaattaaaaatatttcaagtttgtgtcaatcagaatcagttgctaaaatcaggtggtctttatttgtatctacttcatggcttattcacatggtggataagacagtaattactagcatacctctctgtctgtgggctctctgatgacaaactgcggatacgtagagagcctctagctcatttacatcacatgtgtaatgcacactagctgggatattagcgtttcaggtttggtggagttgcctgacacacacaatgatcagcacattttttgagacagcaatagtcagaggaatgtagcagcactgggggaacaagaggaagtggcctgacatcctcacatgcccatcaccattccaatcacccctggatcaggctgggtttcctcggtgcctaacaaatggtcagaaatctagtagagtaaattacagaagcaggagcaaggataaaagtcaattcctaggcttcttacgcagtaagaagagaaaattttgacttcagggagaacaaactgccccaagctttgtggatctgtacatatgcttatgtaattttcaaaggagatgtgcagcctttaacaaatgtgccgagccgcatttaatctcaagcaggcattggataccacaaaggggaaaaaaaggaagaaagaaaagtcaggcatgggaaattaaaagaaaaaaagttcaaaaatatgcaaaacacaagttgctaataaaatattgtctgctacactaattaacatgctatttacgaagtttattcttagcatgctaacgagaagatgacaatcccatagcagcttccactctgattatttaggactgtagcaacagttctatcctggaagtctgttacaaagccatcagctttctacagtcctgtgcagtatttctgaagaacgcttacacaggaattcagtcagaagcccagatgtttgaaaaggagacagcagacacactgtagctgtgttttaaagacagctcctttgcctctgccctcttcacagctccctcccaattaaacctagctgtgctgtttagcttgtacatgttcccacgcacatccttgtaccctgtgttattattgctgacttgaaacatcccaacaaggaacttcactcctatggactgagctgggccattcttcctggctttcagtcacctcttgatacggaattgacaggatttagtgccacacgcaacaaatcacctgttagtctgtgcaagctcccccactctcctggactcagccttactcatgtttgtgtgcctctgtggtcctactaaggcaacctcttgtcaagtgttgatagaaaacaaaatgtattggccattagtaaaaactgataatcctcttgaatttggtttcaaagaagggttgttcaatgctcaggaattcaaagaagcgagaaaagcctaattttacttgcaatagatttacactaagaaatttaatgtctttgttaatgaatgcatttctgtctttatgcagtttttaaaatgtaatgcctagaaataaagtgtccttacgtcaatctcttgaatgtctcccctttgaagtaattatgtgaaaagactgtgtgtgacagtatcagggacaacttgtttaatttaattttatattttaggcttatttttattttttagacgagtattgtgaccccatttgggaattttaatttgtatcttatttagtctgcagtgtgacaccagttaattgtgtgctactttgtagtaactacatgttaactctgttggaagtaatggtaattatactgtaattgataccagttctcccacagctttggaaagccatacaattaacacatatcgccacagttggatactttcttttgtcctttgtgacataccatcttggagtactattttcaacaaggttcctaaatattttttctttgaaatgcctattaacattactagcaagtgaggatagttcctaagttttattttcactcaaaggaagctccttttctaatcagatgtaattcaaagttatttgtgattttcattacaaacccatttgtgatatcctttagctttatggtgcttctttcctcctgggagaaggctgcagtaaaatacacaagatctttctttgaaagagagtagcagcccttctgttaaactttgcttgcaggtgagatggatgtgcagtatccagggcccgctggcccacagtggacaccagcctggagacagagacagatttaaagcgaattagatgaaaatgaccctctgattttcactgcccccttcccttgccttcccctgtcaccttccattgtctgcagtggctcaagagtttctgaagcagtaaacaaatggacatgttaggacccaaaatgaccacagcttgataggcttgtttgacagaggggttaattttgagtacatcccttaaaaaggtgaataattactaagaacttttgtgacacagtgacatgattttgcagtatatgccggagatctaggagagatagatggttattattgggtcagagagtttcaaacctgaaagaatccacagagataagctagcttcttgattctgtagatgaagtaaacaacctagcatggctggcacacagcagacaggttggaaggagcagagaacctggaggcccctggggaaaaactgactgtgttggtagtgactgcagggcttcaagcaagcctcctggcctctctggcctcagagctctgagtgaagaggccttcatgtttctttctggaatgacagcttccccatacccctctttttctcttaaaaacatgcatattttatagtagatatgttttctttaaattacagtaaaacctcttaggggatatgatatatattatacagctcataaattaaaacagatacaatgtagtaatgccttacacttttgcatttttgtgtgtgtttatagttctgtgggggaagcatcttcaaaactatcagttggcctgctaaaactgaagtacaatgcataattctgaagaaaatattcattcttgatttgtgtagttttgatgtctttagcttgaataaattgtacccatgttaccgaaaataatgttgagcaatatacactgcaaattgcatagatatctgaactcaaatttgtacaattcccaagataccattttggacaaagacatttgctagctggccatcagttttgttttgatgtcctttgctcatactgggaatgtcagactgacagagtcttactagtggcttaagtgagatagaattccctgtttttaaatcatgtgttagctttcaaaggagcttctgtaattttacaatggaaccttttgtgaacttgttaccaaataatcagagaatattcaggaacaaatctgccacatgcctctgtgcaggaataaaaagttgaaaccacatataagcaggactctgtctaccacacaactggatctgcttaaatttgggtgctttataagtctacttgggagttgcaaacttataaataaccttgcaattggttaaaaccatattaaaaccatatgaacaaaacagaaagtgttctgctccaggatgtcagtcagcactaagacccagagaaacataattgaattcagcggctcctaaagcttacatggtctcctgtctttaggactaatggtgccatatcacttggcatatgacagtcgatggcatgaatctaagcatgttgtaggagatgcatgggatgctgttgttgccagaacagtagagacagaacttttcaggcttggtgaccctacacatccttgggaaaagcttgtcatacatcatttgagagtgtctctgaaagccccataaaacatattcgcaagaagttgtgctgacagtagttcactgcgtcaagcacgtgctgcatgatgcttctctgcttgcagggcccagtactattgaggcagagggaggcatgacacactttcccttcccaagcagcctatggtccaggggttacaaaaaccaactgagcaccccaggaaatctgaacagctcatctcacccttatgactatgattcctctttttgagtttgaatcttgtgggttttggcaacctttgatgaatcattgtaaaccttccttctctctagggggaaatgttcatctttgaggaattattcatagatagttggtagttaagtgatagattgtaggtaggtagataggtagatggctgataagtggtaggtagatgattgatagatgtatggtagatagactatagaaaggcaggtaactaggtagtaattgggtgacaggataggcagctggagagagaattatcaacagtgaactgctgcccagttctgatcgcaagtgctttggaagaatcgttgctgaggttaaagatttctctccatcttgcttttagattatgtgataaactgcccagtgacaagaaagcttttgtgagataagaagcaaaagctgccattctaacagtttgttatctatcacagctacgtcagacttgggggggggnnnnnnnnnnnnnnnnnnnnnnnnnnnnnnnnnnnnnnnnnnnnnnnnnnnnnnnnnnnnnnnnnnnnnnnnnnnnnnnnnnnnnnnnnnnnnnnnnnnnnnnnnnnnnnnnnnnnnnnnnnnnnnnnnnnnnnnnnnnnnnnnnnnnnnnnnnnnnnnnnnnnnnnnnnnnnnnnnnnnnnnnnnnnnnnnnnnnnnnnnnnnnnnnnnnnnnnnnnnnnnnnnnnnnnnnnnnnnnnnnnnnnnnnnnnnnnnnnnnnnnnnnnnnnnnnnnnnnnnnnnnnnnnnnnnnnnnnnnnnnnnnnnnnnnnnnnnnnnnnnnnnnnnnnnnnnnnnnnnnnnnnnnnnnnnnnnnnnnnnnnnnnnnnnnnnnnnnnnnnnnnnnnnnnnnnnnnnnnnnnnnnnnnnnnnnnnnnnnnnnnnnnnnnnnnnnnnnnnnnnnnnnnnnnnnnnnnnnnnnnnnnnnnnnnnnnnnnnnnnnnnnnnnnnnnnnnnnnnnnnnnnnnnnnnnnnnnnnnnnnnnnnnnnnnnnnnnnnnnnnnnnnnnnnnnnnnnnnnnnnnnnnnnnnnnnnnnnnnnnnnnnnnnnnnnnnnnnnnnnnnnnnnnnnnnnnnnnnnnnnnnnnnnnnnnnnnnnnnnnnnnnnnnnnnnnnnnnnnnnnnnnnnnnnnnnnnnnnnnnnnnnnnnnnnnnnnnnnnnnnnnnnnnnnnnnnnnnnnnnnnnnnnnnnnnnnnnnnnnnnnnnnnnnnnnnnnnnnnnnnnnnnnnnnnnnnnnnnnnnnnnnnnnnnnnnnnnnnnnnnnnnnntctctccctgatcaacttcatctcctactcagtgtgcattttctatttggatgctgtacagcttctttgagttttctgaatgtagaattccaaatcttatactttttcctaaaacgccattctcttcctagacggcattataattaagccaactgaagcatttcttcttgacaaaatctgttgttgacttctttttgcattcctttttcttctgccaccaagaccatagggcatacatattacaactgtcttatgggtgtgttcctgtggctcctcagctggctctaaagatgtaatgtctgccttgttggctttatatcagattaggcacgccagctactaaatcctgctaaaataacctccctttcttcttttattttggttttacttttaaacaaaatgaaattatttttcagaatttttacaaaagcaattaaatatatttaagtgtttatatgtagatatatttaatattaaaagatagataaatgcaaattaaggtatgtaaatcagttgaacaatagaataaccttctagccagggctgggctcctgctaggaagtgggaattctaccttactctaatcctgtgtcaagactttgcatgatttctttccagcttctggctattataaataaggctgctatgaacatagtggagcacgtgtccttcttaccagttggggcatcttctggatatatgcccaggagaggtaatagccagaagctggaaagaacccagatgcccctcaacagaggaatggatacagaaaatgtggtacatctacacaatggagtactactcagctattaaaaagaatgaatttatgaaattcctagccaaatggatggacctggagggcatcatcctgagtgaggtaacacattcacaaaggaactcacacaatatgtactcactgataagtggatattagcccaaaacctaggatacccaagatataagatannnnnnnnnnnnnnnnnnnnccccccccccccaggcctctgtccttggcttctacatctgcccttcttgttctcacacggtctttcttcagtctgtatacacttgtgtccaaattccttcttagtataccttgtcataatgtagtaatgctgactgtaagagcctcatcgaactcagttacaattatggctatctttagaaaacagtggtgaggcataagaatatctttatatttttaaccattaaactgtggtgagataaatttcataactctaaaatatgattactgtatcacttcccaatccataaaatgggtaagcaaatgctggtgccatgggattatagtgattaaataaaaggttgtatgtgtgagtgcttttccagaaagacagagactgaggtgggggtagagtaataaactctcagataaaggactagatgagagagtatatgtgtgaattctttgcaaaaagaaaaagaagaaggaaagaaaggaaaacaaattagtaaaatataacagttaaagacattattactacatattctaagctaaacattaacagcattatctaaaactatctattctcctgcattaatagatgacctatacaagtagagatgcattcctgttaccttgactaagcatctcagaactaaatttaggccttagttcgagaaatcatgtggtagccagatcttacttccatttttaagcacgcaaaggatcttgccacctgcatggtgaacagcaagcatcgacatagcttgcctgaccggctgtgctgtaactctctccctgatcaacttcatctcctactcagtgtgcattttctatttggatgctgtacagcttctttgagttttctgaatgtagaattccaaatcttatactttttcctaaaacgccattctcttcctagacggcattataattaagccaactgaagcatttcttcttgacaaaatctgttgttgacttctttttgcattcctttttcttctgccaccaagaccatagggcatacatattacaactgtcttatgggtgtgttcctgtggctcctcagctggctctaaagatgtaatgtctgccttgttggctttatatcagattaggcacgccagctactaaatcctgctaaaataacctccctttcttcttttattttggttttacttttaaacaaaatgaaattatttttcagaatttttacaaaagcaattaaatatatttaagtgtttatatgtagatatatttaatattaaaagatagataaatgcaaattaaggtatgtaaatcagttgaacaatagaataaccttctagccagggctgggctcctgcttaggaagtggggaattctaccttactctaatcnnnnnnnnnnnnnnnnnnnnttttaagcacgcaaaaggatcttgccacctgccatggtgaacagcaagcatcgaccatagcttgcctgaccgggctgtgctgcaactctccttctccctgataaacttcatcctcctactcagtgtgcattttctatttggatgctgtacagcttgctttgagttttctgaatgtagaatcccaaatcttatactttttcctaaaacgccattctcttcctagacggcattataattaagccaactgaagcatttcttcttgacaaaatcttttgttgacttctttttgcattcctttttcttctgccaccaagaccatagggcatacatattacaactggcttatgggtgtgttcctgtggctcctcagctggctctaaagatgtaatgtctgccttgttggctttatatcagattaggcacaccagctactaaatcctgctaaaataacctccctttcttcttttattttggttttacttttaaacaaaatgaaattatttttcagaatttttacaaaagcaattaaatatatttaagtgtttatatgtagatacatttaatattaaaagatagataaatgcaaattaaggtatgtaaatcagttgaacaatagaataaccttctagccagggctgggctcctgctaggaagtgggaattctaccttactctaatcctgtgtcaagactttgcatgaacaattttccctgcaatctcaactcttcccaaacattcctcttacactgcttagctgtctactattggtaattttcctttgttaaaacatgtctatttctaatgacagatggaagaatgagcacttaagcaaagtcaggttaatttcagtttaattccactttagaaatgagaggacagagggccatgtactgatcgccttggtacaaattctcattggagagacttctgttctaacaagttggtcagcacgtgccctctttcttcttgtcctccaataggtgtctctgtgctctggagcaaacacaatcagaaaactcagggattaattcattcatgagtactagcacagtgttgctgttaaggatgcattaggagctagataagctaaaaatgttagctaacaaaatattattggactccagaggtcaatggtgggcttcatctctcctagtcagtggcttaattatcaccaatactgactctggaagcattgaagtggccctaagaatgtgacttccactgcttgtaatgcttcttcctctaaaaattcaccttctaacatgtcaagcctacatttcatttgtatgtatgtatgtatgtatgtatgtatgtatgtatgtatgtatgtatgagttgtaccatatgagtggagatgcctacagaagccagaggatgtcatatccctggaactagaggttttgagctgctgatatgggcgatgggaacccaactcaaatcctctgcaagagcagtaagtgttcatactcactgagtcattttctccagccccaaacatatttctgaccattaaattactaaatgcaaactataggatataaaataaaatgatagaatatttatggtaagtcaatcataggattgtgtgtacgtggttgagaatatcttctgagaatcaaatcataaaaaggtatgtccagggcaggccatagtgggtcagagaatcactgtatgttgtatttgtcttgcttaaaaaacaaaataaaataaaactttattttggaatatgtactgatttaagccaaatgtctttgatagggaatatcttctgttgtcagtatttgacagagtttgcaaagatgccttcatttacctgtggaaagtccaagttagatttatattaagctgtataatcaaatacgtttttctgttttctttaaaaattctttatcttcccccttcaggaatatttcaggttcctatcaagctttgtttgtttagattcttttcttcaagaactctcatcagtacagtgcaaagtgtgttgagtctaggtatctcagtcacaaaacttgactgttggaaagttagtagtccttctccttctagccactcccttgtgtgtggtcttatgagatgaactgctgtgtaagatctatagcaaggcctaagatagaatcccaacttataaaatcctttgatcttgatgatagagagtcagcaatgtacgtgaaccaaacccttattgttgaacatagtgcgatgaaaactaggggctaattatgtagtcaagacttagaatttgggcatattggaaaatgagttgattaaacaggatatagaatacagagaaaatgtgggtttttcaatatgaatagaacttggcaaaaaggcagagaagaagcatgtcccagagactgtgaggaaggcaggattgtccagagatgagccactgtttgtccctagccaaagatgcctggggggaggggttttgtttgtttgttgtttgtttgtttgttttttcaatttttggacttgaaaaggcatgtgggcagcagtgaatgaagtaccttgcaagccagggtttgaccaaaatgcagtggaaaataggagtgatagacgattctgacctagacacttggaatgacctaagttgaggaggcagtgggaacagtagaccagagaagagagtgatcagggcctgctaggaggctgttgtagacagtgaaggctgtagggcagaaggcttacactatgctaaagatgacagcatgtccttgaggtgaggacaaaagactttctgaaaggaaaagcagccagcccaggtggttgagtggacaagagttaagaaggaagtgagattgaaactattagcaagttagcacctgtgtaaataaaggtcaggaagtgtgctgggtaaggagagtggtcatatttagttttggatgctgtgttcccatattgaagagctagtgcaatataaaagtgaaatcaaatgtctagaaatgattgagcttggaactgggacgaagatggaaagatgttataactacacatagctggacttcaagggttgacattatctcagaatactgcaatacctgtgttttgggagggcacaaaatgattgatgagctgtggtgttaacctttattgcaaatctgaacggttttaaaacgttttaaatatttaaatgctcatttggctatgtaacaacaaaattcttatttacataaaaaagaatcatgtcagatttcccatgcaagagattggtgctactaattccacagttatatgggcgcagaattttctatttactatctcatacatatgtgtgtgtgtagaatatttgtcaattagttaataacacacatttaagtttatttaagaaagttggtgttgaacaaatcctaactatcacatattttacatgtaaaaataacccaatataattattttttacctttaaaaactacagtatagttaataacaccctaacctatagctgtttgccttgtgacaccacactcagacaatctgtacaaatgggcttttgaataaaggtaggtaaagtgactctcttttagaccaccagagtaaagtacatggtaccattgtctacacaggtctaaaataaaatatatccatttgtaaagtgactaacaaaggctctctgagcatttgccattttccctctcgattgtagggaagggactgccttgaaggattcaaggcacacacagtacaggctggccacccttggtgacccagagggaaggtgaggcacagagttacatttcatatgttagttttctggggacagctacaatctgtcatcctgcatatggtttgaaagtggcttgtctctttggcaagcaaactgttatttaagtacaccatccactctactactgaaacggttttgccaaacttatccaagtagtctcacatgcttaaagatggtataaatatcatttattgccagcagttttctcagactccatggaatgtcttcctgctgcctgatctaagtgtcccagtttacattatggcctttactgcctctgtttgatggagtgatcagtaaaaatttaatgacactataaaataataaaaatgtcattaatttaccacggatcttggatgcagtggttgtaaagttacattaataaacagaatattttttacaacaaaaagcattgttacgtgggaacatataaataacacacataaatttaagagcaattttactgtgagcacacacattattatggaatagccaataagtgtataaaacacagtatataaaattttattaaaatatactgtgcccatcaaaaattcagcttttatctaagtgcaaagaaaagccattattgtgtgcttactgtttcatctctgtgccttccccagatcacagtctcacgtttgttgcccggaagctgacttccttgcctaaactagaacaaacccctggtcttgtatttacccccaaactcattctctctccactggtgccaagatgtaactgatcaatcttgtcacggtaggcagggaaaagttgctaatttaatgcaaagttaaaaataatgccagaggagctgagtggtttgttcagtgactctggaaataagggctaataatcagagtctgtctgtcagcactgaggccacctcatcattgactcggataacacgtggatatgatggatgctaccatcttgtggcttataacattttacattcatcagctctcactaacgggggctttatcatttaaatatctatatttaatatgcaacatctacctcatacatcataatttcaaagcacttagagagccaacagtccctacaacacagcagagctgatgtttcatttttttccagtaactttcaccttgcctgcgtgtttgggactgacaatgcatccgtgagtgtccgctcatggggcagcatggagaatatgttctattatcaatataaagaccagggggagtttggagtgggcatggggctaagcttacactgaggaattttgctcctgtctctacattatcctacttggaagctatgtatattgggagggctagttcaagggctcggtatgggttatttgcggtgtaagcatgtaaggacatgcactccattgtctatattccatacaggcacacacccattggtgtttaaaagccagagacatgacttcttacactgaagcatctccatactctccccatgcctatatctatgtcctgtgtttaagaggctcatgttcaacatactggtaaatctatgcttagctcacctgaacagacctaactggtagacgtcgggccctcctgtgttagggttctgtgctggcaaataaatattctgagctattctttgaagaaaagaagggaaatcttctgggagactgaatagaaatttatatgaaagggcttggctttgcagggtctggctttaatctcaaacacagtgcttaatattatcaaattgaaaatgcaacccactgcccccaacacttttatcgtggatttattttctgcctatttaaccagtatttcatgggacgctcttccttgtcttccagtctgtcaaaatattgatattttacagggaaagtgtctttgcagaagaattttttttcagtgaagtcagaaaaattgtctgacttcaaagacactgtgaatgtgttgcggacgtcctagatgttttttgttatgattaaaacaagctgatactactgcattgcgagcacacttcacttttaggaaagaaaagatattatcatcatgtaagctttgttgtcttggggcttttacaaagcatggcatgtaatctcccctcttcttcttctctgtcaaaatactgatactctttcaggaactttttttttttaactgagaatattttctaggaaaatcaaagagaattaatgactagaaagatccctggaatatgcatattgataggtgggttttagagaaagttgctctacccccacctgcctcaaaaatgcagtggaaggttgttcttcagagaagaagggaggactctgggcccatcacagggacagtcacatgcaaatgtgccagcagtggcggaagccaaggtctaaggtggctttccagggcttgtccctttgactctttctctttgcatcatcagggatccaaagtactactcagaaatagaagaagcagactggtggtcagcagctgtcttccctgaccacatgtgtggctctggcacaacttagctgtggaggctctatgctgtgcactgcatctggcttagtttgttcccctgcagccatgctttcactcgagaaggtcctggggagccatattccctttggttttgattttctgtctgtcttttatacctgttgtagttcagaggtttccccacaccctgctgttgaagctagtgggttggtgttacgcatttagagaaacgatggcgatggctaggtgattgtgttttgttgcaaagctttcccagaaacagtgcaagattaaagcagggcttgtgctgtgttttcttccaatgaagatttcaacgcagtctctgatgaaggggaactggaagacttactgcaacaatttgactgatgggaattaattatagaaatataatgatattcaaaaataatcgtattagaaagcacaaatgcagtgaggctgtacaaatgaggcacatcctctatcaagtaattgtatgtttgctccttcagaatatttccaagtttctaaacatcttacggaacagaacactcggcatgtttccatcagatgccgaacatgctcgatgcagaactaggtcattgaacaatagactgaagagcaatcagcactccactgctgcataatgcattagtataacatgcagaaaccattcccagagctgcaagctgctattcatgtctgtacattcaagccgacatgacatttaatatcgtttcctagtaatgaacaacaaggcttcattcattcataaggataacacaaagccaagtgtgagtctagagactaagcatggagaaggaggtgagaatagggttgttgtgctcagtttgtacagatcattccactccatttaggatgaccggtgagccccagccactgatctgaggggggcagggcttcttctattttgttatcccaaactcctgctcttacaggaactggtaaacaagcaaacacctttggggttctctcctaaagaagcaggggttttgcttcctggggctttttttggggggggttgtttttgtttttgtttgtgtgttttgatttttttgttttttaccaggtgcactcttcagttcctaggaatttacagttgaaacacttgctccaagcaaaggaacagtgccactgtccactctaccaactttgacacattcaaatcctggtccacatagttctaatttgtactttatcaggatttactgatcaaaatcatgatctctagaaggaaaggttgttctccgtttagcttagccgtaggttctaagaactttcttaagtttttgcacatctggcccctctctccattgtatttcttgtagattccagaagcaaatccaacagaagggacaggacaggcagaatagctctggcacgttctctgtcatgttgtcccttagtgagtattatagttgagggctctgagacactgctggattctctattactgaacacaagcaatccaagtacctcaagatgttattttaaagttttagtgaaaaatccttctacatttccttaaacagatctctgtgtatcatcacgtacttccctttccttccaggttcagccttcttgactcctagatcacctggttcatcagtgacagctcagccgtcagccatctcagagcatgcatgggtcggacatgatgtttctaaagccacactgtgcccattaagcaactactgaagctcaaaactaaaacaggtctctggctatcctttctcctaggaaagaacacgctttgagaacctgggtccccaattaacaggaaagtcaagtgaagatggaaaactgggcccgggtgtcatcgatctcactcggccagaggacgcagaaggtgagtggcttttccctaggttatgtttctgctaatctgtacgcttatgaacatgagtgacttaggcacgggatccttatgaccattcttggatgtcactatttggattttctaggcaaaaatgaaatgttggtcctcaatgtgtattatagttgagacactgctggattctctattactgaacacaagcaatgcaagtacctcaagatgttattttaaagttttagtgaaaaatccttctacatttccttaaacagatctctgtgtatcatcacctacttaactggcttcttgttaagaaaaataagaaacataattttgaaaagtcttctttgtaaagaagacctctttaaaaaaaaaaaaaaaaactagaccaagtaattcctaggcacagtcaaacttgggactaacagacagattcagcagaccccgactgactgcttaggaaagacctagctccagacctgtgcacgagccacggctgaagcctgttcagcgtctgttagagagagcagcctccctctcaggatgtctacctgcagctctctatgcccatcctcgttgcttcctgtttgtttgtcttaaatgcaccaagcacccgtcagcaaaaatcgttccccagaggccgggtacaatttataggttaggtcagcactttgccagcagtgtggcctggttatttactgtgtcatcacagagtggggaccggctttcccgttagctgtttctttggcagcatccatcccgccagtcagggaagattaatttgctctcttaagagtaacaggatcctttatgcatcgcagatcctagtgaacatcctttttttagcttgaagggaaatgtctcgctagttccccatgtgctggcagggtttctcccaggaccctgatcctttaaaaacacacaaagatagttcttagcaacagcagaactggacctcccctggcagcttggaagcccgggtatgaacactgacatgggtggtgtcagacaggagcaaggcttcccagcttccagaaagcatggtttctgtgttagttggagatactaattcttgaaggtggtcctgggtgaatagggtcaacataaattctgagtggtatatacatgaacttgtgtgcttgtgtgatagagagggagacaggagaggaagcaacacagaggagggaaagggacaagagaaggaaaggggctgaggaaaaggaagaagagcaggaagtaagggattaaaaggcttaaagaccaggactctacctgctctcctccatgacgagtgtgtatcaagggcacactgacattgtcataggcacacagacagcaggctttcactggcaagggctgagatgcttctgtctagccagacaaatggttggcatggttaacagggtgaccagcacagacatggaagttggcatggtagtctgcaaagaagtgttttagatcgggcccatctcggtgtccctgagaagtcctactgtagagttcctaagcctttggctttataaagtgagctagactatctccagcactcggggggcagggaggggggtacgactgttcatttggctatggaccaggagttgcggagctgtcatctgacccttgctcggccagcactttcatttgatttcttaactatgtattagctataattatagtgagttgcctctcagtaatgctgctaatcaatttgatgtgattgtgtgaatggaactattggccattataaaaagattaaaaaccttaacagcaaagaaaaatctacagaagagttgaggaaattccactcagtctgcacattgtctagatccaagtacattttcctaattacctttttttctttttatatgccagaggatctattattttcacatccttttctcatataattgttagatattctttgaggaagttattattattattaatgatttccctacctcagcctcccaaatactatctatattctataacacctagctagtattatttttcccattttataggttaaaagactgaggcttaaatttctaaataacttgctataggttcaatgccagtaatgatagaagtaaaactggatggaaggttcaggttctggcttccagactatacctctgtatagccggagaattggaatatcttcagttttctcaacaagcttcttgtgaccttcctcagtatgggccatttcctttcccctaaatatagctggtcatgccatacatcagttctcatgtttccccatcacacagagcagcatgctgatgagtgtaacagtagacaggctgtagtggcccaggagcttacggagcgtgtgaaaacctcccttcagaagcttgcccagagttgccattgagacctcatgtgcctctgggggactgtgagttcatgaatggagtcgagttacctgaactaatatggacagcagtgcagtgcctttgtgaggacttctgagatgggcagcagccttctgctgactccagcttcgttcctggcatctgttcaagactgcgctgattgcaaatcctgctggagttacagttcatattaaagtcaggagagttagcaggtacacatagtattctctctcctctgcttcatactcccctcagcatgaagattagacaagggctggagtgtcaaggtaacaacaaccaagtgtacttacacagccactaagcccatggttcaacaaaacaaacaaacagccaacattgcttgagtgcctgtggtgtgccagtcccctgaactagaccctggttaagtcatgggaagttaagacagtgacagcagctagggcttatgatctagtgaggaaatacaagattcaaaggcaagtctgtgcatacaagtggtaccttatcatcactgagaacaggaccttaagagtaagatttcttggttcccctaccaagtacccagagagcaaactttttaaataggctgagctgaaaggtgagctatgcctccttctgtgcatgcacagtcatctccaagtttcctctcgctgtggaacagccatctcaaagggctgtcctcttcttgcatgtctcactcctcctgtgagacgtcttaagtacaaaagtaagtcaatcagaagacaggccctgcctggacatacttcccaggactgtgcctgccagccatgaaaaggatggcatttcttagaagcagcttaaaggcctgcttcccactccgggcgtggaggcaacggggaaaggtcgccccaaaaggcagctgtgcccgtgtattaaccactcatcaaaatcaaatgacaaaaccataagcaaggcaaacagaaattagaaatataaaaggcaaatgtcttcaaaattttatttttaaagtccagctgttatctggcttggatgtgacaagacagcatttcttgttcgccatggtatttataaagctacggtttcactggcgctggggacttgggaagcctggttaaggccctgttatgtttagaagccgatgaagatttgacttgtattgagttcgcacaagattttaacattcctttagtacacataagaatgggagggtttggttagttgggttttgtgaccttttattaaaaatgacaatctgacaaacagctgtcagactgtttgtagactctgtgtggcgtttcccctttctgggctctttgtaggccagagttccttcttatcccaggcctgctgatttcaaagttacattgtgcagcagaaaggttcctggcttggttattgggaggcttggattaaagctcctttgctcaatgaccgacccactggcaattggtgcccgatgcccctgcacaagtgtctttgtcttttaaaggaggcgtgttggatttgattgtctccaaagtttcttccgcttccatgcttggtgtaaggttctttggaaagcacagagtctgtttctggtcagaaaaaggatatatccgcaccaagttcagtcggttccatttaggtttctgttttcagagaaataagagaacggtgccttcaaggattcatttctgccacttgctcaagtgagcgtgcatgttctttgtgctttactgtttattaatgcaaacagaacgtctgcagtatttgttaccttccacagatgagtttcttctcccagagactgtcctctacctcttacccctccctcccctcctctatctctgtctagctcctccctccttcccttcctccctccctctcagtttccctcttaaacctgtggtaattcactgctttgcagtatgttttgtataagaaattgctatggtgtagccttggagggatctgtccctcactctcatgtggagagcagtggaatacgtgcctgtctttagggacaagctctgaaagcgattatctttagctgagttttgaaacttgaaattggcattagaccagtgtgctactctgtgttttagatactcatccggatttgatgggagtggacgcttccatcccaggggctcctgcataggcctaaggctcccagaagctctctgcagcttcatacgtggggaactggattacaacaaagttacttttcttaaagcaacttctcaccatcgtcatcttctcccccatctttcttttggcacctctggttgcctctgagtcttttatcttaggtcagttgtatttatcatcggcttaagctcactgtttataaattagaagactgtggggttgccttcttgtctttcaaagtgtgccagttagtattcgaatctttccttggcagccccacctccccttgggccatcctctgaagtccctgacactttgtcctttctcttatcttctctggatcattattcccacagggaaggaagtttgctgctgtgagccaggagtcattggaggcagcagaagaagctggcctaacctgaggtggcattcaaatgctagggctacttgtgccttggagtgtgaggtcactgattcgagcccattggagtggtgatgctttatctttcaacaccagatcctcagatctggaacaaagaaggggacctacccctgcagtttcagccgagctgtcccttctctggttcccaggaaacggaggcttcaccttgttcagatgttcgagagtgatgagaactgacttgttcttaaaaggcttgctatcatttttctcagttctcttttaacttctgcacaaagggtccagtttgacttctggactctggaaaagtaaaacaggattgtgctaggtgccgcactccctccccttcaccctccacttcaagaagtagaagattcccatccctattgtttccttctagaaagtaatgttgtctcccagcttttcctaacctgtgagtgcggaggtagatgcagagcaggttctaagctttcctcaggccccactgtcacccaagaaaactcacaagactttactgtcacctgagaatgccacaaaactttggttgggtgttttgtatacccatataggtgcataaaagagctctatgaatcatttatttatagtaaatcataaaatataccttaaaacaattctttggcataaatacagttttaccatttattaaaaacaaagcaaattttcagctgcaggagttatggcaccttcagcatttttcagagttgattgacacttggattttataattatcaatgtggagactccccttcatctatatacattgtacaaaatggcacaggtgtgtttaggtccatctaagaaatgattggaaattatcctgaatcaagctaaaatttagtgatttgtatgaaactcaagtcatcatccaaatggcaaattttaaaaccaaacattctaatgcaatacaacccagagactcactgtctgatgctaacatagtgacagatgatggtaggaagataataaaaatctttgttttctatgagaaagccattatgtttccatacgaacataaaactgtaagttcactgacaacagcgtgattcacagcatgcagtaatctcagaccctagcagaagtgtgaaggcagcactctgagctgccagagctgtggtgtccattacaggctcaggcagacagcctgtgttcggagcgcaggctgcagtgaggccacacagtgcagcacaggtaggcgcttccagagacactgctgatccatcatgtgcttgattttgaattaagttttggtcactgtgtgtattcagggaccttttgctgttgccaccctactcccaacttctatgttaggctagatcgccttgtgtaggtgttgagccacagtttaagaagtagtggtcttatttagatagttcctagtgttgctgttgctttctttaactctctaattatactgccttgtaattggactcatttgcccttaatgcagccagaatgcagcaagtaccaattagggaccatgtggtcttgtcattggtctgttggtctgtttttgccatagtgaagattgagcacagagccttgcccatactaggcaagggatctaccactaagctataactcaggcctagtgtaatcctttagataaatgagttttttagtagaaatattccagagcttgcttgtcttttcttagaagggtatcaatctgttagaatatgtaccaggaataaagggtgaagaattatatccataagcagaaaagactagagtaaatcagaaggactattacccaaggctgtgtgtcagggttaggcatctggccctctatcgcttcctgtagcaacatatccagacatcccagagaccctcctgagacactctagacagaagaacctggaagaaccaataggcaagtgtctatagccaggtaaggaagtgggagaagcctgagacatggtagatatgagaaatagctgcgcaggctagaagagcaacagagttcacagagcccttggctctgggctgttgtatgagtatcacaaaaatgtattttactgtggatataaactgttttagaggctcctgtgctgcagcttatatcagctctatatataaagtgcagggctcttaaacaagcaaataaacttctcttacagaaatatatttgctgtgtcttaaaagctcccaaataacttttaatgttgggagaaaacaatttccattgaactcttcaaatgatagataggcctgttggggcaagagagtgaaatgtcaagggttttgtgaagctgcatcctgaatactgcataagaagaactcagcctgcttcatatagtgtcagggcttgaaagtccagccaaaggcccatccatctgtgaggtactgagtcctgcccagtggctagtttctttggagactgtactgaaaagatccagtgatagtgtgtatgacacacacacacacacacacacacacacacacacacacacaaaactgctcctcagaaagaatgttcttataccgagggagatatgtctgtctatactattgctatattacagagtggtccccaactctacagcaaccaaatgaccaggattaataactcctaccttgaaaaccagactgccaatcagactgcttctctagccatgggcctgtcgacttcatgtaaaccaatctactggagtgagcatgcacacagagctctatgtaacacatgcacagactatttagcttttgatatgctatcattgtctaggtaccagtcccaaaacttccctctcctggcagcaacagccccttggctttccatatgcagacttaacatttggcccaagcttaggctggtagaaatcaaggcatgaagtcaattctgaatgttcttgaaatttctctgcttaagatcaggattaaacttgaaactgacattgtagcctaattggctgtttttcttcccataagtacatacctgtgatcctcggacttaagaggcaaaagcatgaggattggctgtttaaggttatccccagctacttagtgagtttaaggtcaacttgggtgacctgagatactatctccaaagaataagaagatggaagaggaggaggagaaggaggaggaaaaaaaagagaaaagaaaaagaaaaaagggaagaaaagataagaaaaagagaaagagaaaagaggaaaagaagagaaaggaagagggagagaaagagaaagagaaagaaaaaagaaagaggaagaggaaggggaagaggaagagagagagagagagagggagagagagagagagagagagagagagagagagagagagagagagagagagagagagagagaaggtcccattttgtggttttatgagtttgtgcatgcatcagtttacatattttacacacaccataaaacactggcaacagcattcagaattaatactcgcaagaagctcagaccctcttatcctccttccacggttgtcctggaagtggcaagatagcagacgagaacttctcagtatggcaagtcaatagaagtagcaaaaggcaaaatgacagtgtgcggatcccaaacaattgtaggtatatgttttttttttttcatcacagctcttcttacaagacacaaaacagtatataagaaatcaaaggggggccaggcagtggtggcccatgcctttaatcccaacatttgggaggcagaggcaggcagatttctgagtctgaggcctgcctggtctgcaaagtgagttnnnnnnnnnnnnnnnnnnnnagagagagagagagagagagaaagagaaagagagaggaagagaaaagagaaagaggaagagaaaagagaaagaggaagaaggctctcttggcccagtgctcacatgtgggaacctgctgtgtgttgcagagccagaagataagagatggccttagtcagattttgtgaccattctctgcattttacttagcttaacttagctttattctgttaaggaataaattgtgcccctcaaccccaaacaacttgtgagttcatttgtaaccatcttaagaacagagcatgaaatcttatgaattgacatcactattctgatcctttgagctaccactttttcatatcctttacatgccctagctttgaaagcaatgctagtttttcctggacccatggacatcattctcccattctggtgtctaagagaaagactccctaaagcaaacaaaacacaatgaagcacagaattgagaagggctattaagttcattgctaggggtttgtggagtttagtagagaggttcgtaaacagttcacggcaccatttgagacatccaggttgatagccaacatgaacatggggccagtagcataggagctgctagtgcactttcgtcatttactgtgagacccgggagccagctgacctctccttttctcctggggaacaaaaagggtgtatcaagagttcttacgagcttaggtacagggtctccgatcttgtgagcatgttttaccctagttttctgctacttaaggaaggtcccattttgtggttttatgagtttgtgcatgcatcagtttacatattttacacacaccatacaacactggcaacagcattcagaattaatactcgcaagaagctcagaccctcttatcctccttccacggttgtcctggaagtggcaagatagcagacgagaacttctcagtatggcaagtcaatagaagtagcaaaaggcaaaatgacagtgtgcagatcccaaacaattgtaggtatatgtttttttttttcatcacagctcttcttacaagacacataacagtatataagaaatcaaaggggggccaggcagtggtggcccatgcctttaatcccagcatttgggaggtagaggcaggcagatttctgagtttgaggcctgcctggtctgcaaagtgagttccaggacagccagagctacacagagaaaccctgtctcaaaaaaaaaaaaaagaagaagaagaagaagaaagaggaggaggaggaggaagaggaagaagaggaggaggaggagaaggaagaagaagaagaagaagaagaagaagaagaagaagaagaagaagaagaagaagaagaccaaccaaccaaccaataaacaaacaaacaaacaaaaaaaccaaagaaatcaatgggggacttacttagagtctaactgcagaaacgctcagatgccagggaaacacacagacttgtctctaaaatccctcctgtgaaagttagctctgttctccactgtgccctctgtgtttcagcatttctggtatagctggttttgctggaccctggggtgagctatggctaggacaccatgcactcactgcatttggagtaagtgggcacatggaattggtgatgtgaacaaatgaggttgaacgtcaggttagaggtaggcgtaagacacaggatacctcctactggaacccagagttctgccagtcttccaaaggagtaacagtcctttaatctgtgttcaaggagtgattgcaagatggatatgcctttgtaggaaagtagagacctgggatttgtagcatgaaaacagtgtgtaggaaccaggtagtgcagtgttcaaaaaaaccaatgcttccagtagggcaacaagagacagcgctggtgctgtacagagaagctagcctgctgctctggaggttgagattcatctataggcacagggacagggcaggacattggaggggcttggatagagaagtggcctggtcagagtgaatgtgtgatgttccactccgcctgaaatgagagagtggaatttctgtgcaggttaaagcattcaaacctggaaagtaagaatctgaatcagaaggctagattttaaagtactctggcagggacctggaggggctgagacaatcagcaaggggagacttgagaagatggatcaagtaatgtcttgtttgtaagtgtttctttgccttggtttatgcttcatttcatatagagtctgtggtaggaacaagggctaggtgaagccaggagctgctgcgcgcgtgaattatttagtctaccagctttcagcagcctctgtgtcctccatgggcctctgctcgtaccaggctggttcccctgacatcctcagaagacaaaacctgttattgtcttatttcatccccagaggtctccagtgcagacttaaacgttgcttttcacctggccacaccggcacatgagccctcccgagctacatctcacatacagattaagtggaatattccgtgctttgtgccactttcagatcattaaaatacaggaactcagaagccatcccagctgctgcgggaatctgtagctgaaacaagctgaaggactctgttcagctatctgtacaaagtaaatataatgagaattaaaaaaaaattaaaccaaaaccgagagcaggagactgcagggcctctggtgagaactcccttcattttgtaaagccacgggccacatgcaccagctcaccacaaagtcattaagccttttcaaactcagatgagaaacattaacaaataccacaaagggctttagtgtggcccctttgtcctcacttgtggcacgttataactcctacaccactctgctctgtgtttgtttaaagctgcctccgtcaggcggggcctaaaagaacaaaagacatcttgagcaatccttagcaggaaatgggctaatctaaacatggtttgtgacactttaagtagaatagaaagcagagggattgattagccattaatgtccaattggctccatatggatgttgcagtactaaagccttttccagggcagtagcagagttattgaattagagtctatgtttcctcagagctgaccttagggagttcccttttggttcttcttgttaatcttttccaaagaagacagtttctaatagaaaaacagaacagtgctgtctacagtaatgctctcataaccctgaaatcaggagatgccttggtgtaacacttctaatccctgctgtcatttcagttctcgatgctttctgcaagtgtgcttgcatcttcagtgtgggggtgccaaggtgggcagcatttcagaccacagtaaagggcatgaacttcatagcatgcaacagacttctaggatgtgctaagctgggcaaggaagagcatccttatagggagaaacttacattccagttagagaatggtggctctgaaattccattttctcaaatctcccatggtgacttaggaactttggcctagggaaattgtgctaggctgagagttggcagacacaaggcctaggtgtggctctgctccctgatagtatgatagagactggttagcacagagagtgttcacagaatctggaagccttggtctaaaggctgtctaccctcatacccatttcagggtattgtgaggagaactgagatcatgtatttagttaaagcactttgtagatattgtttggagtacaattacatagcacatctggtgtgcttcctgaaacatgacctctggcttagtctattaaaaagctaagttgcttcccaaaggatcattttggaatggcaattaattaactgtttccagagtattcagtgaaatgtttatttgtttgtatgctacatatgactacccacctaccattatgatttatctactgtctctttggtttagacagagtctatagatgaaggaaatgcagggtatttgttatagtggacttatagaatcctgggatgaaaacaggtatatgaaacttaggcagatgacacaggcaccccatccttctcatttgcactgttggttcttagttatttaccaatctttagctcagaagagccagtcatatatccaccacatgtgccttcctcaagtcagttccccagtgttgctcatctgcccagctagggcctgcccttgagctcagcagtgaagcacgttgcctagtctgtgcaaggcgggtcggtttccaacactgccaaagtaaacagacgaacacatctagctgatggtttataaaggaggcagggataagccatgccctgctggcctggccgtctatgtctcagacatgaggagcatgttgcttcgctgatgatggaggctttctcgggcacagaatgggttttctactaagttaatcatgaggacagccagctcctttccccccttttactttctttctttgttttaaacaagaagaaatcaaaatttaactttaatcagcattcttgtaatgaaagtaagttaacattctgaccataagcaggaacagaagctaccaaagggctctcctgattggacaaagctaaaaccaccaacaatagtgagctgaatctctaagacagccatttggatttggtgagatgagcacggtgaataaattgaatgtgatttataactcctctttcctgatagtccatgtccctcccagaattcctttctcatgcccctcccagaatttctcatttacatttttacttcgagtgtgcttgtttttattatccctactaactacataagagactagcacatgcatcaggtaattgtaaagccccatagagaggaacaatcattttagtgatggcaaagcagtctgaaatgctgtgagtgtgcactgtcctctggagccacctactgcaggtgctgcccagttactcaaaagcaaccaatgacagctttttctcccttcctaattttctcccttcctgatttttgttttgtttctnnnnnnnnnnnnnnnnnnnnnnnnnnnnnnnnnnnnnnnnnnnnnnnnnnnnnnnnnnnnnnnnnnnnnnnnnnnnnnnnnnnnnnnnnnnnnnnnnnnnnnnnnnnnnnnnnnnnnnnnnnnnnnnnnnnnnnnnnnnnnnnnnnnnnnnnnnnnnnnnnnnnnnnnnnnnnnnnnnnnnnnnnnnnnnnnnnnnnnnnnnnnnnnnnnnnnnnnnnnnnnnnnnnnnnnnnnncccctcccgtcccctccccccctctctttctctctttctttctttctttctttctttctttctttctttctttctttctttctttctttctttctttctttctttctttctttctttctttttgaccaacaacatctttgaattaatcatgacctgagaacaccacacattcctcagggctcctgaggaaaatgttcagaaaaagtcgttttgtaagttggttggcttttcattttaaaattttattgcttttatttttaattaagtagattttaaagcatttttctttggggagtatcttgtagtatgcatactttatccattttccaactatttcaagttttgtctattattactaggacttctatgatattcttatatccatctatttttagacagaaattttcatttattttagagaggcacttggagtgaaactgctgtattataggataaactgccaggaaattatttactgtttcccatttctgctagttggccccaagcttgccaacacttcatttctatgccattgtaacaaatgtgaaatgggatcccattgtggttttaatttgtacttttcttgtaattaattatgcagaatagcttttcctgccttcattggctatatcttcttctataaactgtttgtcttctccccttttaaaaattgcatgtttacttttatccatttgtttttaaggcatgaaaggttggttttgcctcagagtcagagggtgcaggtgacagggaaggaatgacagcagagggtgaggggctggtcagggtgtctgctgtgagaaagggagctgtgagcctcctagctttgttgtttctgtagctgttatttatctcttctagattgaaagtcttaccaaacgaatgcactgactcattgccccagcctgctcttacacttgggcatctatttgtgtattttgtgtgttctgagacagtgtctcactcactccgttgcttgggctgacatggaacacattatgtagcttctgcaggcctggcattcctgatgagcctccttccacagcctcctgtgagtgttagggttacaggcattcacccatagctggcccattttcagcaatgactcctgatgaacggcccttttattttgatgcagctcaatttgttatttttcttatgagctgagagctgtatatgccatctcaagattctcaaaactccaaagtcactttaaaatattgctatttattttgtatggagtgttatgatcttactttagatttccagtcataactcatctcaaattaactgttgtgtgggatgagaggtcaaaggtcactcttttcagggtatttattcccgggcttagtcctagttgtagaaagaccgtcaggtcttttagttttgtcaaccctgcattgctcctgctctactttttatatgaattgagaaatcccatgtcagttcctttgaggaataagtaaattcgggaagaaccaataagttaacagttgactttatgtttcacagacatggtgcattctgatttccgtagggtttctaaaagtctatgcacagtgctttccatgtagatgtcttggacacgctctagttaaatttagtagtttattgtctaatatcattattcacataaaagtgtgtttgtttgctttgaaacagggtctcactgtgtaactatagctagcctattctcaaactcaaacagatccacctatgtcctttattctgaaattaaaggcatttgtcactagacctgattcaaaactttttctaatgattttgattgtttactgccaatgcatatatatatatgtttgatttctgtgttatttaatatcacaatactgaaatttttcacttattctagtcattgactttgtagatactttatatatatatatatatatatatatatatattttgcaaaaatggtactacctatgaacagatagtagcatgtgctgtatctgtgtgcttccattgcatgttgactaatgatagagagcagaggctgttcagtgggatcttagctataaatttcctaatgtattgaacagaataagaatactcccctacccacccactcccacttcttggccctggcattcccctgtactggggcatataaagtttgcaataccaagggacctctcttcccaatgatggccgactaggccattttctgctacatatgcagctaaagacaagagctcccgggtactggttagttcatattgttgttccacctatagggttgcagttccctttagctccttgggtaatttctctagctcctccattgggggccccatgttccattgaatagctgactgtgagcatccacttctgtgtttgccaggcactggcatagcctcacaagagacagctatatcagggtcctttcagcaaaatcttgctggcgtatgcaatggtgactgcatttggaggctgataatgggatggatccccagtaccccattttctaatagggttatttggttctctgaagtctcaattcttgattctttgtatatattggatattagccctctattggatatagggttggtaaagatcttttcccaatctgttggttgtcattttgtcctattggcagtgtcctttgccttacagaagctttgtaattttatgaggtctcatttgtcaattcctgatcttagagcataagctattgtgtattctgttcaggaaaatttcccctgtgcccatgtgctcgaggctcttccccactttcttttctattagtttcagtgtatctagttttatgtggaggtccttgatccacttggacttgagttttgtacaggagataagaattgggtcgatttgcattcttctacatgctaacctcctgttgaaccagcaccatttgttgaaaatgctttctttttttccactggatggttttacctcctttgtcaaagatcaagtgaccataggtgtgtgggttcatttctgaatcttcaattctattccgttgatctacctgcctgttactgtaccaataccatgcagtttttatcatgattgctctgtagtacagcttgaggtcagggatggtgattcccccagaagttcttttaccataatcattctcttactgatggaaatttctttgtgaatctatcccactagaaaaaaataggaatagattagtggggaaggtgtctagcatatgaattaaaatttcttcctcagttatcaaagaattcatgctttctaattattaagtacattttagtgactgtcttttaaggagtttgttcatttcatctaagttgtcagattgattcaaattcagtcattgagaaatctctttattgtctttttaatgtgaataggactcacagtgaaatcccccctttcagtgtaaatattgatgttcttggttgttttctgtttgttgattagactgaaataggtatgccaattttattgatttatttttcaaattactaagtctttgctttgtaaaaaaaagtatctttattgtattactcttctatttcataagttttcattctgaaaaaaaaaatctctgaattgaagttgagttatttaactcatctttatctaacatgactctgaatgtgatgggcttaggttatataatgtgagttttaaaaacatggtctgaatttccactttgttcttcatccctgtctcccctgtgctgagagcctccctccgctgtgctgttggctcattggctgtgtttctagttggtgtttctgagggtgtcagaaaccgtggttgttctgacactagaagtgttgctggcttagcaacctcgttctattcactctcagcatcccgagctgaggcgctggtgctgcccctcatccttttctttaccatccatatgctgaaaacctgacagatcttcccttttgctgtggaactaagtcaggcttcagggctggaaggcagcctgtcttctgacatcataaacagcacaggtaggccttttggtcgcatcccaggcactccgtatgtccacactgggaagtattgccttgtggaaagtctgcaacaacagggttccattacacgaatttccctttctcctaagacaaactctacagtttctgcttgactttcctagctcttcactgtcttcagactgctgcccagagtttcaagtgttcatctttttggggtttggtctgataaaagcagtctggtgctactagatggcagtggagatttgttttgtaccccagtctttctcactcattctgacaaaatgaaagtgtgaaggtctttcagaaagtatttagtcaccttctctctctgttccttatgtgacttcacagttaatcactgaaactggtggtatttgctcatttagtttctgctttgatctcctctaggatacatttgttcttctcggcttaaataccttacaggcttctgatgttggcattcaaggtgtttagcaatccagctctgtttatttttctaatttcatctgttatgacttcccttccttctctataaacccattgagagcatctcactgtgctccacttgtgagtctatgtctttgttcacaccgactccctggaacactttcacaccacactcaccaaatcttactcatctttaaagttgaaagtggcaccttgtctctgaaaccttcctatgatgcacctctgtgtaccccaaggatgctgataacatctcttcccttttacagtgttctgaaatcatcttcattagcattggcatataattttaactttgtgttaaccaaaccccttaaaacttctagtaccagtgttgcttacctttgtggagctctatcttgggactttctgtgcactgaaaatttgtcatgagacttcgctgaattaatgcattggagtgactaccaagcacagtatagaattttccagaatttcttcctagagaaatctttgtataagcacaaaacctccttgcacactcactcacccagacagcccctgggacttgcccaggaagggcccctctgtaggattagttcaggaccattgccatgggctgtgctggtgaaatgagcctcttaacaacccacctggaaaaactcagttttctgtcttctctaaatcactcacttcacagcttcctaaagaaatctttgtcttggcagcttcaatcctctccctacagattctcttgtttacctgaaagtttttatttacacaaccttctttggagaaagaatgaattaactaacctacgatccctgttgcagggacactgtagagagcaggaggtcccagcaaacagggcttcagattcctggtactgtcctgctgtcctcttggcctacagtagctgttcttgggactgcctgtgctggtgggtaaagactctcaggtcagcaggaaaggtgtggtccccgacagactgctgtgagcctacacaccttctagccactctctatgcgactcccttgacttcccaatctagtcgctcatgaaactctgagtgattgcatgctagaatttggtgctagattctgacataagaattggttatttaagaatatacttatcttatctcagtggttaagagcactgactgctcttccagaggttcagagttcaattcccagcaaccacatggtagctcacaaccatctgtaatgagatctgatgccctcttctagtgtgtctgaagacagctacagtgtactcatatccactaaataaataaataaataaataaatcttaaaaaaaagaatatacttatctttgtgcacttaatgatattttaaaaaataaataggccatggcatacttgatataaagattttaaaagttacttaaagcagaaagtcaattttgggtttctgaaatatagattaatagaatatctttgaaaataatgtatagtgttttgtaaaacatttttatcttttaaaggggggtttaaaaacatgtgattttcattttaatgggacttcctgaaggtttctgaatttatgcatgcatgtacagcatatatatttctagtgctacaacagtcgcctgatcctcttgtttcataaacaaagtcctagggaggtttagtaacattctctaaaacttctccacctctcagatctctgtgggattctttccccacttagttcaaacctagagctaaagcacaggtttcttctcttattcttagaataaaaggggggcgataccgagagatgttttctatcaaaagattcagctcaagaagtctttattggaaaacatctttctgtatggtgaactcaagatcacttcatagaagctgtgtacagcacggacactgcaaaacgtgcaaatgcaaacccctctgtataccctggtggagcatgcgtagtgcacagcccagcactgtttccactattaatgtaaacatggacctggacattgtacagtctgggaaggggcttccccttctaggatattagcagtagtgagtccagggggaagggctggttttcatgtgcagtgcaagcttgttgtcagcctcctgttgagtgtctagttaagaaagagagtgacatccaagatgtcatctatatagtgatgtacctcagacatggaagacaggagggaaagaatatgagaggaggaggaagtcagacaaacacatgggtacagtggtttataatggggcttggtcacagcatatttgtcccatattaaaagttccagctgcagttaatatctgatcagatatcaggtccaactcatgattttaagctttggactccttggataagtctcttcttctgaaagcctggctcttcctaatattattcccagtttaagatgccccctccattttcagctcattccttctgggagagaaaggaggggacaagaaagatagaggcggaaagggagaaggaaggggacatggacacatattctcaagtatcactagtctctttctcactttgcattttgtagtatgcactgtgtttcagtttctgatctggattcatccttggaggcttaaacctccctggggctgggtgtaggtggtgcacacactggggaggacaggggaagactctggtgaagggagaagctgacctacgttatgtcccttgcaagatgcagactatcacagagctcctaaagagatgaagaagctgagactgtgtaacagcccagacagggtgggaacaaagaagagagacagaggggagggagaactggccatgcatctgaaagaatcagtatcagtagaatattttcgatgtctctctggactacattctaaaatctgaccatgacttctgtcagtctgtgggaaagtaaagtgtcccctggtcccacaaaatggcattgccaagggagaaatgagatgctggctgttgctagtagagtggaaacaatggcagcaaattgggtcccagttgttaatcacctgtggcattatagttaacttagaataatactgcaatgttttcgcatctgacattttccacaagcctgtctccttttatgtgtacacatgccagtatataaattgccgcatccatgtcagttgtaaagtaatggcaccgagggcatcataaattaccgcagtgatcctcaggagaagacactgtcgtatctgaatgagtgtttcacttccagagtaatgcatgccttcatctggcccagcagtcagcatattgccccgtgttgatggatattgtcagctggaagctacactgcatttcactgcacaataaacatggctgtcaaacccacataaagtgaaatcaatttatcctgtatggtcagtgcattttaaatgaaattaatgtactgtgggtatggtggcaaaaaggtagcatattagttatgcatcttgggatccgagcctttctgagtaaggcatcgttctgtctggagggcttgaagaaaggctgtttgcaaaatgcgttgttgttttcataatcttcagaaagtggcctcaccacccccttcatgttgagggaaaaagtcacagtatcagcaaaattctatcctttttgcctgccttttgttttatagtaaatgatgaccatatttttgaaataatagtacctcttaatgtcctaatttattattggctttgacataaacaaattgctccttaagcaaggtgtctggaaataggaaagaagggccagagattgatggggcatgttgttcctgcagaacttcactgcctgcactgataggttgttctagaagatggggctattggctttaacgcatactgaactttgggaagcagtatttctagtttgtgtagtaggagcactagctgagaccatcaactgtgctcccttcacattttaccgtgggtctcaatctatgtagctgttcagtagttaatacaaagcaaagctcatgccagtgtcacactcctgtgacagatgataacgcaagagccttattccctctttcatttaacacacattattaatcagaattctgtgtgccagatgcatcaccagatctgaggagtccagctacaagtgagcctcagccttcactctgtccccaggagctgtctgtccatcctatgtgctaataactatgtcttcagaaagtgtcaaagatgaggaatttagatatagtttcataaacgataaagaaatccttttaatcaacagaaatataccaggactcttgaaacaagtatttcttagtctgctatttttgcatatgaattgaagaccaattaccttttacgtaatgaatatttactatgctgtttgggaattactaatatacaagcatgagaataagggagtctctaactttggggatttcatattcctgaactggagtgcaaaggccagaaggagacagtcacaataaacagtagtgacttcaggccatggacgtggatcccagagccagggcatcctgtatggaggtcctcatcatcatggctattcctggagcctgaatgtccttccttattgccctcatcccttccttctagttctttcttccagaatcatctgaaatgccagtctcccgtacactggctgagcagccatcctgccttgtattctcttggtgccctgatggttccagtcctgcagagctctcacaagcccagtcagtcctgactgtctgcttcccgggttgtgagcttcctgaaggcttagtcgcctttccatccccagtgcataagctcacaatgtattcactcacagtgaattaattcattcctgaaacagcagcaattgaaaaggacttgaaggacagcgggaccagggtggaggagtagaaggcatctgggtaggacaccatttggggacacacatagtttgaagtagcagatttttctacatgattgatatgatgttacttttgaaggaaggcattgcatcaggagagtccaccagatcgtagctgaatggagtgtatggagtagggaccgggcagcatcagttcagcccactctgacactttgtcagaaagggctgtggaaacatcgtcttaaatgtctttttctggaaggtcccttagaacagaagatgggccagaggacagcagataagccaggcagaaaagtgtgaaatgctctcattataatgcttttcccatcttgttcttcctgccctgatgttacaggaagcaaagcaatgaatggctctgcagctaaactacagcagtattattgttggccaacaggaggcgccactgtggctgaagcccgtgtctacagggatgcccgcggccgtgccagcagcgaaccccacatcaagcgaccaatgaatgcgttcatggtttgggcaaaggatgaaaggaggaaaattcttcaggccttccctgacatgcataactccaacattagcaaaatcttaggcaagtgctgcagcccagctggcactggtctctcagcccacgaggagggtagggtgggtggaaaggtgtgaagcaggggcagaagttagccccatagggaaactgattgtcagggggcaaatgaaaccaaatcaactgcctacggcagtcttggttattttctctcagaatgctaccacaccacagctcaggtgagggatgttttgtctgctaagacaaggcctgaaactttcttcctgagcagaattatcctctggataagcctggctaaaaactttaatttagagctgaacttcttagagtgatgggcttacattgtaaacttagcgactattgaatgaggtcacaggactcacagggacaggctacttaaggctcttaccctggctttttaaatccatatttttccaggcagccctgcaaacacagaccttacagctcaggttcacctggcccactagcagagttcaccaagtactagcagtgccccccaaatggcgtgaaattcatggggtgtggaacaatgcctctaatgataacttgaagacctgtgaaataatgctacatttcatctgacactgtatgcctcgttcacatttcatagctgtgagcctcagggtagagccccgctttgccagcgtcagcctccaggttctcagtcttaaactctgttccatcagggtaagctctcctcacacagattacacagtttggaactgttgtgctcaacatattgaacatatttaattcaacatgcagcattacagtcaacatgtttcctcttttgagagaagaaacacagacgtccctgttctgtttaagctgccaccgtagaacagaaccccaaggagccgctggaaagcaccaggctcaaactggggctttaattctttaaatgttttgttcaagagcaataaatatttaacctgagtaaaaaccagtgatctgggcacacacaaatacacatgttttgtcacaaaataaatgatttaacttgattctgagacattttgaggcaggagcctctaagaaaatttaaaacatactttggaccaaatagaggtggaacatagaaagactggctcttttcttttctttttcctctttctctctctctctctctctctctctctctctctctctctcttcctttctttctttctttttttttcttttttttgttaatattaaattttaaagcaaatgttaaaagttattcctatttagagaaatttccattttagagtttcagaggtaggtagagggatgatacttttttttttaaatttaaatacctctcaagctaaaatgtttctaaaggacggaaaatatctacacatacatatattttttctaaattcaaagacatataaaagaaattagtgttactccagcttcacaactgctgataacttcatgtttgtttcttgccatttaggtactggcatttgtaagctttcagatgggtacagacaccctctgtttccatcttggcagccttgaaaaatctctattattgatatgcatcctgtgaaaacattatgagggacataaaaagtatattcattaaaatgtaaaccattatgtgcaagcatttcacatttccagcatgccaggcgttctaagctggggcctgtgctgcttgcagccggcataacaagctgattggcatagccgatggatctgcacagcttcatgcatccaccaggaaaggacggggatacagcgagagcaaaccggggtattgctggctactgagactatttgaacaaccttaccatttgtttatgtgtgaaaaatcaccactgaagaactgctagcatccagcctgcacagctgtgaccactttatccaccagacacaaaaatgcaattcaatacatgtgaaaaaacacatcccttctccgtcaagtgtttagataattctttgtaaacaatattagagaaaggaatacttttccttcttcctgtataaaccctacttttaaaaaactctgtgttatattggctcatctttgagagatcatttatagaatgtaagaatggggcatatgaccccagctgtccttcagagctacagcctttaagcagaggtgtgtcatccttgggtaacgaggtaacgggcacaggatggattactatgtgggtaagaatgctagctagcatttgcctaaagacagaagctctctgagaatgtgggcagtcaagtacgccttgaaaatttgtgctgttagccctttgggagaggggtggggaatggagggtaggagagacaggtagaggctgagagacaggtaagcagggaagtttcttggttacggcagcaaagctatgttaaaattgtacagtggggctggtgagatggctcagaaggtaaaggtgcttgtctcacaagcctggtaaactaagttcaaccctcagaatcgatataaaagtgggagatgagagccaattccacaaagatgtcctatgacccacttgcactcctgtgcacacacacaatcatgacaatattttgtttaaataacatagtatcaccagccacgtattgataaaaaatacaatatactgtctttttttcctttttccttttttctcttttcttttttcttttcttttcttttcttttcctctctttcctttccctccctcnnnnnnnnnnnnnnnnnnnntccctccctccctccctctctctctctctctctctctctctttctttctttctttctttctttctttctttctttctttctttctttctttctttctttccttttggctctgtggttcagaggacaagttgagaggcttagtggtgtatagtaacagggattcctgagcaaaatctgtaaggtaatgggagatatggcctaggtctggaaggtgtcaccatccttctgaccacttacttaaggctattcccatgtttaggatctcgctggaaatccatgtccaaccaggagaagcaaccttactatgaagaacaggcccggctaagcaaaatccacctagagaagtacccaaactacaagtacaaaccccggccgaagcgcacatgcatcgtggatggcaagaagctccggattggggagtacaagcaactgatgcgctcgcgaaggcaggagatgcgacagttcttcactgtggggtaggtactcccaagtggagccccatactccccttcccaggaaaggaccacagagtgctcctagcatgtgcattggaaaagaaatttgtgaagggaggggttgtgacacgtggaaggtatgactatgggactctgctgtaccaccagcctacagctgggcttctgtccctactctacatgaaaataatgataccaagatagccagtgcccacacacagagtttctggtagtttatttagacagacagacagggagaaaaagtaaaaactgactcttagaaatccccacagcttcccagcttctctggtggcgcttctgactatattcacaatgatctgcttttgttgtgggatctgccacaagataattggccttgacattggttagaagacctcatttttggcatcatatccagaactcctgttgcagtaaattattctgtggtggaagcagtaacaatgtggattttcttgcttaaatcagaaactgggcatgtttttgatatctccaagtctgatttcatgtcattttgtttaaaaattaggtaatagatttctggtataaatttcaacttggctgacgggctgtctgcattcaaaagaggcccctcctaaccacagtagtcaggataagtggggcagatagatgcctagtgattccagcaaacagaccttagcagcctgtgggggtggaaaccccaggaccactctggagacagaggctgaagcagctgcagccaaagggagaatcctgggagagagatgaaagagaggagtggaacaggcagaaaggaagcagtgaagctggagctgtgaagagcaaaagggagctaagcatgtgtctaaagggtaaacttaatttcagcagtgagcagagcacagcctggaggtcagtgaaggggccctgagagtgtgctgcaccagggtcccaggggagagctagggctctgggctctgaaggaatgctggttctgtcacctatggacctgtcacctaccaggctgtcacctattggggaaggcctttcctttgctagcttgcctttcctcacatatgagatgggaggaatgatagcaggcatcatgcagagctgcggagacaattcaagatggtagaacttgcagaagtcagtactttgtacagtacctctaacccagcatcatcatttttgacttattaggtatctactatgccagcaaaaatatcatcctgagtcccctacgagtttccctaaactctgcattcagagaccattttagggataaagaaaattgtcctaccttattaagtaaagattccaacatgttaatatatgaagatgtgacaaaataggcttatcaaatatctctgtgctatgagtgtttgcatcttttaaaataatgcttttaatacaaaaagtacaatgcaatataatttgaccattcacatggtaatgagaggatttatgaaaaatacaggttcatagtgccctttcagtaggttagtcatttaaacacaatatggatttaagactgcatgataaacagcttattttaacctgatactgcatccctgggattgtgtttatcttttgaaaaatttaaatttgagagcttttgtgattcctggccttctcgcggccctatgtattgaatgatacttggtgggtctctttgaccacagcctaaaaggttatccgaagaactcttctgtttcctgaagcgtagctgaatagatgagttgtagcaatgttatttaccttagttatctttgctgcagagtacattaaaatgggcctatatccaaataccacaacacatattggtacagacttatagttttatgtagtcaaacatagtagatttgcaactccctgaaatgtagatgacttgatgacatctgctgtttactggatgcctagactgcactaggcgttttgtatttccaaggctcacaatctataatcctctaaataagatacaggaactaaggttcaaagagtttctatggctctctaagttgaagagacatcaaaacacaactctaggtctttgcctctgccatcccacatggcaaagaaactctccttaccgtgttacctcaaaaggcacctcacaagctcttccggaacagacatgagcatagctgtgtggttcattaaggggtcatggaccttgaaaccagtgtggcacatgaccatgggtgtgctgattaaaggagctttacgttcaggggttaggctgctcttttttttttttttttttttttgttttttttttgagacagggtttctctgtagccctggctgtcctggaactcactttgtagaccaggctggcctcgaactcagaaatcctcctgcctctgcctcccgagtgctgggaccactcagtgtgtgtcaccattcccagctcggctgctcttgacagtgcaggaagacctgtataaggaagggcattttagtgtatagaaggagtcgggctgccaaatggcaggcaatgaccagaatggcctgtcctcaatctgaagtgctgagtgtgtccctctgcccagttacagtaacatctgctacataaagttaggtattatccctactcacggattcctattttcttttaaatagttaagtctgatagattggtaagtccccaaggctcaactttggaaattgatcttcattagctctaagattacaaccataggagcagaaagcaaaacaaacaaaaactcaaagatcactattgacgtcttgatggggcaagatcaatttttatagctgattttgaaaaggcatgcatcccttttgagccagtaacactacatacattactttacatttctgtacatttatatgactgcacaactgtaactgctgagttagatttgttttaaaacttagcaatcacaaaaagaattctgtcaatagcatgtaatagagtttccccttgcctgggatttaactccttcaaatggtagattaagtatcaggattttgtgattattctgtggatacagaattgatattcactgaggcccatgtagctttagtgatatatttttcttgggaatcattactaaagctgctttttatttggaaacacatgtagtaacttacctttgaacttatagggagttacttagatattgcagagtatccaatggggatgacttttaagcaaccacaatggaaagatattgaattctcatagtatgcaataggctctgctgaatgaagagttatataggttattgaaaatatatcaattatattagatagacaccatcactatttgaggattggcaggcatagtgttggtagacgtgaacccacttgtccaacggaacagttaatcaggggcactgttgatgtttaagtggctgatgtgggtagaaagtgcatctgccttaacactgtgcgcacacctcacaattagaacccgagcaggacagtactgaaggcactgactccgagaaagccagtttcagctccaatgttagaatgcctcagtcgttgttcctcagaagccccgcttacccttagaaaacttccttaatctctctgcttgtcagttttctatatgtagaataaggataaccacagcaccaataacatgagtccctctaaagatggaatggcttagcatatggaaaatgctaagaacagtgtctaacacgcagacacgtaaagattgttaaaaataaataaacctgtgtcaggtatttattttgtactacctcagaagcattgtttcccagataattgtgccccaagtgatctagaaatctaccattttcattttaaatctaaaggggtcaaaagaagcctgtaagacaccgataaatattggacatactgtttcctgcactggctggtaaggaaccagcttagaaatctcagtagataatttgagaagatggcttgtatttccaccccctcctatagcatcagccacagagccatgcaacctacctcgaattctcacaagccaagccctgtgcttctgaaagctacacagcttctagcatataaacacatagttcttttatttttggcaaagccagactgttccagaaccgctcttgggatttaagaacttcccctcggtgctgagctctctctagcccaggtaatgccctgctctgccagctgcatgcaagcacttccaagatctcctcagctctgtcttgatgtacatgctcagtatttgcagagacccaggcctgccagctatccctgcctgtgaaatctgcagggtttgaattttgattttgaaattgatctgtaaaggaaggaaaagtgctttctaggaaaatgattcctgatagacaatgtttgatgctgttggctgatttttttttttttttggttttttaattgactgagcagtgacttgttaagggcctattagatatcagtgagattcccagctctgttctaaatcaccaaagcttgaggcattgtttgtatagacaagaggtttttggcaccttcaatggttagacaagccagacaatgtatgactgtgttagctgagaatagtttgtcacaccagccacaatataggtggtgttacacacactgctcatctagacacatagacatgaataactgaagctcaggaagggagtttcctatgcagtaagaccaggccagccagccacaggcaccctggagggagtgccttgaggtttgagaaagtctggctagttaagagtagattcccaactaagaataaaggagaggtttgtgtgagggaggaaatgtcagatgtgcaataatacggaggcagccacggagagagtgtaaggtaagctggatggaggaacagcaaaagtcaaccttcttcagcttagactggttgtgttcgagtaattgtcttaagtctctaagactaaataataagatgacagaaccagagtaggatatagttttagactttatcccccacagaatctcgtgtggccacagaagggtcttaggtcttctgtgtttcatgtcaccaactagccttgtaatccttaccacatgactcaggctcctggaggcttggcatgctgcctcccatgcagccacttccattgggaaacctctccaatatcagaaggctcttcctccttctctgccatgaaacctgcctgctgacttgtagtttagtcctgctcatctggtctggtcacctgtttatgaggacagccatttagcctttaattattgtcaagtccttatcttttctttgtcattgtccctcccagacttctagtttcatatctcttcttggctgaaatgtcccttatattttttttattggttttccctcccatttaccagtttgttcccacatccagttactggttatattcagcagggacttactgagtgtgccctgtgctcaggccttgtctggactctggagctatgttagtgaagagtcctatccttatgacacttaagttctagtggtggaagaagtcagacaatcagtcaataaataagtaagtgtataaaatagctacaagtgccttcggagaaaataaggacggggaaagtggcagagtgttgcagaggttgttccagtgcttaggggagccccaggacattttccgaggagagtgagaacaaagacccaagttggtaaggaagcaagctctgcctatgctaggcagagaagacagcaagccctaaggtccccagacataactatacctagcttattcaggaagactggggccagaatagcaggaacaaagagggaataggtagaaagaagagacatcagagagatgatagagagccaaactgtgaaagaccttgtaggtcattgtgaagtcgagttttactctaggcaaagagaaagggctttgaagaatcaaaaacaaagcaaaacaaaagatactgagttttggcctgggttttgagaggatcactctaatcactgtgttgggacttgtcttaggaggaacagcctgttgcaaagaggctaggctcctaggataaatcatatttgaattgaaggtggttggaccaggtgtgtaggagtagaggtgccaggaagtagatagatgctagatattttcccaatggagaaccagcatggtttgctaatggattaactgtaattgaaagaagaactcttactaagaattggcttaagcaactgcaaaggttggaagtgcttgtcaagatcagaatggccacataaaggctggaaatccagagatgagcagaagtttggtcttacgcctgtaagactggggtagtccttagcatccacataaaagaacacacaggtgtgtgtgtgtgtgtgtgtgtgtgtgtgagagagagagagagagagagagagagagagagagagagagagagagagagagagagagagagagagagaaattagttaaggagggaggtgcttactagaaatacaaatgcacaaatgctggagtggtcagcacagagatgctgtttaaagccacagagctgggtgaggatgaagctgactttgcatttaatagtttggagattgttggtgattttctccggagtcgtttcagcacagagctgggagtaattgaaatgggtctaaggaagaactgaggggaagaaatagagagagggcctcctgagttttgttttagaacatcagagaagtggatcagcagctggagaggaggggagagtagacatgatagtatagatggggagagaccatggctggagggaatccttagtaagctgtgacagaggcctctctgtcagattctgaacttactaaaagttgcacagtgcaggtagagggttggggtcagagccatgagcaagtcagttcaatggtgggaacttccagaaagtctcatctactgtgtctagttttccccatcatatgaaaaaccatgttgtcagcttaaagtgagaagtcagataccagatgagcatcgaaagcacgagagaaaaggtgtgcaccaggagagtgtgccgtccactgcctggacagcaccagaggacagcaccagaggctggtgcacagttcgtgttttagatgcagagagcagaagcagggcagtgtaattactccacctaagttcatcttaatgcctggactgaccagggcaggagttaccgaccagctagtaaagcagtgtttaggcaggggtaggtagggcagaggcctggggaagaacacagcaatgcaccacagaagcagcccagtgatgggcaaatgtcgagtcaggagagggctaggtttggggcacagtttacatttatttgagacataaaaataaatgaggtacagatattttgcttaaaatatttcaaaaatcaatcatctgtctttgtgaaaagcatctgttttctgtatttaaagaaaatgtttgatagtttgtgttgacctacaaagtttagatagctgtcaccttatgatatctgtaaaatgcgggtgtggaggtgcacgcctttaatcccagcactcgggaggcagaggcaggtggatttctgagtttgaggccagcctggtctacagagtgagttccaggacagccagggctacacagagaaaccttgtctcaaaaaacaaaacaaaacaaaacaaaacaaaacaaaacaaaacaaaaacaaaagaaatctgtaaaatgggtcaacattgcagaagaatgtcctctttacacttgtaattaaggcaataatatatatatatatatatatatatacacatacatatatatactaaatataaagtttatgtatgctataattatccatagtcagttataaatgcaatatagtacctcctgctctgggcaggttagcataaaatttaatttgtgctaatttactttcaaaaaatttgaaacatatatttttagaatttgagagggagcaggatttcatgtgatatatctacaaatagatgtaacttctcagtatcgcttgcttccttttgacatagccccagctagccaggtgctattgagtccttggcttatatcatctcagaggtgcttgttgaacaaagatatgtgtttttgtgtgtgtgtgtgtgtgtgtgtacaagttataatcacacaaatatttgtgttatgttagtaaacgtttaaagaattggagatatccctctggtgactgaaggtcagtaaaggcagtatgagcccacatcttcaggcttctggcttttctccttctataactaaggctgcttacctctgtaaggagatgacacctatgctggagtggctccgacctgacaggctggcaggctttctgtgagagtaaggtggatagaaagtcatattgacatagaagcctaataagaattgttcaaatgaccattgactagaagcttggttaaaacaaggcagaagggccttctagaacacccctgacccattttacaaacatgactatcacgactcaggaagagttacagcgatgcttggggtgaatcttgactataatttgctgcccagaaccattgaggaccacctgataaataacgtctcagacatagtatctgggttgaatagagctttaattcttgtgtactgaatgaaaggggagacaccgtggcagctcttgctgcacaggagagcttgactgtcacaagatctgctggtttgtttgagctggggacacagcataaagaggtgatctggtgtgactcaacttggcatctgctgggatgaggcaggagcagcatgcctggtgtctcttattattagggtgtaaagctcactgctctttattactgagtcctccagccccagcttcatcctcagcctcagtgatagccaagatgattattctggaaggaccccagcctggaaagtccagctaaagcaacaagggcacattagaatagaggcagagtgaatcctttgccaaatggggctatttgggacttgccaggccctttcccatttttctctttcatccatagttctcaaaccaagttgaagacgacaccaacccacttaagagtaccattacaacatgcccatgcctctcaaggatttttttttaacgctgctctctctcgtctctttttaaaaatggtctcagatggacctctgtggtcttaactgcagtatttgtgcccaacccaatgccaagtgtgatctgagctctgtgatatttgccaagttgaagttctgcctttatgttgtgaaactgtcagcaaattgctgcgttgtattatttaaccaccagccacagctttaggaacagtccagggattcttccaagaacattttttgtcacttctggccacttaacatgttacagagggcctggtttggcaaatgtgggttaggaagtcccaggtctcatgggagaacttatagagtttccctctctctttctttttgtttgtggatctatacaggcaacagcctcagatgcccatcaccacaggaacaggtgttgtgtatcctggtgctattactatggcaacgaccacaccatcacctcagatgacatctgactgctctagcacctctgccagccccgagcccagcctccctgtcatccagagcacgtatggtatgaagatggacggcgcaagcctggctgggaacgacatgattaatggagaggatgaaatggaagcctatgacgactacgaagatgatcccaaatcagactatagcagcgagaatgaggccccagagcctgtcagtgccaactgaggagcttttgtttgctgaattaaaacactctgacatttcgctccctttcccccaacaacaacaacaaagttcttaaagagcccgcatgcatttgtggctccacaatacatcagcagaatggtcttaattgcttcgtaacgtgtgagacagattacgttttcctgatttttcataaacttgagtttttgtcgttaccgttactgttgttgtttatttaggtgaagacgtattaaatatgagacaccgggacttggaaacttatctctgcccatcgccgtcttatgagtcttacatttctgtcttactatttttcttttggatgttgacaaagggtttaagttactgttttagatggggttaaacattctcactcaggtatgctgtgccggctacaggttgtgaatgtgtttttattctgaattactttagaaaacaactgaggatttcgtattgtgaaaccggacaagtccacggcgtgagcggctgcatatagaacatgttcaaaaggcctcggaattccatttgtttcaatgtgtagaattcaactttgaatgtgccaaacttttttcataacttttgaatcttaactattttaaaagtcttacaggagacactgcaaagtcttagacaatctttgacatcttaaaataaaatagcaaaccacatttttttttccagaaaatggtgaagtactcaggaatctggagacaagatattgtaaggaatgagcaaggctgccacagtgcgtgaacccaattgtgtttgcctcttgatgtgccatcagtgtgtggcgtgggatgacatagatcagagcaatcaccacaccagacaccacacggtggactcccctgtctgagaccgcctctcactacatccattcttaccttgcctttgccctgacattcaaccttaacacattgttctcttaaataatttattcattccagaatgtcaagggtccacttactatttattttaaaaattattggtggcattaatttaatttttttttgccctccttgccctttaacctctttttcctgctggatacaaaagatgtacatagcaatctcatgtccccagagcccctggaaacatttctgaagtgatgctagtacatgcatatattgttgtttttaaagacaagtgtgtagctggctgcagggttgtgcatctgcgtcaaggtatcctacatttaaacatgtatgcccccaggagtcaccatgaccttgggtctttgactagagtttctccctcattgagtttttcagtaaacagtagaacctgagttccattcagcagtgagagtcagcagtggtcactgccagtcaaggagcctctcacagccactctgaagcccaaggaccatgggccacacggggtctactttggacccggcattctgtcacctttattgagctacctggtcccagctggcacatccatggagatctttgcaaaactctacaggttgttagacaactccgaggaaatccaggaagaaaggaaaccacaggcaagggaagcaatggtgagctgccagctcctagggacagatgctagaggtacccacagctcccctgaagacctcgtttctcagtggctgctcgtgaacgctgctgctgataagctcttgccactgaaggtgagctctggagactgagacatgctgcagggctgagaggtgtcagggctccctctctcatctcctaactacaggcagttctactgttgtgagtttgaccatcctgaacccaggcctgttgttttcagggggccttactcagagcccttcagtggggggtgtcagtgaacagtatagcctagcatctaagcatcaggaaaagaacagctccatcaaaaattgagccattttgtcacttgggaaaagtagtaaagcttcatatttatttaaagagtgctccaggccatagctaatagcaataaagtaggtctagccaagagatgaccagctgagtcattagctgtgagtgctctccataagctgtttaaggtactgctagggatgtttgttcttaagattaactggggattggaattttgttcttgtacattgatttcatatgaggaggggtcacttttcaaaaacaaaatgagtatttattatgtcttactgatttctcggatctctcttcctcagtttctcctcatgcttccccacatgtctttggcttctgctcccattggtatgtttgtttttgtttttgtttgtttgttcttttttttaaaaaagaaaactgtgctgcataggtagaatgttgtatagctagcattgtattgtatgtaattaattttgcacaaaggcaaacatttagcacagtagttaattttgtttgtttttatgaccatgccaaaataatattctgggctagtagagaacaaaggactgttctttaggattgaaacttgattttgcttatagtaaga

SEQ ID NO: 2009 - DNA, 3030 bp, Mus musculus
taggacaccgaggcaaaagggcagggagagacagccaaagccacctttgacagcagaagtgttatcgccatcgcaagtattcgtccggaaatctgtctgccctcttggcccacctaattcctccaccttcgcctccccaagtagataatctatagaagtgggaatgagatgaaaaagaagtcaggtggcttagagagtgaattgttaagtctccgtaaagttcgaggtcacgttcatgaattcaaaggcgatttaccagtgacttctgggtgctgggtgatcctcgtgtataactaagaatgtcttccaagcaagccacctctccatttgcctgtacagcggatggagaggaagcaatgacccaggacttgacctcaagggaaaaggaagagggcagtgatcaacacccggcctcccatctgcctctgcaccccataatgcacaacaaacctcactctgaggagctgcctacacttgtcagtaccattcaacaagatgctgactgggacagcgttctgtcatctcagcaaagaatggagtcagagaataataagttatgttccctatattccttccgaaatacgtctacctcaccacataagcctgacgaagggagtcgggagcgtgaaataatgaacagtgttacttttggaaccccggaacgccgcaaagggagccttgccgatgtggtggatacgctgaagcagaagaagctggaggagatgactcggacagaacaagaggattcctcctgcatggaaaaactactttcaaaagattggaaggaaaaaatggaaagactaaatacgagtgaacttcttggagaaatcaaaggtacacctgagagccttgcagagaaagaacggcaactctccaccatgattacccagctgatcagcttgcgggagcagctcctggcagcccatgatgaacagaaaaagctggcagcatcgcagatcgagaaacagcggcagcaaatggaccttgctcgccaacagcaagaacagatcgcaagacaacagcagcaacttctacagcagcagcacaagattaatctcctgcagcaacagatccaggttcaggggcacatgcctccgctcatgatcccaatttttccacatgaccagcggaccttggcagcagctgctgctgcccaacagggattcctcttcccccctggaataacatacaagccaggtgataactaccccgtacagttcattccgtcaacaatggcagctgctgctgcttctggactcagccctttacagcttcagaagggtcatgtttcccacccacaaattaacccaaggctaaagggcataagtgaccgttttggcaggaatttggacccctctgaacatggtggtggccactcttacaaccacagacagattgagcagctctatgccgctcagctggccagcatgcaggtgtcacctggagcaaagatgccatcaactccacagccaccaaactcggcaggggcagtctcacctactgggataaaaaatgaaaagagagggaccagccctgtaactcaagttaaggatgaaacaacagcccagccgctgaatctctcatcccggcctaagacagcagagcctgtgaagtccccaacatctcccacccagaacctcttcccagccagcaaaaccagccctgtcaacctgccaaacaaaagcagcatccccagccccattggaggaagcctggggagaggatcctctctagatatactatccagtctcaactctcctgccctgtttggggaccaggacacagtgatgaaagccattcaggaggctcggaagatgcgagaacagatccagcgggagcaacaacagcagccacacggagttgatgggaaactgtcctccatgaacaacatggggctgagcaactgcaggactgagaaggaaagaacacgctttgagaacctgggtccccaattaacaggaaagtcaagtgaagatggaaaactgggcccgggtgtcatcgatctcactcggccagaggacgcagaaggaagcaaagcaatgaatggctctgcagctaaactacagcagtattattgttggccaacaggaggcgccactgtggctgaagcccgtgtctacagggatgcccgcggccgtgccagcagcgaaccccacatcaagcgaccaatgaatgcgttcatggtttgggcaaaggatgaaaggaggaaaattcttcaggccttccctgacatgcataactccaacattagcaaaatcttaggatctcgctggaaatccatgtccaaccaggagaagcaaccttactatgaagaacaggcccggctaagcaaaatccacctagagaagtacccaaactacaagtacaaaccccggccgaagcgcacatgcatcgtggatggcaagaagctccggattggggagtacaagcaactgatgcgctcgcgaaggcaggagatgcgacagttcttcactgtggggcaacagcctcagatgcccatcaccacaggaacaggtgttgtgtatcctggtgctattactatggcaacgaccacaccatcacctcagatgacatctgactgctctagcacctctgccagccccgagcccagcctccctgtcatccagagcacgtatggtatgaagatggacggcgcaagcctggctgggaacgacatgattaatggagaggatgaaatggaagcctatgacgactacgaagatgatcccaaatcagactatagcagcgagaatgaggccccagagcctgtcagtgccaactgaggagcttttgtttgctgaattaaaacactctgacatttcgctccctttcccccaacaacaacaacaaagttcttaaagagcccgcatgcatttgtggctccacaatacatcagcagaatggtcttaattgcttcgtaacgtgtgagacagattacgttttcctgatttttcataaacttgagtttttgtcgttaccgttactgttgttgtttatttaggtgaagacgtattaaatatgagacaccgg

SEQ ID NO: 2010 - protein, 819 aa, Mus musculus
MSSKQATSPFACTADGEEAMTQDLTSREKEEGSDQHPASHLPLHPIMHNKPHSEELPTLVSTIQQDADWDSVLSSQQRMESENNKLCSKFRNTSTSPHKPDEGSREREIMNSVTFGTPERRKGSLADVVDTLKQKKLEEMTRTEQEDSSCMEKLLSKDWKEKMERLNTSELLGEIKGTPESLAEKERQLSTMITQLISLREQLLAAHDEQKKLAASQIEKQRQQMDLARQQQEQIARQQQQLLQQQHKINLLQQQIQVQGHMPPLMIPIFPHDQRTLAAAAAAQQGFLFPPGITYKPGDNYPVQFIPSTMAAAAASGLSPLQLQKGHVSHPQINPRLKGISDRFGRNLDPSEHGGGHSYNHRQIEQLYAAQLASMQVSPGAKMPSTPQPPNSAGAVSPTGIKNEKRGTSPVTQVKDETTAQPLNLSSRPKTAEPVKSPTSPTQNLFPASKTSPVNLPNKSSIPSPIGGSLGRGSSLDILSSLNSPALFGDQDTVMKAIQEARKMREQIQREQQQQPHGVDGKLSSMNNMGLSNCRTEKERTRFENLGPQLTGKSSEDGKLGPGVIDLWEDAEGSKAMNGSAAKLQQYYCWPTGGATVAEARVYRDRRASSEPHIKRPMNAFMVWAKDERRKILQAFPDMHNSNISKILGSRWKSMSNQEKQPYYEEQARLSKIHLEKYPNYKYKPRPKRTCIVDGKKLRIGEYKQLMRSRRQEMRQFFTVGQQPQMPITTGTGVVYPGAITMATTTPSPQMTSDCSSTSDEPSLPVIQSTYGMKMDGASLAGNDMINGEDEMEAYDDYEDDPKSDYSSENEAPEPVSAN

SEQ ID NO: 2011 - DNA, 5227 bp, Mus musculus
aaggcatgtgggtgctgcatctccccacaggccgggaagctttgcttcgcccatccacttttacgctttaaactcttttaattgttgaacaaaactgacactgctttgtttaagcagattagatgctgtttaaagccatggctgcatttggtagcctgggactcaggagaaattagttagtgctttttgtgatttgggaaggtgtcagaggggtacgccctcgagtgctgaagttctggctgatgtggcaagagagagccggattgaagagtggaggaacagctacttcgtaagaatgtcttccaagcaagccacctctccatttgcctgtacagcggatggagaggaagcaatgacccaggacttgacctcaagggaaaaggaagagggcagtgatcaacacccggcctcccatctgcctctgcaccccataatgcacaacaaacctcactctgaggagctgcctacacttgtcagtaccattcaacaagatgctgactgggacagcgttctgtcatctcagcaaagaatggagtcagagaataataagttatgttccctatattccttccgaaatacgtctacctcaccacataagcctgacgaagggagtcgggagcgtgaaataatgaacagtgttacttttggaaccccggaacgccgcaaagggagccttgccgatgtggtggatacgctgaagcagaagaagctggaggagatgactcggacagaacaagaggattcctcctgcatggaaaaactactttcaaaagattggaaggaaaaaatggaaagactaaatacgagtgaacttcttggagaaatcaaaggtacacctgagagccttgcagagaaagaacggcaactctccaccatgattacccagctgatcagcttgcgggagcagctcctggcagcccatgatgaacagaaaaagctggcagcatcgcagatcgagaaacagcggcagcaaatggaccttgctcgccaacagcaagaacagatcgcaagacaacagcagcaacttctacagcagcagcacaagattaatctcctgcagcaacagatccaggttcaggggcacatgcctccgctcatgatcccaatttttccacatgaccagcggaccttggcagcagctgctgctgcccaacagggattcctcttcccccctggaataacatacaagccaggtgataactaccccgtacagttcattccgtcaacaatggcagctgctgctgcttctggactcagccctttacagcttcagaagggtcatgtttcccacccacaaattaacccaaggctaaagggcataagtgaccgttttggcaggaatttggacccctctgaacatggtggtggccactcttacaaccacagacagattgagcagctctatgccgctcagctggccagcatgcaggtgtcacctggagcaaagatgccatcaactccacagccaccaaactcggcaggggcagtctcacctactgggataaaaaatgaaaagagagggaccagccctgtaactcaagttaaggatgaaacaacagcccagccgctgaatctctcatcccggcctaagacagcagagcctgtgaagtccccaacatctcccacccagaacctcttcccagccagcaaaaccagccctgtcaacctgccaaacaaaagcagcatccccagccccattggaggaagcctggggagaggatcctctctagatatactatccagtctcaactctcctgccctgtttggggaccaggacacagtgatgaaagccattcaggaggctcggaagatgcgagaacagatccagcgggagcaacaacagcagccacacggagttgatgggaaactgtcctccatgaacaacatggggctgagcaactgcaggactgagaaggaaagaacacgctttgagaacctgggtccccaattaacaggaaagtcaagtgaagatggaaaactgggcccgggtgtcatcgatctcactcggccagaggacgcagaaggaagcaaagcaatgaatggctctgcagctaaactacagcagtattattgttggccaacaggaggcgccactgtggctgaagcccgtgtctacagggatgcccgcggccgtgccagcagcgaaccccacatcaagcgaccaatgaatgcgttcatggtttgggcaaaggatgaaaggaggaaaattcttcaggccttccctgacatgcataactccaacattagcaaaatcttaggatctcgctggaaatccatgtccaaccaggagaagcaaccttactatgaagaacaggcccggctaagcaaaatccacctagagaagtacccaaactacaagtacaaaccccggccgaagcgcacatgcatcgtggatggcaagaagctccggattggggagtacaagcaactgatgcgctcgcgaaggcaggagatgcgacagttcttcactgtggggcaacagcctcagatgcccatcaccacaggaacaggtgttgtgtatcctggtgctattactatggcaacgaccacaccatcacctcagatgacatctgactgctctagcacctctgccagccccgagcccagcctccctgtcatccagagcacgtatggtatgaagatggacggcgcaagcctggctgggaacgacatgattaatggagaggatgaaatggaagcctatgacgactacgaagatgatcccaaatcagactatagcagcgagaatgaggccccagagcctgtcagtgccaactgaggagcttttgtttgctgaattaaaacactctgacatttcgctccctttcccccaacaacaacaacaaagttcttaaagagcccgcatgcatttgtggctccacaatacatcagcagaatggtcttaattgcttcgtaacgtgtgagacagattacgttttcctgatttttcataaacttgagtttttgtcgttaccgttactgttgttgtttatttaggtgaagacgtattaaatatgagacaccgggacttggaaacttatctctgcccatcgccgtcttatgagtcttacatttctgtcttactatttttcttttggatgttgacaaagggtttaagttactgttttagatggggttaaacattctcactcaggtatgctgtgccggctacaggttgtgaatgtgtttttattctgaattactttagaaaacaactgaggatttcgtattgtgaaaccggacaagtccacggcgtgagcggctgcatatagaacatgttcaaaaggcctcggaattccatttgtttcaatgtgtagaattcaactttgaatgtgccaaacttttttcataacttttgaatcttaactattttaaaagtcttacaggagacactgcaaagtcttagacaatctttgacatcttaaaataaaatagcaaaccacatttttttttccagaaaatggtgaagtactcaggaatctggagacaagatattgtaaggaatgagcaaggctgccacagtgcgtgaacccaattgtgtttgcctcttgatgtgccatcagtgtgtggcgtgggatgacatagatcagagcaatcaccacaccagacaccacacggtggactcccctgtctgagaccgcctctcactacatccattcttaccttgcctttgccctgacattcaaccttaacacattgttctcttaaataatttattcattccagaatgtcaagggtccacttactatttattttaaaaattattggtggcattaatttaatttttttttgccctccttgccctttaacctctttttcctgctggatacaaaagatgtacatagcaatctcatgtccccagagcccctggaaacatttctgaagtgatgctagtacatgcatatattgttgtttttaaagacaagtgtgtagctggctgcagggttgtgcatctgcgtcaaggtatcctacatttaaacatgtatgcccccaggagtcaccatgaccttgggtctttgactagagtttctccctcattgagtttttcagtaaacagtagaacctgagttccattcagcagtgagagtcagcagtggtcactgccagtcaaggagcctctcacagccactctgaagcccaaggaccatgggccacacggggtctactttggacccggcattctgtcacctttattgagctacctggtcccagctggcacatccatggagatctttgcaaaactctacaggttgttagacaactccgaggaaatccaggaagaaaggaaaccacaggcaagggaagcaatggtgagctgccagctcctagggacagatgctagaggtacccacagctcccctgaagacctcgtttctcagtggctgctcgtgaacgctgctgctgataagctcttgccactgaaggtgagctctggagactgagacatgctgcagggctgagaggtgtcagggctccctctctcatctcctaactacaggcagttctactgttgtgagtttgaccatcctgaacccaggcctgttgttttcagggggccttactcagagcccttcagtggggggtgtcagtgaacagtatagcctagcatctaagcatcaggaaaagaacagctccatcaaaaattgagccattttgtcacttgggaaaagtagtaaagcttcatatttatttaaagagtgctccaggccatagctaatagcaataaagtaggtctagccaagagatgaccagctgagtcattagctgtgagtgctctccataagctgtttaaggtactgctagggatgtttgttcttaagattaactggggattggaattttgttcttgtacattgatttcatatgaggaggggtcacttttcaaaaacaaaatgagtatttattatgtcttactgatttctcggatctctcttcctcagtttctcctcatgcttccccacatgtctttggcttctgctcccattggtatgtttgtttttgtttttgtttgtttgttcttttttttaaaaaagaaaactgtgctgcataggtagaatgttgtatagctagcattgtattgtatgtaattaattttgcacaaaggcaaacatttagcacagtagttaattttgtttgtttttatgaccatgccaaaataatattctgggctagtagagaacaaaggactgttctttaggattgaaacttgattttgcttatagtaaga

SEQ ID NO: 2012 - protein, 819 aa, Mus musculus; identical to SEQ ID NO: 2010

SEQ ID NO: 2013 - DNA, 5103 bp, Mus musculus
taagacctaactatgataacattaatgatagtgtttataaccaataagtaaggcagttgccaatgtgacaatttggaatcataaagatgaaatttcaggtcacgttcatgaattcaaaggcgatttaccagtgacttctgggtgctgggtgatcctcgtgtataactaagaatgtcttccaagcaagccacctctccatttgcctgtacagcggatggagaggaagcaatgacccaggacttgacctcaagggaaaaggaagagggcagtgatcaacacccggcctcccatctgcctctgcaccccataatgcacaacaaacctcactctgaggagctgcctacacttgtcagtaccattcaacaagatgctgactgggacagcgttctgtcatctcagcaaagaatggagtcagagaataataagttatgttccctatattccttccgaaatacgtctacctcaccacataagcctgacgaagggagtcgggagcgtgaaataatgaacagtgttacttttggaaccccggaacgccgcaaagggagccttgccgatgtggtggatacgctgaagcagaagaagctggaggagatgactcggacagaacaagaggattcctcctgcatggaaaaactactttcaaaagattggaaggaaaaaatggaaagactaaatacgagtgaacttcttggagaaatcaaaggtacacctgagagccttgcagagaaagaacggcaactctccaccatgattacccagctgatcagcttgcgggagcagctcctggcagcccatgatgaacagaaaaagctggcagcatcgcagatcgagaaacagcggcagcaaatggaccttgctcgccaacagcaagaacagatcgcaagacaacagcagcaacttctacagcagcagcacaagattaatctcctgcagcaacagatccaggttcaggggcacatgcctccgctcatgatcccaatttttccacatgaccagcggaccttggcagcagctgctgctgcccaacagggattcctcttcccccctggaataacatacaagccaggtgataactaccccgtacagttcattccgtcaacaatggcagctgctgctgcttctggactcagccctttacagcttcagaagggtcatgtttcccacccacaaattaacccaaggctaaagggcataagtgaccgttttggcaggaatttggacccctctgaacatggtggtggccactcttacaaccacagacagattgagcagctctatgccgctcagctggccagcatgcaggtgtcacctggagcaaagatgccatcaactccacagccaccaaactcggcaggggcagtctcacctactgggataaaaaatgaaaagagagggaccagccctgtaactcaagttaaggatgaaacaacagcccagccgctgaatctctcatcccggcctaagacagcagagcctgtgaagtccccaacatctcccacccagaacctcttcccagccagcaaaaccagccctgtcaacctgccaaacaaaagcagcatccccagccccattggaggaagcctggggagaggatcctctctagatatactatccagtctcaactctcctgccctgtttggggaccaggacacagtgatgaaagccattcaggaggctcggaagatgcgagaacagatccagcgggagcaacaacagcagccacacggagttgatgggaaactgtcctccatgaacaacatggggctgagcaactgcaggactgagaaggaaagaacacgctttgagaacctgggtccccaattaacaggaaagtcaagtgaagatggaaaactgggcccgggtgtcatcgatctcactcggccagaggacgcagaaggaagcaaagcaatgaatggctctgcagctaaactacagcagtattattgttggccaacaggaggcgccactgtggctgaagcccgtgtctacagggatgcccgcggccgtgccagcagcgaaccccacatcaagcgaccaatgaatgcgttcatggtttgggcaaaggatgaaaggaggaaaattcttcaggccttccctgacatgcataactccaacattagcaaaatcttaggatctcgctggaaatccatgtccaaccaggagaagcaaccttactatgaagaacaggcccggctaagcaaaatccacctagagaagtacccaaactacaagtacaaaccccggccgaagcgcacatgcatcgtggatggcaagaagctccggattggggagtacaagcaactgatgcgctcgcgaaggcaggagatgcgacagttcttcactgtggggcaacagcctcagatgcccatcaccacaggaacaggtgttgtgtatcctggtgctattactatggcaacgaccacaccatcacctcagatgacatctgactgctctagcacctctgccagccccgagcccagcctccctgtcatccagagcacgtatggtatgaagatggacggcgcaagcctggctgggaacgacatgattaatggagaggatgaaatggaagcctatgacgactacgaagatgatcccaaatcagactatagcagcgagaatgaggccccagagcctgtcagtgccaactgaggagcttttgtttgctgaattaaaacactctgacatttcgctccctttcccccaacaacaacaacaaagttcttaaagagcccgcatgcatttgtggctccacaatacatcagcagaatggtcttaattgcttcgtaacgtgtgagacagattacgttttcctgatttttcataaacttgagtttttgtcgttaccgttactgttgttgtttatttaggtgaagacgtattaaatatgagacaccgggacttggaaacttatctctgcccatcgccgtcttatgagtcttacatttctgtcttactatttttcttttggatgttgacaaagggtttaagttactgttttagatggggttaaacattctcactcaggtatgctgtgccggctacaggttgtgaatgtgtttttattctgaattactttagaaaacaactgaggatttcgtattgtgaaaccggacaagtccacggcgtgagcggctgcatatagaacatgttcaaaaggcctcggaattccatttgtttcaatgtgtagaattcaactttgaatgtgccaaacttttttcataacttttgaatcttaactattttaaaagtcttacaggagacactgcaaagtcttagacaatctttgacatcttaaaataaaatagcaaaccacatttttttttccagaaaatggtgaagtactcaggaatctggagacaagatattgtaaggaatgagcaaggctgccacagtgcgtgaacccaattgtgtttgcctcttgatgtgccatcagtgtgtggcgtgggatgacatagatcagagcaatcaccacaccagacaccacacggtggactcccctgtctgagaccgcctctcactacatccattcttaccttgcctttgccctgacattcaaccttaacacattgttctcttaaataatttattcattccagaatgtcaagggtccacttactatttattttaaaaattattggtggcattaatttaatttttttttgccctccttgccctttaacctctttttcctgctggatacaaaagatgtacatagcaatctcatgtccccagagcccctggaaacatttctgaagtgatgctagtacatgcatatattgttgtttttaaagacaagtgtgtagctggctgcagggttgtgcatctgcgtcaaggtatcctacatttaaacatgtatgcccccaggagtcaccatgaccttgggtctttgactagagtttctccctcattgagtttttcagtaaacagtagaacctgagttccattcagcagtgagagtcagcagtggtcactgccagtcaaggagcctctcacagccactctgaagcccaaggaccatgggccacacggggtctactttggacccggcattctgtcacctttattgagctacctggtcccagctggcacatccatggagatctttgcaaaactctacaggttgttagacaactccgaggaaatccaggaagaaaggaaaccacaggcaagggaagcaatggtgagctgccagctcctagggacagatgctagaggtacccacagctcccctgaagacctcgtttctcagtggctgctcgtgaacgctgctgctgataagctcttgccactgaaggtgagctctggagactgagacatgctgcagggctgagaggtgtcagggctccctctctcatctcctaactacaggcagttctactgttgtgagtttgaccatcctgaacccaggcctgttgttttcagggggccttactcagagcccttcagtggggggtgtcagtgaacagtatagcctagcatctaagcatcaggaaaagaacagctccatcaaaaattgagccattttgtcacttgggaaaagtagtaaagcttcatatttatttaaagagtgctccaggccatagctaatagcaataaagtaggtctagccaagagatgaccagctgagtcattagctgtgagtgctctccataagctgtttaaggtactgctagggatgtttgttcttaagattaactggggattggaattttgttcttgtacattgatttcatatgaggaggggtcacttttcaaaaacaaaatgagtatttattatgtcttactgatttctcggatctctcttcctcagtttctcctcatgcttccccacatgtctttggcttctgctcccattggtatgtttgtttttgtttttgtttgtttgttcttttttttaaaaaagaaaactgtgctgcataggtagaatgttgtatagctagcattgtattgtatgtaattaattttgcacaaaggcaaacatttagcacagtagttaattttgtttgtttttatgaccatgccaaaataatattctgggctagtagagaacaaaggactgttctttaggattgaaacttgattttgcttatagtaaga

SEQ ID NO: 2014 - protein, 819 aa, Mus musculus; identical to SEQ ID NO: 2010

SEQ ID NO: 2015 - DNA, 656627 bp, Homo sapiens
  misc_feature (1)...(656627): n = A, C, G or T/U
gactaaagtttatttctgtggttattatcctataacccttatatttttcctttctgtgttttattgtgataatcatgcttacttgtgtaattatttagataactttcagttcaaaaaaattccaaaattctgtgtatcattgtaagagaaacagttagatgatggatagaaatttcacttttcatctggatgtttcagaagtgttagttttggccaccttaagcaataaagcaacgattaccttaataaatagatatattttcagatagcacttcaaaaatattaggtctggtattgttaaaaatatagctgacatgtatgttttttgggaaattggtaggagtttacaatgttctggtttctatcacattatttatggtggtttcatttccttatattttgccattcaatattctgtctatggtaaaatggagaatatagactgaatagtgacaactcctatgttgtagaatttttgattaaaaataatggaattggtccctgactgcacatgtgatttgtgttccagttttgtagtcactggatttgtttaattcctaccctggcttagtttctgccagttatgttaaacttcatgtgtatattttttccatttaagataaaatgaactgccaggattatgtatggcaaaaccaagagcgctctgagttaaggctctcaggacattgtacaagtctaatgttcttgtatgaggttggcctaccccactgcaactaagaaatgagatgatttgaggactattacatacttaaggttttcatagtggattagaatagcattacttagcacaggtgtttctataattgggattccctgggaaacttcagtactgttctcggtaacattcagctttccacataaatggaagagctatccaatgttaatttgataggctgtggcatgaaacagggagtggggtccggcttgggggcctgttgcttcttttattggagaagacatttcttgttgtccattagcatcgggttgctgtggctatatttttaatttttaatttataccattatttatttattgttgaccaaaatactgaatgggcacggccaaagtcagccagggctgatttatgctcatataaaacaaaatagttccctagtgtcccattttcttgaaataaatagaattcttctcaatttataaagtatatttaaataatgtctatgcatccaagtagcagggaaatgactgaggaacccatggggcacagttcaccgaggaggacctacggtgtggccttgcagatgtccccaagccttggaggcagtgaccaggagtaacaaagaacaaccgcgataaattatttcaggatttagctaggaggttcttaagcctggcattcttttagtgcaaggcgtgaatataggaagaacggtgagcgaaaaaggcttccataggggtaggaatgggaaaatagaaaatcattgatataattaataatcattattattttacctaatccattgttagacactcagaaggactgatttcctgagaaatgggcgactatagagctgggaaatgttcagctctcgcagcaggcggccgggctgcctgaacgtccttctcttgcacgcaattctcgtctcggagacctccgtttgtgaccttgggtctggccgcgtccctgagtccctttgtctactgttccgaaggtggagaggaagcgggagatgagtcccagggagtacggagtcagctctgagccgaggtcaccgcagaagggagctcggtcttcggccaggaccggagcagttggtatgcctcttcgaagctgcccccaccctctgccactgccctgggagttagtgtttggagtttcggagccgcagcccctgacttggagctgcagactctttggcccgaagctttatactttgctgggagagttcgccttcgctcgattcccggctattggtttcagctagttggaagttttagctctcactcctgtcagcccgagtctctgagggcagacggcgcctagcgtggcccgcccgcccgcagggcgccctccctttgcttctctttcaggcggtcccgggaggtcgccaaggctgctgggccagtgtcagctgggttcgtctctacagcccctagctgggcgcagtcttcccctcgacctcaaggtggcgacttaggcacgtaaacaaagctcggccaagcctgaccgccggcatcctcgcagttcatccacggaacagtctagtttccccgatgctctggagcgggctgaattgactgtaaagggacttccgtttagatgaggagttcggccagaatttcagaatacgcgcgtgtctgtgtgtgtgcgtgcgtgtgtgtgtgctcgtgggtccgcgcgcgcgcgtggaggcagcgggaagtggtgatggggtggaaacccttggccgaacccgtttgggacgccgcgagcctcctctccatcacctgagccctcaggccgagcgacccagcgggctggggcttcggaaccactctgcaccgagagatgtctcagagtgcgcaactggcaagacagaggctctggttgccgccgccagcggtagaagatttgctaatctcgttttagtgacacccataatttatgagtggagagacctgaaaaataaagcccccgccgtgtttgtgcccttctccagggtgcatgccggctgatctgagtggcaggggtagttgggggtggggaagagagacacagacagtgaaagaataaacgtgaggcagtcacacaatcttacctccgggacgaaaggacacggttcctagaactgagatttccatagcccgtctgcatcccagctgtttttcccgtaggcgctttcctgcctaacaccgccttctgactaacttggacaaggcttgagctgcccccctccttttttcctccctttttttctttccagacattccctaaactcaacccagggcaaatccagaagtcggtacagtacagagcttccattcaatcgtgggggggaaatcccgtttacagtttctcttaggcagatggaagaagtagatggttacaggactttggcagggtgcgtggggatggcatggcgtgttagtgtcagggaagcgcgatttctcttaggtattggtgctgcaggtaaggttcccagattccagctgcccttgtgcagagctgcagtgtcggtgagagtggagggtgatccgcgtctcattagaggggaatggaggagggtgacgtgggggagaaatggaccctgtacaggctccgcagacacacattgtcttagttcgtgtctgtgccgctccacgctgcctttgggagctttttgagcaaggtagtatactccaggctttttctccttttcttcatcgccatccccccactcccaaccccgcccccccgcctcaatgtgtttaaaaagaagtgagtacccttctaaaataagttaaaaatctttctctgactttccatttgagatgccaaaaagattaaataaatgaaactttatttacggatgagtttatccacagactcagcgacttctctggtctttggccttattttaattctatggtggtaattacccttcgtttctttaagtgtaatagatttattgccttagagactatgcacagtttgattgaattattcatttttttctttggtgtagactgcatctggggactctgatgtgacgtgtagatttttttttttttcaggaacaaagggaatgtggaaatgaaagagagagggagagagaggctggcagatgtaatgagacgcggtgaaggtgtacgcagactggcactcccactcctcccttctgctctcactgcagccctgggtaactcgcaggctaacacaaacagcttttctcccgcagcctgccctctgtcactgtaagtacatcagccttctcttatcagcatgcagattccagccacgcactccctagcctggctttgcaccttagacagcagaagcgcatttaaaaattaactttcctaagctaggaaaggcatgtctgtaaaacttatttttgatttatctttatttttctttggaaaaaagttcatgcatttttaccacttttccccacctcctttgtggcggtgctctgccgctactgtcgctaccgctgtgatcttcctaacagaaatgacacgcagattcaaatgaaatttaatgttattctctgtccacttaaagtcgagggacaatgccttgtccttttgcagaatgacatcttaaggaacgcaggacattattcagtttgctttttgcttttgttgctgaaacacgagttccgacctctttgaggcagagtcccaagggcactgttatttggtagttcaggttatttggttacttcaaacttaaatgaagtgcgatgggcagctgaagtgttggtttatttgttatcccgtttaaggaaaccaattgctaaaacttctccgtactgacttaaagttttcaacttcttcccttttggcttttacactctctcatttatccttcgtttcagtaaaagttcttctcagtgtttgggagcgattgacagttatgcttgtccaatttatacagtagctttgaagtccttcctgaaagaagttagcgacttcaatatgaaatcatgtaggtctgaattgtccgcccggatggtgtaaggagtctttcaaagcgggaattcgaggttttaatagccgttatgatttttgcgtgggtgttttaaatactaacttctcgagcagaattaattgccttgtccttcccaagttcagggggacctctctccaggaaccgtgcgcgcctttccttttgcgagttcgcgcctcttctctggaggtgcgaggccaaagttagcaaagccgaattgcctttgctggttgcggtgcgcagggacattcggacaacacagaggcagcgactgctgcgggcaggtaagtcagccccacccgctcgcccctccttccctcccaggttccccggagctcagcgcccggggttcttgcgccgcgtggggctccaacccccaggggatgtgagcttatgagttcctggatctggccaccgtgcctgggtgccctctgctcctccgggaacttctccgagcccgcaggccggtgcgcaccaggtaggtggagagcccagcactttactttagcaggctgctgcgctctccgcctctccctcttcattggtatagccagcgcccgaggctttagaggaaacccttagatggcacccccgcccccagggccacgtgtcactcttacacagccagaagtgcggcatcgagaccccaaattttagtttccttcctttagggatgaatattgttacttgctccgggttccgccttatcaatatactttgctatcagtttattagataaaatctaaaaggggttcctgcggctccttttcggaaggttcatcgcggccgggtattagggccttcagtggacgccagagatcttgataatgtctccttcttttccttcttgcctcccgctagcggcctgcatctggtcggcagggtcagtcttgcccaccagaaccccgattgctctgtgatttaaagagacggacgcgctagtatttggaaagccaaacttgtcgcagcaaattggaggaacccagtcgcgctccagcctttccgtccctaatgtttcacctctctaggtggctcttccctgaggacttggtctttgagacttaatctacacctgtctcctctctgcaggcatttaggacaggtccttcaatgatgacctctttaggctttggagaggttttatggcccttgttgttgagttccagggcagacagctgaggagtgcaacgctctggaacaggcccaacgacactcttacacacacaggggagatctgactcctgtctgggctagaaacaccagtctgagcttgccccttgggccttagaggtcaaggggcccgcaggcagttctgggagccctggcctttaagagctgcccagcaaggtaccagggtgtacatcttattggcctccaggctctggcccctagagacagaatttccagtcctgaaagtcaccatggctggtggagacacaagatttcttgctggggactaactcctcccaaaaacatcaagtcagtttaactcacagtccccaagctaccagtcttcaagcattgtatttcctagtgggccaggagcatatgactatttcttctgccccacagatcctaggagctcatcttcactcttatctctttttttatctggagtttgtgtgaaaccaacatggagtatattttaaaaaggcagtatatgatcgacagctcagcttgttccatcttctgtgcttgcatcctgtctccgttttcttcaaagataatgtaatagagatgagactttctcccctttgtctttgatcacttcatctgtaggaggtcttccccatgttggcaactttagattgccatgaaactttctgatttctccaatcagcattcctgactcctcttttggtccatatgtcctttcacaaagtctctttcgatgaactgtctcaaagtggccatctcatatgagtttctatacagtaaggatctctccttcacaaatctctgcaggttatgctggtgcttcagaacctctttcccagcttttatcttgatgtagttttgactttccactgacctcagtttctcaaatctagtctatttctttgggcctgggttaaggcaggccaacctcaccttgtgcatactgcctctagttagccttgtgctgctatcaaagctagttttctcatctatcttttatattctgcatctctactacctgagaccatgattattccctgtcctggtcctccagctttttttgcactgagattaagtttcaggtgtctacttctttatgacattctatgtccttcaaatctataatctaccctacacatgactcaaagggaatctttatttaggttttgtctgggggtcttttattaacataattttctacatctgacttaggcatttttatatgtcatcctgggtgactgaaactgttttcatcttcaacaacctttaaaccacccctcttgaaattgtttctccaaatcttttcctctacaaagttgaggtaatatacatatatcatccactcaatcccatacaatgaagacttatccatataacagtataacaattgtggaattgttttatttattgccgtgaaagtgtaataattttttggtgatttgtacatgtcctgttatttataataatttgaatccataaactatataatccatatggcctccagaacactgccacctacatatgttaggaatctcctgtgtgaattgctttttcttttttttttttcaacgcctcctcctccatcgtttaaaatgtttctcttcccccatttgctgagatcctactaagtggtgtgttttcatcatctctgcttccttcatctctttcttttctctcttttgactacttctttttttcgttttccttcatccttcttattgttcatcctaatatccacccttcttgtcttctccctggcctgcctgtccttccccttctccgtttgtctcgtgactcgcttttgtggtccagttctatctcttagtacttctcaacattcagcccatgcctccttctgtcacctaacttttccaaagcacaagctaccattcatacattttcctttaccatttgacttcctcactttctccagtttgctccttttttttctccccgagttgcctaccttttccacgctacagtttgcctttctcctgactcctcctcccagcagccctagccccaatagagctcttttggtcgttttcccctcagcctgcctctcccccacctagtacttgtccccattctcctctgaccccgactttctctcttctttgtctccttccagttctcccctagtagttgcttcaccgtctctttccaggcgctttccccagttccaacctctggtctcgccgatgtctctgccctcctctctctttgcggctctctcttgcctttgcctcccgctctcccctccttcttcccccggcccgccctcctccctcccagcttctctgcctggctcgctgcctccctcgcctcttgtctcatcttgcctgtgttgtctgggaggggagcccagcctcctctccctcgctcagatcaatgccctggccactcactttctgatgttgcacgacgggaaatgctttgaatacttacgacatggccgctcacactgattgccaagattgacagcactaaccatcgccttcacttgttccagggtgaagcccctagtcaccccgctccgcgcgcacctcctggaaccccggcggcaaacttctgccgctctgcgctgcccccacccggggcgggacacccccgcagacttgagttaacgggctacgccggccgcggcgctggggggttctgttcccttgctccccggactgtgacaattgacctagcaccgactccccttccttttaattttttttatttgtatctttccctttttctttaatgccatttactcctgcggcgcagcgcacaaggagccctcccgcgcggtaccatcctggagcccgcccaggtaaccgggacggagcgagcgatctcgagagcgagggaggcagagccagggcgcgcggcccgctgtgagctacctgttggggcgccggagggggcagggggcaggagcccagggccgggccgccgtcccccggcgtcttccgctcctgcccttccgggcactccagggttagtttctgtgagctgggaccgaggggctggggcaggacaggcagagggacgagagccgagcgagcggagccccgagagggcgcgggtggccgggagccgcggctgccgggccggggcgggtttgcgtacttggctggggaggggaaaggaggaggaggagcgggaggagggcgctccgaggggccgacgcggagggggagtggagggagagaaaggggcccgggcgcccgccgctcgctggtggacgcgctgatcccgaggatgcgtccccctcttggagagttgcgccttgttccggagtgacagatctgcgtggcgggggtctgtttttctccccttcacctcccctccaaaaaatccaccctgagaaaacacatgttgtagccgtagataactgtgcgtaggacattaaggcaaaagggcagggacagggacacaacgcaacctttgacaacagaaagctgttatcgccatcctaagtattcgtccggaaatctgtctgccctctcggcccacctcactcctccacctccgcctccccgcattggtattctaatctatataattgggaatgatgtgaaaaagaagtcaggtggcttagagaatgaatttgtaagtctccgtgaagttcgaggtaggtatttcattgaagttcgctcaagtgtgtgatagaggaagcttttgtggctgcgtgtgtagtcatccctcctcgttctgtgaaagcaaatgcgtgtcggctttgaaggttcagatgggaccgctaggcggtaatgccctccgtgcccacaagagggcaacatcccgagggctttgtgagcgctgtatctcttgttaccgccgcaggcttgggtttagagaaagttacactgaaacttttaaaaaactgataccacctcttatttcgcgatactaaaaaaagaaagatataaaggaaaaaaaaaaagaaaaaagagggaagtaaagagagaagagagaaagagaaaggcaggcagccagcctaccccgggagagccctagtcacaccgagactagggggagggctgttttaattgtgggtttggccgactgacgactggagtgccctcctcggctgtcttagttgtagccggaggtcatgtaaatcgaccttaaaagaatgcataagccataaattaaaataaaccctcatccaagggctgatccatacgtagacaatatccaacctggacaaaacgggcttcccttgcgagccgacctaaaccgcatcccccaaagaatagagactaaatgcaaagtaagtttcctagcaaatattttgttttcttgaaaagtgttgggttgattcgctgtgtgactgagacgccacagtgttcggagcgcttcagtgtcacccaggctctgggtgcgggaggtcgggaggacccgctgagcttctgggcttcttaatgctacccccaccccacccccatttcggtttggaaacttaggctgtttgtggggttgacactggttgagggcgggcgggagtcgaggatctccgccgctctctcgccgggataaagtttactcggaggagttcatgaagaaaacccgggtcgctagaaaacgcttgcgctccctcctcccaccctcaccccaccgccgctccgccgcaactttttcgggacaccgctcgagttgcctccagctccctccgcttgtcgcccttccttccccctccccccgtttttggacagtactttttaatgatcttttcaggaataaacaaaccgaattccaagcccatccgaaatccaaggctgactgatctgtggtcctctttaccctggccgcgagggcagtggtgcctgacctggcgggagcgggggcgaggggtagttcagccccgccgggcgcggacttcgccagggagtcacccggccgagcgcacggtcgccggcacgtttcttccccgccccgcgtccctgagcccagccggcgccctccgtccttctcggcgccctgccggggccccgccacccgccgttcctctgcagccggggccgcggtccgctgctcccgggctcggcccagggcagggggcggtgctgccacccgccccgggacccagcccgagcccggccgctcccgcgggagctgctttcttccttctcccttaaagggccgggcagagaagggaaagggcttgtgcaaaggctgctggggttgtgctccgatgcggggaggagcggcccggggctgctgagggcagattagctcggtgccgggctgcttccccggcgctccgcagagctttaagataaaaagaattggtgtgttcggagcagataaaaggtggcagtcgccagcttgttttgagttttatttacggtctcttaggcggaccaagtttgaaaatgttgttttgtgtgaattgtcagatattgaatgcagcccctatttggggactaaaaataagtcttcgactgaactggcggggctgggctgttagcgagatgggctgtcctgggctgcttttgtgtgtgagaccctgtgagggccgcgcttgaagtttagggctagaggtggcccgaagccgtccttgcggcaaactgggctgggctccggacctcccgctgtactgtcaatgggcgctcggatgacgtccgcgtcccgggcgccggtgctagccgcgtactcctgcggccgggctttggccctggctgcacggcccagccagcaacccgggggagtagagatgagagagggcccctctactcccgcccactagggtcttctctctcctgccctttctggtcacatgtccaggtttttccccgggtcccgaggagaacagacacagccccgcccagtttatttctaggaggtgggtttggtgaataaaaaaggtcaagtggtcaggtcggcgagctggtccatggcgaggagggacaggacggacacctggcaagtcctgccctgcctgtcccccaaccttggtcggcccgcccgcgcacggctggcctccctaggccacattcttgcacaaagttcgagaggctgtgggaaaagcaaccctgaaccggccaagggccggcgaagctgatcccgcaatggcattttgttttgaacagttgctggggttgacgtttcctcataaggtaaggtgtcactggacagtcggctgcccaaatgccacatgtataattagcctgcgcactcagcacctcgtccccgaggcccgcaggcacgggcttggccgacctggtccgctcagctctgttctgggttccaggattcccgagggagggccgaacctgccagggcagcctcgggaggccgtggcagagaagaatgtgacagtgtagccttgtcttggatttttttttaatcttttcttttcttctcttcctattttatcttcttatttttcggctgttcaactattggtaagaggggtactggacaccagcgcagagtgcagactgaatggggaaaggagatgcagagaaaatctggcaacatacctattcttcacatcctactcgtgggggagggctgctagtggccctctgcaccaacccagtaagaccattccaggcttggcattgtatgtcctggcttgggtagggacttcatgcttctaggttggattgtttacctgtctctgtgctccctcccacccccactcccaaaggtctctcagaagttaatatccgtgctctgattgcagcttctggtttccccctccaggcctagccgcttggggctgctagtgatcactgtgggaaagcctgggcagatctactgtctttccctatcttactctggttcagcctggggttcttaggagcagtaagtaccttgttgtttcttgagcttcctacctggcttcccagatcccagtgtcaggtctgctttagcctgcactttctggcagagaccagatttctgcagccatgaacatgactttccctctgttaccctgtgcagttactctggaattcaacactcaacattaggcacttgcatcagtcttcctcctccccccttgtttctaggccactcagatatgtctgatacctactagaagactcttttttatttcaaaacaaacaaacaagcaaacatcctaaatctttcacaagtttagtgggacagggttagcttttcttttttttttctttttttatttgagacggaatctggctctgttgccccggctggagtgcaatggcgtgatctcggctcactgtaacctccgcctcctgggttcaagcgattcttccgcctcagtctcccgagtaactgggattacaggcacacgccaccacgcccagctaatttttgtatttttgtggagatgaggtttcaccatgttggccaggctggtgttgaactcctgacctcaggtgatctgcctgcctcggcctcccaaagtgctgggattacaggcgtgaacagccgcgcccggcccagggttagcttttctatggcagcaagagtgcacctttcttggtgggaaatgaggacacggtttattaagttgcatttgcttttcattgaaccgatgaaatatttcactttcttgtaacaggagaaaagttatgactgatttaggtatcttccgtgcagttttggaagtatcttcttgaatacacatatgtgagcacatgggcagtaggccaaatgacatgtagtttttttccttctacagttttgaaaacctcataaatcaagagaaattgtccctcttaaaaaaaaagcaaacaaccaaaaaacaaatgtttcaaactttgaaagcaagtgtgcatcacaattattaggtctagtttaagaccaaagatagtaagtaaccaggatcccgatatcaagtaccagggcattaattccataggcatagtgacatcctctgttgcttttctcatgtatcaccaacacctcgtttctcttctcttgtccaccatattccttcagttatagtggcaaaactagatagctttttgtttattgtttattctgtttattgttgcttttatttgatgttttggaagtcatgagaaggaacattctcttggtgaatatgtattttttaaaatgcacaaaaaattgagttctttattatggagcatgatataaatgatataatagtatcaagtacctataccttaagctgattctataatggatttggtaactgaatgcctagaagaaatgagattaagtaggaaaattatattgtctgttgggcattttttcagtagtagcagaaaacaacagatatttttcattttaagggaaaaacatatatgtacaatatgttaacctaactggcaaatctttcttttacaatgctctaaacaatattactgtaaaaaatgataaaatttgatggcattattgagattttatgtctgtttctatttgaccttttttaggaattatttagttattggtcactgatgaaattgctacacatgtctatcttatattgaagatattagtgacttttaaataattttctttcaattagtatagtaggtactggaataaatgaatttcttttgaaaaagataatatacattggctttaacacctacttttaatattttctatgcttttctgttttgttcggttatgtatctctttccatgtttgaaagcattctcttgttagtgagagaattcatacatacatatatttttcactatttacgaacaactttctatgaaagtatagaatagtacaacaaaaattttggtttatctaagagctatttgttttaatatagtttagggatgcatatatatcaattgatgtttttcaagtcaagtgaaacattccatcaagctaatgtgtctgagaataccatatcaggcacagacaggtactagaaatgataaaacacagataacttacagcaagatgttttgcagatgggatgtattatctgctctcatgaggttagataggccatattaccattaaaaaattaatcaagttatttcacaattatcaagttatgtaggtatatgagatttaatgataacagattttattatagaaacctgctaaaaatgaacattcactgctgtttagaggaagaaatggactatctttgggtttggatttcttcttaagaaatatgtctctcctctgttttttttcctaataaggaaaataaggtattagaacagtttatgtattcatcctgactgtatattttctactgattatgccctgaatctcaatattcaagtaaaaaaacctagtgctcctatatagtgtaggaaaagcaatttatattaatgtaagcccagtttaaatgtgtagcatatccttttggcctgaggtttttcaaatgtgatccgaaaactcattgttttggtgagcgttgtgtcagaaactctcccatcctttcattatatattcattatttattcacaggaaagtgtttttattttccttgttctgtggaaaagggtaaaagcttttcagttaattattttgtttagacatttaaacaaactggaaatagttcaaaatttgcattatgggttttgatagagcttttcaatttttaagtattcattgtaatagtttggatagaaatatcagttgaagaaagtgggtggagggtgtaaaatggaatatcatttaaatctactgcagactctctcagctccaaaaaagagtgctggtctgtttttcctcaaatctgtggtagtcttaaaaaagggaacatgaaaccctaaaacctcagagaagcagtatcgattcagttcctaactgcaaatccttcatatctttgctcaaaatatccaactttacaccaatattagccattctttttatagtgataccatgcttagtaaaaaacttctaagcactgaggtcaggtgttgagattggattctagtttattttttatgaatcagataaagatttctgtgcatgagaccatatgtgaagatgagagaagaagaacatttccatatcaaaggcaatatatctgaagctgcatggtaattaaaatgcagtggtttggactctgtgcactagcacttaagcagagcattgctgggaccttgtgcatcatgcaggcggttgcctcttgcatacttcttgaaatacacttataattttgtacaaacatttatgccagtccacacttttctgtggataatttgtatttcatccaaaccattcaaagtagaagttattttttgagctaccccctcattatggcttttgtgcatcaactatttttattcttcttgtttgtatttctttttaccagaatgatggcttgtttatattcagaatctcttcttgctcctctaagacccctaatatatcactcatattttattattcactcaaaaaaactttcatttttaggaaagatgtgagttattttctgaggttaattgtagatgttgtaatctattataaactaataaaccacattaaaaatcaactgcctacttatttctactttataatgctaatatatttagtaatcctcacaaacttgcacaatacatatattggaaaaaaatccttttttaaatacttaaagaaaaattctgatatgtttcttttcatttaaatggcatgaaaatgtgtagtggcattctctttcatgatacttcaagtgaacaacaatcaattgaaactatggaaatctttatatttatctaaagagttatctctttccatttatagagggacgtttgattttatttgtcaataactgagttaatattttagactgtaactatttggggataaatagtgaaatacaaaatctaacaattggtagtcctgtgctgtatatattttagaaatttttgcatctttggtgaccaacttcaatttgctgctctgtaatctactggctcttctatttctgtatttgctctctttctacgaacattttattgtggtgtgtgtggcgaggaattcattgatgtattttatttactaagctcccatggtctataaagccttctaaagatttctctggattgaagcaccatgtattgaagaagcctaacgtgatattattaaatcctttaagagttttgcgtgttttaactatttttaatcaaattacttaagtatattgatttgatgctcttcaatgatgatacgtataaataggcataataaatataagataaattcaaagtgcactatgtgatgtgcatattacagtgtatacaaacattctatgttctctcggttctctcttgatctctttcttctcagaaaaatctcccacgataacccttgaaatgatctgtcacccttgctaccttcaataatttgttgtttccagtcatcttaaagagacgaattgtctatctttgatatatccattcacatgtaaaaagggactttatgctgtttgtgattttgacttcaccgagcacaatttctttgcttctttgaaaagtggttctttaaaattagacaaagaaaattaaagatgcttcactttccaaggccacacaagccccatatgtagaaaaaagaaaatgcaacagattttttttttttttttaaagagcatactcattcccaggcatggttgcaaatgctacattttatactttacaaataggtcattgaataacataaagacttactaagttctagacaccctgaagagcatttttgaagccacgagtctttacttttaaaggattttctcttcttctgaagattttcatagttggtaggtggagaaacttaggtgtggttgtcttgatgctaagcaggttgttgataaaactgagtaagaatgccctcagctaagagagagtagttcattgcattttcttgggaaagaatattgaaggtcaggaatatttttattttctcaaaataatttccaactaggtccatgggcattgaaccttctgtgtatgagaagtcagctcctctcctcccaatatatccatggtataatccctaagcctcagtttccttatctataaaatgggaataataataataatacctatatcatagggttgttttgaggattaaatgagataaacgaatgtaaagcactaagctgagggattggtataaaataaacatttaatacatgttatctgttatagttgaagtggttctatacttacagttatctggatctggcttcccattccagctttactacataattgctatgtaatctttgggaagttacataacttgcttctttccctcttatgtaaaatagaaatagcaatataggttcttaactttctttccttgaaaggagaattaatctatggtctggaagacttgggatagagtaatgactaaatgtagagtttacatgttcaacttctcaaatttgataaaactacaattctaaggcctagaaaagagtttgaaaggtcatttcatttgtcattgctatatagtattgatcatcctttcttcattctaatcagttaagaagttctctttattttgaaagcctgccaaaaggagattttataatctttggttatatatatcaatgattaacaccaggatttctttttgtcaaatatacccatctcaatctgttttgttttgctttcattttaagaaaaaatgaaagcaaacattcttcttcatttgaatgacagacctatatgtgtgaagaccaaaattaaactttcaattttgattttttgaagattttcttttgttttatttgctaaactagttgtgtgaccttggaaaagtaatgcaacctccccaaatctcaattttctaattttaaaaatggggatggtgatataatttattccatgggttgttagaaaggttaagtttgaagctactgtatatatatttaatatatatatatacacacacacatatacatacatacatacatatatatatacatataagtgggtagaacagttctggataacggtgttaggataaattgacaatagttatatgatcagtacaagaaccatggcatgagaaagtctcttaattctcttatatttatagtactcgtcagcctttaaagtgccttcatattcattgcctcattcaataaaaggtatgtggagtagataaacttaccagccatactaactttctacttgatgtgaatcaatgtttcaattgggttttgcttcaggatattatttacttcaaacaaagcttgtatgtcataagttagaactggcttttttggccctcttgtttccccatctctttgatataatgtcagtgctcatttattgtattttcatacttacttccagagccaaattattgctgcatttcccgtacaccaatgtaaaagaataataccatgctgatcagaagcattaaacatcagttctatatgtctttgattaatacaaattagaaaattatgtaataataagtgtggcaagtttgatagaaaacaatctttcaaaacatgaggttcattaataaaagaatccttgatggtgaaaaggctgagaagaacttgattacataatttcaaagatgaaaatgcattgtactagtgaagaggtatggatataggtgattctgtacagtgtgctaattactgtcatggcgttatgtataacagcagaagtacctatgtcagggaaagcttctagtaggagatggcctttgatctgtgatttaaaggatgatgaggaactggctttaggtaacatcctaaagagcactgaacatgggggaacatttgacagtataactagcttttctgtagatctgacactgaaatgtctcgtacatgtttctttgtgattcctagaaaggctgtgtctgtcatgaatgtgatatggacataagccagcagcttagccactgcacttctctttcttagctcagttttgtggtcaggaacattgtgagtgcattttaaggtacagaggaatctttcaaattattactttccttcaaatatgtcaactaggtatgaaaattacagtaagtggcttattaatatatgaactgatgatcagggctgtgagttaataaaatcttgtatcttacactgtaatacacttttagaaaatggacaagcatgatcttagagaaaaagctgtgtctgaaagcttttagatctaggtgttatttctgtttcccttatgtgttgcagctctttaggtgcctcatatttataattaagtttttccaatggcaaagttggtgtatatcataacttcttttttattgagggataatatgaaaataaattaatcctcagagtggttatttaaggtttttggaagaaatacaaattataattatacaatgatagtgatggacagtagtagtggcagaagcagcagtagcagcagtaaaccctctctactgataactttccaatggggatgataaatccatttattaggtttttgtttttttaatctttttgtttgtttgtgtttttaagagacggggtcttgctctgttgtccatgctggagaacggtggtacaatcatggctcattgcagccattcctggccttaagcaattctcctgcctcagcctcctgagtagctgcgactacagaagcccatcaccatgcctggctaatttttttttttttttttttttggtagaggtggtatcttgttgcccaggggggtcttgaacttctggcctcaaagaaggcctgacttggccttccaaagattataggtggagccatcatgcccacctaatttcataatctggaaactcatgttttctaataacttttgaatgccttttctctgagccagcaggccttctttcatatttttagtttggaagctctctggtgtttaataacttgtttctccaagttaaacacacttactgagttttgcagcttatatgactgcgacataatcactttctgaaaagagattggtggtcacataggctagagaagctatggccgtggtctacaatggctttaacctattttcctcaccaccgctttggcatcctggagacttgcattgttggtaatggcatgaaaaaaaaatgatgaaatctctacattaaaaagaaaggttctgaaatttagtaaaggagggggaaaaagacgtgaaatttatagaaaacagtttaaaaacatcctcttagtcatattaaattagttatgatgctaaaagcatcatatttaaagaacatcttcctttaagattttcaattaagttccttaataagaagccaaaaccaggccgggcgcggtggctcacgcctgtaatcccagcacttcggggaggccgaggggggcggatcacaaggtcaagagattgagaccatcctggctaacacggtgaaaccccgtctctactaaaaactacaaaaaattatccaggcatggtggcgggggcctgtagtcccagctacttgggaggctgaggcaggagaatggcgtgaacccggcaggcggagcttgcagtgagccgagatcacgccactgcactacagcctgggtgacagagtgagaccctgtctaaaaaaaaaaaaaaaaaaaaaaaaaagcaaaaaccgaaaagaaaataaaaattgaaagaatatagcagctgaacaaagtttaaataacttggaaaacagcatattaatcaattgagtctcaggaacattttttacccttgactctggagacttaaatacatatggaaggaaaattttattgttttaaaatttcttagctgtagtcctttcccactataacaatgcacaatgaaagtagatatattgaggtttaaaaaaggattgtaaccttgcaacccttaaaggcatttttaaagaaattgttagctttttgatatcagattctttaaatgtttacagataacagtaaatccagagaatgcgtccatttgtagtttttgtataggtttgtgtaattttacagctatgctaatgtgggctcatgtacactgaatacttttgacttttgtgttttaaattgtatgnnnnnnnnnnnnnnnnnnnnnnnnnnnnnnnnnnnnnnnnnnnnnnnnnnnnnnnnnnnnnnnnnnnnnnnnnnnnnnnnnnnnnnnnnnnnatattcttatgtagggcatgacagggtaaagaatgagaaacagcttgacttttaattaacaggtttggaaaacaccttgggccgttttccaaagcattcataattagctgtgtcttagttgtgaagttttgtgtttgatttctttgttatgtccacatggaaagctcatcaatgttatcaggagctgtgtaaatagagcatataaaaagtatacccctttatattgtacatgaattttttcttttttaattctgaatttatttgtataaaacaatactgttttaggtgttaagagcttgggcttttgaatcagcacacccgggatcaaattttgttctaccatttacaatttatttatcctctctgaatctatttccttaagtgttaaatgagaatattaatgccttcttcctaggatattgtgagggttgaggagatgatgtgcataacacacttagtaccttgtttggttcataataagtgcttggttgtcatttttctatgaaagtctgattacagtacaaaaatatcactttatgccctttgcattcattttcatattgaaagaaaatggtataattaaatacttgggaagaaacttctaacatatatggtgagcattctgattttttttttttctaaaggtggattttgatttgttcaacgttcttcccatcgtttatataagcaggaataactcattttaaaggtgatgaaggccaaagacatagtctagaaatccatggccttggtgtctttacttttacgctgtgttcaaagctgaccatcatcatctgtgaccctcaaaatccatccctgtttataaagagtattccattattcatttgtcatggctcaccctgagtaaagaaggatgttgggaagatggtgggcactcccctatttccatgactccttgccacttgttcttatcagctctatttaatgtgctttaaacctatcccttgaagttttaattttattatatttttcatttctgtgtgttcaaatgattttttttcaaattggtgaggtaatctttataggcagatatagaaatatctatatgtgctttatgcttatcttttatttctttaacctatttattttaaaatagcttgctgataactccagtatctataatttcactaccgagagccatagctggtctctgctttttcttaagattcttgctcaaggcaccttattttctcttatgcttagctgttttgttttgtttttatttcaatgagctgatcatgttccttggtatattatttgcagggattctctgaggcctagaataaaggggaactcttgtggagaggatttccattagccttgccacgttcttttgcattttcttagtactactttcacatctttgggctgttattcttcttttttgatttgtatatgtgctagtttctgcaatttaaatgccaataaaataggacatttgtattaatgttctttacattttatgaggctatgcttatatagttattaattttgctcatttaacaagtttatatctgagataatttaaaagacaaatatgattttattaaatttagtaagggaggtgttaaattatatggtcattctaacttgtcccaaatgagctgtctatttaatatatgtatttaagtaatatgtatattactagtgcatcttaaaagtaaatatgtttgataattaataaaatgcttgtttcagtgttatcacatagtaacctatagctggtatcttccttgattgattggagtgaatgtaggaaacattttcagtacctgaggtcaaaggggcataacttgggatattcatggagaggaaatagagatcttaggcattctagatagcctaaatgcagctggagaatattgctggtaaggttgagtctggaagaattcctctggcaagacaattttaaggtttgttcgggagaacttctgacagaatagtggttgccacattttggatagagcacgcccttagcaaaacgctcatgaaccctaatacatgtacatatgtatttcaaattttagacatgtactattttgctaatatatgttataaacttgtacatattgtagatatagaaaagaaagagatatagatgaaataatattttaaaatgaattgtggtctcccaaatcctataatcgaatatgctttgttatttttaacagtctcagtttaacacagtgtgatgaagcaatttaaagatctgattctaagtttattttactttgctacatggctttaatgctgccacagctgaaaatgatatctcagaaagaaaaatagatccaaatgggagaagaacatcattgattgcacaaattgattacatacaaatgtatgcaaataattttgttaaaatttggcttgtagcctctgtcttccctgatgacaattagttgtttttgccaatgaggtcaaaggtatagcattttaatattttttaataaatggactcaaaacctgttgaaactttttggaacatcactaaacaggttagaatattctgataccaatttttaaattgaaaatagatgaaaatttttgtaagtgatagcatagaatttttggtaacaaaattcacaccatgatggaatcattttcaaacatgttttcaaaatattctttcataacataaatctgttttgaaaagcattcaccttctcatttgataaaatatcacctttgccttgaagaccagattaagttagtttgattgcttctatgtttgtatgtatatacctaattatctttctgaaatctatctatctatctatctatctatctatctatctatctatctatctatctatctatgtatctaaccatttatctaatctatgtgtttggtaacacacactcacagcttcttgtcatcacatgaaagttcagcacatttggtacattagttttattctcaggtttggaaactaccataatataagcagtgaactgctggatgctgcaaacaattctcatgtttatgccccttctcatttcaaagcattgtaaagattttaccatggtatacagacctttttaaaattaatttttgtggttacataggtgtatatatttatatggtacatgagatattttgatacaggcatacattgcataataatcacatcagtataaatgaggtatctatcacctcaagcattttttctttctttgtattacaaacagtccaattatactttagttattttaaaatgtacaataaattattgttgactgtagtcactgtgttgtgctatcaaatactagatctatctatatttttgtaccattaagcatatccacttgcccacctccctgactacccttcccagcctctggtaaccatcattctactctctgtctccatgagttcaattgttttaattttttttttaagctctcacatgtaagtgataacatatgaagtttgtctttctgtgactggcttatttcactgaacattatgacctccagttccattcatgttgttgcaaatgacaggatctcattctttttgtggctaaatagtactccattgtgaatatgtaccacattttctttatccatttatcttactctaagcctattttttaaagtaatttcattatcatgtagcactgggcttcaacattttgctacaattgcttgattgtgaatgatgtagttagtgaagtccatggtactatctctgtaatcttatccctttgttcctttagttcagctaggacaaccacttcaccagtgggttcacttccttagttttccttaaaaatttttctttcttaaaaaaggaacttgttgttgagatggtatctttcctggtacatatttaaatggctcactaaaaattagcactttgcctattaaatataaactgaggcatgttgagaaatatgtacattcattcatctgaaaagcaagcgtcctacctgacatttctttttgcaaatcttcagccaagttttctatgtgtctttcaacattttggcagtaccacctatacaatgccagaagacatcattcacactgcattctaggtaaatggtgactccagagttttgcattacgcagtgctgatttttagttaagggaatgtatttacgtttgttgtcatattatttttttgtatattattttaaccttttttatagcagcaggaagaacaagtgttattctgatagcatgtagcttttttatcttttataaaagaatttcaaagaggtttcacaacatttaactttatgtttggtgaaattttgtaaagtactgattgagcattgtatgattttaaacattgttggaaaaattgcagcaatatagatttatattgatgtgcttagtatttaaatatcttgctgattgtaaagggttcatattgcttaacatctgaaagtacaatagggcaaagtatattgttaatgatactagatataaatctctatctcaaattgtattcttgatgattaaataaattttggcttattttttgtcagatatgcatggatcatcattgtttctatcctgtaatatgcctgctattgagctactactagttgtagaaatgtcagctttgtcatggtcttgttatcattaaggcctacattattaatattatccttaagctatagtttttttggaagaatcattttaaaccacttgggcatttgttcagggttaatttagtaaaaaactagattatattatctacaatcattctcttttctttacccaggatacttctgatattggatgttgcacattaagacatatagactcaatctgtcaatctgtatttaaatctaggtaaggattaatttttcttacatttaaaataaataaatatactgcagcatatttatgtagtatactcctaggatgtatgtacgcactttggagactactgaaatagaaaagagtggaaagagaggtgagggcatgatgagtcaaggaggaaatgcatggtctccagatgacactcttctgggacatagtccctctgaagaatgtagccataactggaaacctgggacaggaagtaggactacagattgatcagtgttgaggttcaggaagcagtagtatggtatttttgtttttatttttttgggaggggattggtctcactctgtcacagaggctggagtgcagtggcacgatcatagctcactcagcctcaaactcctgggctcaagtgatcctcctgcctcagcctcccaaagtgctgggatgataggccaccatgctgtgctgattttttaatttttaaaaaagagacagtgtcttgctacaacgcccaggctggtcttgaactcctgacctcaagtaatcctcctgcttcagcctcccaaaatgctgggattataggcttaagccatggtgcctggcctagtgtgacatttttaatatgagaaaggaagcagatttaatccatcttttattctttaaggcaaagcagtttgagtcattttgttggtgtgagggggtcagcaaagttccatagttaagtgtatttatcatgttcaggagaggggggtcaagtggagaattactactctcctgagtgtctggggctctttgttgtttctgcacccagccttccttggatttagataaaatcagagcagaagctgggaaaggacagtaaggcagcacttagggatggctgtaggcaaacattattatcagtactctcttttcttcttttctctaactcgttggtatatttcctgggcaatttgctatagtagcaaaaatccagtttgggagtttcagctctaccaataaactttgggtgactttggctaagtcacttctctctaggaattagttctttcgttggtgattgggaagtttgatgatctccaaagaggtttgagctctgacactctgctgatatccatctgggatagtgttctgtgcttcccctttatatagaactttcaagcaccatgtccactgtgccttctaaagtgacaaatgctaggaatttaatttaatatatgaattcatgctagtagactcatgagcaaaaacgataacactatttctagctgcttcccttcacttttccatacagcttttcatagagtatatttccatagtgtgctcctggagagtgctcttgctttctaacctaaagtgtctaatgagaactttagaaaggaaggaagtgttagcatctggagggttgtgcctgtgaaggaggttgggctggatgaaataggcagggcattgggacacagccatcaattcattgcgtgtgtttggctggactggcagcagtggccagtgccaggttttttgagtatggtttctgtcaccagcagagttggctgtctttgaagtctgttagttaacctcttccagaatcttggagtgcaactagcactcaagagaaggaggataaaggaatctctaggaataaataacacccctattttcattaacaacttagttctcttcttacaccagttttttgaagcatttaataaatgaacagatttctgattttctcactttcttttcagtatctatttatttccatggatggagataatattggttaatgaactggatgcatatcaccaaacatatattgagccgttaccacacatagacatatttctggatgctttcataagatggtgataataatagtacctatatactattttttgagaggttttattaagctaatacacttggaacagtacttgatatgttgtaagctctcattaaacattagtgattattattttattatttaatctacacaaccgccctgggaggtagatgtcattattttagttttataggaaaggaacttaaggtttagaaaggaaaaatgacatgcccaagtttacatagccattaaatggcagaaccaaatctaaacctagatatcctgccttgaagttctatggtatttctgccatataaatgcagctctctgtaacatgcaagttaagctaagaaattttccccaggtaatctacagaccagataataaggagcttggataatagggataataaggaactgaacatattattatgtggtgttgaatttcagcaggtgtgtttattaaggcagtccttgctttgcatggcatggtgttaactgaaagtcttgtacatcataaccctgtcttcactttgtatagctctgatcccaactttacacaattctcatgtcatagtttgatctcagttattacagaatcatgcaaagtggggacatggctgcactatgcactagtttcagttatggtataatgcaaaacaaggactgtctgtacttctatgagcttcacattcatataaagaaattctcaaattatctttcctttggaccagttagataattcatttctatttgataacccattatcttttttccttttctttttttttacagacagtctctcactctctcacccaggctggagtgcagtggtgtgattacagctcactgcattcttgaactcttgggctcaaaggattctctcaccttgtcctctggagtggctgggactgtaggtgaacaccaccatgtccagctaatcaaaaaatttttatttttatttttagagacaggggatctcactgtcttgcccaggctatcttttttcttctaaggctcttctcctgctaagggagagtactgtgttgcctaagtaagtccttgaaggtcactgatggttggctcttggcttttaggcaagccatctctgatatttattgcatccagtagtaggtctctctctgtatttagacagaaacacttgttttctttcctttttttctttaatttctccccacctcttattacctctaaacttctttctgaatttatgttatttttttttcctgtttcagcaatgtacagggaggccactgaggccagttatctctcatttggtattttattatatgaaaagtgatttattgcagtagacagtgagcagccattaagcaagaactgggccttttaaaatttctttttagatatagatgcttaaattctttttaagcacttagtaatcgtttcagcctgaaggttattgcttagatttcaattttagagcaatgtactattgaaaagactgaagctttgaacctttccttgtccccaaagtttaaaatattctcagctgggcacagtggctcatgcctgcaatcccagcactttgggaggctgaggcaggtggattgcttaagcccaggagttcaagaccagcctgggaaacatggcaaaaccctgtctgtacaaaaaatactaaaattagccaggtgtggtggcatgtgcctgtagttccagctattctggaggttgaagtgggaggactgcttgagcctggaaggtcctggctgtggcaaaccgtgatcacgccactgcactacagcctgggtgacaaagtgagaccctgtctcaaaaaaaaaaaaaaaaaaaagtaaaaaaaaaaaaattctccgttgagtctttgttgactcccccgccccattaatgctgtgtttgaaaacctgtttttagtattttttgtcaagcatcttgaagagtagaaatcctatactgactctaattttatttctctaacctgtacagtgctcgagagttagcttgggatgaaatgaacttgtggtaaaaagcatactccaccactttctaacagtatgaactttggcctgttgttttaatctcttcaggcctcagtttccttacctgtaaaacagtacctacttcttagggttgttttaagggttaaatgagtacatataagtgcttagaacagtgcttggcacacataagaataggtgtcatataagcattagctattattaaaacaaatgtctttaaaagaagaatttggcccaaagtaaggagtacattattcaaaatactttatttaaggggtaaaaatgaatactactgaaacgtaatgtgaactaatcctacaatttccccaacacagtgacgtttgagtacctttgagataattctagctgttctgtagtaataggtactttgagaaccacttcaactgcaaatcaacaaatctattggaactaaaattcctttattataacctcttcatttttgagtttcatagtttgtggagactagttgatttgggcacagagtgaatttggatatgaattttctcagggctagatttgtgatgtagcagtaactgaagatgcagtgacagagtttaaagaggcagcagctagcaaacaaacaggatgcttgacccaggaggcatttcccagggcaggcctaggtgcagcctggcttggccagtgattgcagactagatttctaggccacagaaggctgtgggtgaaggccgctgtggtgttgagttggtgaccctctgtttctgtcaagcttttttgatgtggaccccagtgtctcaggaggtgcttagcttcagcccagcatggccaggaattataggctcgaccactaggtcccagaaggttcctttttgaaggcagtagactgtaggagttgaacccaggtttgcctcatgacaataggtaaactcttactaatcattccatactgttttcctagtgaaggcagcagtggaaaaaggacagtagctgtagcagtgggggcatctatgtgttcaccatctaaacggatagatgatatgctatttgagtgggcagctgtaaagtcaaaggggctccctgcaggcaacaatgtcaagatgatgatactggaggagatggtagtggtttggtagttgttacaagcctttcatggatctattagagcttgggaatgcattttgggtatttttacctcaaatcataaactcatagtctttgcattatggaactttagaattgaaagggtgttccagttcccttttttgtggtgtgattccatttaagtgatcgtccaatgcatgctaagggatcaacaatagggaattacttcctcctttccaccaggatgtaagcttcatgtagacaggaattttgtctgtttgttcattgtttaataaaaattaaactaaaaggtgactggagcagtgcctggcacctaataggtacttagaatgaaagaatgcttggataacttggctaaagttttgtcttataaattgctcaacattactaatcatcagggagatacaaatcaaaaccacaaggtgatattatctcgccccagttagtatggctataatcaaaaagacaaaaaaatgctgatgagaatgcagagaaaaggaactcttatatactattggtaggaatgtacattagtacagccattatggaaaacagtgtggaggattctcaaaaaactaaaaatagaactaccatatgatccagcaattccattgtttggtatctagtcaaaggaaagggaatcagtatatggaagagatatctgccctcttatgtttattacagcactattcacaataacatggaatcaacctaagtgtctaccaacagataaagaaaatgtggtgtgtgtatgtgtatatatatatatatatatggtatatatatatatatatatatacacatatatacatatatatatatacacaatgaaatattattcatccataaaaaagaatgaaatcctgttctacatgttgtcactcatatatggaagctgaaaaagttgatctcataaaagtagacagtagaatagtggttactagaggctgagaaggatagaggagcagaggggataggagaggttggttaacaaatataaaattatagctagatagaaggaataagttctagtgttctacagcactgcatggtgactatagctaaaagtaatttattatatattttcaaatagctagaagagaggattgaatgttcccaaaacaaatggtaaatctttgaggtgatggatattaccctgcttttgatcattacacattgtacacatgtatcagaatatcactatgtaccttgcaaacatgtacaattattatgtgtcagttgaaaaataatgcaaaagctttattttatatattgaatatattatgtgccaagcattatctaaggcataccttacccctgtgaagtatatattattcccaatttatggatgagtaaattgacacttaggcattaagtgtatatatgaatctgtatctatgattcatttattttggtgctatctttataagggttttgatagtagcgtcttgccatctttgtgaaatgaatagcaagctcccatttttgtctatgctctggaataatttggagagcataggaattgtcagttcttaagggttaaaaaatcttacctataaaaccatttgatcttcatactttttaaagaggtagatatttaacaatattttattggtctattcatattttctattctttcttgagacagttggtaattatattttactgagaaacccactattttatctagatttaaaaaatatattggcacaaagttgacatattgttttcttttcttcttttttgtatctgtggttatatgctctttcttactctttatggtttttttttgagatcttttggggtcctaattctgtcattttacatattattagaaactttgttgagcatgctaacatttagcttgcatttattcatatatccacaaggcttgattaattaaattcaacaaacgtttattttttatgccagatagatgctaaagatacaaagggtgattaaaacagggtctactataagaaatatatagtacagtaaagatatttgagaccatttgtcaagtgttttgctgaaatccagatatgttatttctaatgtatcactcatccaacaaaaaaagtactttttaaaaataaattcaacttttattttagattcaagggatacacatgaagatagattgtgtgatgctgaggtttggggtatgattaatcctgtcacccaggtgctgagcatagtatctaataggtagtttttcagtctttgcccccttacttcctccccaggtagtcgctggtatttattgtttcaatctttatgtccatgtttacccaatgtttggctcccacttataaatgagaacatgtggtatttagttttcttttcctgcgttaatttggttaggataatgacctccagctgcatccatgttgttgcaaaggacatgatttcattcttcttcttctttttttttttttttttgagatggagtctcactctgtcgcccaggttggagtgcagtggcatgatcttggctcactgcaacctctgtctcctggatttaagcaattctctgcctcagcctcccaagtacctgggattacagacacgtgccaccacgcctggctaatttttgtatttttagtagagatggggtttcatcatcttggccaggttggtcttgaactcctgacctcttgatccacccacctcggtctcccaaagtgctgggattacaggcatgagccaccacacccggccatcattcatttttatggctgcctagtattatggcatttcatggggtatatgtaccacattttaaaattttattttacactaagtcatgggagacatgtgcagaaccttcaggtttgttacacaggtatacgtatgccatggtagtttgctgcacctctcaacctgtcatctaggttttaagcccttcatgcattaactatttgtcctgaagctctccctccccttccaccctccacaggccctggtgtgtgttgttcctctccctgtgtccatgtgttctcattgttcaactcccacttatgagtgaggggacatgtagtgtttggttttctgttcctgtgttcatttgctgaggatgatggcttcctgcttcatccatgtccctgcagaggacatgatctctcattcctttttatggctgcatagtattccatggtgtatgtgtaccacattttctttatccagcctatcattgatgggcatttgggttggctccatgtccttgctattataaatagtgctgtaataaatgtaagtgtgcatacgtttttataatagaatgatttctattcctttggttatatacccagtaatgggattgttgggtcaaatggtatttctggttctagattcttgaggaatcgccgcactgtcttccacagtggttgaactaatttacattcccaccaagagtgtaaaagcattcctatttccccacagccttgccagcatctattgtttcttgactttttaataatcgctattctgtctggcgtgagatggtatctcattgtggttttgatttgtatttctctaatgatcagtgacgttgagctttttttcatatgttgttggccacataaatgtcttcttttgagaagtgtctgttcatatcctttgcccactttttgatggggttgttttattcttgtaaatttgtttaagttccttgtagattctggatgttagatgtttgtcagatgggtagattgaaaaaattttctcccattctgtaggttgcctgttcactctgatgatagtttcttttgtggatgcaacatattttctttatccaatctaccactgatgagcacctaggttgattttgtctttgctattgtgaatagtgctgcgatgaacatacaagtgggtgtgtctttttggtagaacaatttattttccaaaaagtattttccgagaaagaggcaaaaggggttaatacacaggatctgtgtttttttttaattttctgaacctatatttgggcctaaacattacctatttaccttgtacatgctcagttatgcattttagcatcttgtcctggtaattgaatttatataaagaatatattactagaacatatcttgctcattaatagagtcttttggaaagatttttaaaggacattttaaccattctagaaatttataaattttatcaaccagagaagtgcttcttatattttagtagggatgcaaatcacctggggatcttaattaaaatgtggattcagattccataggtttgtggtagggcataggaatcaatgacccaggtaatgtctttactgcttttcatcagtgctgctggctgtaaccacaccttaagtagctaagagttacaggacagaaggataatatatattctgttttataattagtaaagttacaggtctataaagttaacaaatagagcatttaggctaaaattaaaaagactgacaatgccttgcgtgttggtgagggtaaataataactggaactctcatacactgggagtgtaaattgttataactaattttgaaaactatctggcagtatttactaaagttaaacatgtgcctgttctgtgaccagaaattataattccaggtatatacccaagagaaatgagtgtatttgtccactaaaagacatacaccgcttgttcgtagcaattttgtttgtaatagccacaaactgtaaacaacccgtatgtccacaacaggagagtacattaattgtggtatacttactcggtggaagactattcagcaataaaaacctgatatttgtaataacgtagatgattttcacagacattatatggagcatagagaagtaaagagagaaacagctaaagattagaggaaggtagaaggtagagtatgtactgtgatttcatttattaagttcaggcataactactttacaatgatagaagtcagaatagtggttatctttggttgggtaattaattgggaagaggaatgtgagaaccttctggggtactggggatgttttatagcttggtctgggtggtgattatatgggagaatacgtatataaaaactcatcaagtaccttgatggactgaatttaggattagtgcatttcactgtttttatattctatatattaataaaattttaattaataaaataagtagagcatttaaaagaagagaaaaatatcttttgaattctaaaaaggctatgtatacatttttattgtggaattgatttctaagagtgttgctatgtgttcatgttcatatgcatttactgagtgaaagtattaaaaagcatatgtaaatgtggtgaattaatgtagctagctgatttctgaaactaactagtgtggttgtcattggattttgggataatagaatcacagctcagacaaactttggttaaattagaatatttccatattttgtttcagaggagagctgaaaattccaaggaaacaagcttttttcagctattttggaaatcaaaacaaaaaacattaaatgaaagtcttcttagtcttcaaactttccctttcaattggtagtttcctgtcctctgttctggtgccttgctactcatgctgtaattcctcactgcttaggatctctcattgtgttttattcaggacacaatcttgaatcttatttgtctttatcttcatatctctaatatttctctgcactcctctttcttttcaggagtcatagaattctgtagctttcaaactttgtattttaagcagaggaactaatttttaaagcaaattttgaaaaaggaaatctaacaaaattaaacactttgaaggaactgtgacagttccttcagcactctcagcttactccttcctctttgccttacagcaacttgacagtgggataaactttgggggaaaaacaatctaacacaatctagcccaatcttttcactttataaaggaggaagctgaagtgtagagaaggcttcatggccagtaatagtcagcaacttcaggctatcataaaattagtttcaattgctaagtagtaaagttcaaagatggaaaaaatacgattaaaaaaactctacatgcaatttgaatgattaatatagtgattctgaaatcttcttttcaaattatgctcatagacaagtaaccataattcaaaatttccagttacaagtaaatcacttcttaaaaacagtaatgctattttcgacaagggtgccaagcaagacaattcaatgggaaaataatagtcttttcaaaaaatggtgccaagacaactaggtatccccatgcaaaagaataaagttggacccttcctcacaccatataaaaaattaacccaacatgaattaaagacctacatatgagagataaaactataaaacttatggaagaaaacataggaatacattttcatcatcttggataggcaatagtttcttagatatgacatcaaaggcacaaatgaaaagagaaaagatgaattggacatcaaaatgtaaaactttgtgtctcaaaggaaaccatcaagaaagttaaaagacaacccatggagtgggagaaaatatttgcaagtcataattctaataaaagacttgaattcagaatatattaagaactattacaactcaacaataaaagacaaatacccaaattttaaaaaagcaaaggatttgaatcagtatttctccaaatacgatttacaaatggacaataagcacaaaaaatatatgacatcattagacattaaggaaatataaatcaaaatcacaatgagtaactacttcacacatactagggaggctatagtaagcaaacaaacccagaaactaaaaaatgttggcaaaggtggaacattcattggaaattggaaccctcatatattgctcatgagaatataaaatggtgcagccactttagaaaccagtatcagtttctcaaaaagtaaaacacagcgttactatatgtatagcacaacaatttcactcctactagctgagatacgactctctctgaaataggacataggacaaagaaggctttgatagaaagaaggaaaatgaagaaagatatattttaatatggtgaaaagcaatacatacttaaattatttttataaagcataatgaagttaagtatttctctagccatgccctttttgcttaactaatttaataaatgaaataatgtacatttgtgtgtgtacatttgaacatggaatttgcatgttgtgaggttccatttttaaaactatgaattagtaaaaataaattaccgactccttcaattcctttcttcctttaactttctgaagttaattttcattcgttatttatattttgatcagcacgggagttctgacctgctccatttccaacctgggccggtttaccgttccttaggaaacctgttggtctcccgctcccagcaggtcaccatattgatgtcgaacttaatgcagaaacctattggcatatcacactacagtccagaacttctgggctcaagtgatcctcccatgtcagcctcctgaatagctgtgactacacgcacatgccaccatgcgcagttatttatattttgaaaacttttctctttggtttttaaacatagctatctgatctgtaatatctgtaatatcatatagggtctattaaatgaggataaagacctttcacataggagtgttgtaaggagacgtgaactatatttattctaaatctgaaaaactccaagtcttcatattatagttcctttaaaatcccttataactttatttctcagcttagtatattttctcagaaggcatgttaaaaaaaggataatgttttaatccaaaggaatgaatctctaaaagaataatgttaaacatcattttatgatattacagaagatatatcttattacaatgacaacattattttatgatattacagaagatatatcttattactatgacaacatgtgtttttgaggtagtgggattttatatcatgtgggctattgcttatttggtctatgagtgagtgtgtttccagtctttaacttttaaaactgagtgtgtgtgtagttgtggttttcaaagacctttccatatacattatttcacttacattcacagtaactctgaggtagatttgtgttttattttttgaaattgaaatgtaaacatataaggtatttaaaatatggatgtatatatgtgtaactaatagttatgtgaatcctatgtaaccaaccaacattgaggtaaaaaaaatgaaatcactgttattttcccagaagccacttgttttccttcccaattacacccccatactccctgttggtatttagtgttaccccatcaccattctgtgtttaatgttagtcactttctttactttatagttttactgcctatgaatgcatctctaaacaatatagttcgattttgcccgtttttatgcattatataaatggaatcatgcagaatctattttttgtgtatgttccaatttttgtcaaactgtatcattatcatgaagacctacttcattgatttgatttttattgtgtgaatatcagaattgtttatcctctttatttttactgggcatttggactatttccagttgctggttattatgaacaatgctgctataaacctttttttgcatatattcattcttagtggccatgtgtacaagtttctgtaggctatatatgcaggaatggaattgttgagtcagacaatatgcctatcttcatcttttctagataatgtgaaactcttttcaaaaagtgtttatttatagtgttaccaacagcctattaacattcttgttattcagcattgttgctaacaattgatgttgtcagacttttaatttctgccagtctgctgagtattaaatgttgtcttaccatggtttaaatttgcattcctaattactagtgatattaagcacttttttaataagctattgattaggtagatttcttcttttgtaatgtgcttgttcaagtcttttgcccatttttctattgggtcattgccttttttttttttattttttgagacagagtctcactctgtcacccaggatggagtgcagtggtgtgatctcggctcactgcaacctctgcctcctgggttcaagcgattctcttgcctcagcctcctgagtggctgagattacaggcgtgtgccaccatgcccagctaatttttgtatttttagtagagatgaggtttcaccatgttgctaggttggtctcaaactcctgaccttgtgatccacctgccttagcctcccaaagtgctgggattacaggatctttttttaaaaaaaatgatttgtagttttctacaaatctgtatataaattctatacaattctgtatatgaactgttgtttacatgtattgcagatatcttcttccattttggcttgtcttttcactttatggaatcttttgatgaacagatgttctcatttttaatattgttgaatagttattgatcttttcttttttggttaatgcttttcctgtgctgtttaggaaattatttcctatctgaggtcataaagataatctccagtgactttcaattgaccttgaatacacctgaagatgttttggtatactgtctaaagtagaggtgtagtttctttttttcctcttatggatgtccagctatcccagataatttattaaaatctcttttcttgactgctctacagggttacctttgtcttatgtcaaatgcctatataaacatgggtttctttgggggttctttattacgttcttttgatgtgtttgtcaatccttgcacccatacaaccctgacttaattatatttactttataataagttttgttattttgtagaataagtcctgccaccttattcttatttttcaagtgtcttgatacttcttggccctttgcatttccatataaatttagaattaacttgttgagttccacacacatgaaaaaacctattgggattttcaatttagtttgcatttaatctattagtaaaattttatggaaatgatactttgataacatagaatctttcaatatattaacatattttctctctccagttattttagtcttctttaacatctcccaataaagcttataatttttcttatacaacatgaacattaagcaaatttaacagttcaaggcagtagtaacagagaagtcaaaaagttatttgataagtgaacaatacaaacaatagcttaaggattcagaagaggaacaaacatgctttagtgtttcataacaggtaacactaaaagacatttggtcaaatattaattaagtagtaatatctttgtgccctcatagtgttacacaagtctggaaattgtcatattttcaattggttaataggttaaaaataaattaatgtattggttgttttattaactatctgcacagccactattttagtttcgttttttccccactattgatagattattttccccctgaaatggttagctttaagcagatagtttggtaacacatatatatatatcctgcatagtaatttccaactcaaatatgttataaaagtctttgaaacataaatatttgatgtgacttctgaaataatgaaataatgcatgaattggctcttagtagtaagtttagccatttccatttggcctattctttttaaacatcaaaggccttcttaagtgcataacatatgggctccaggggaaaactgagtcatgtgcattgttttacattaaaatataatttattctgtcattatcattgtgaaaatagagattggcacatttaaatgaagctggccttcttaattcctaacaaaaataaatctctgttggtagtgagggatactgtacacataggtcccaaccttgtcacttctgaggaacagtggtgaaattgtttgttcctgacagcagacagccccattgcagagctctggtttcatgttacattaagtattagtgctgttctttcaggagctattatattgtgacatcaaagatttcctgacagggcagtggtaggttagcactgaagttgtctactgaaattttaaagaatggaattaaatatatatatgatcagacttttatataaaaggtagagacagaataagagtggtttaaagaaagttgcagaaatcattagtttatgggctatctgctttatctctgcttgtttaagccaaattctattaccttttatttcttcaacaagtacaaatggccattatgttaatgctagggtagttgataatttccagaaagacattatgaataaggaaaaaatagccttttgtgaaataaaaatggttaggttgacatgtagagtatttgatataaatgaacatgtggacagtaattgcaatggcctgacttcctgtttgcagatccactaattagttaaaaggatcaaactacatactctattataaagtttcaggagtacaacttagatggcaagtgaagagatgagaagtcttgcaactgaaaaggcttaattttacattgtagtagtataaatacagctgactttaacattaatcaaattacagtgttgtcttttgaaaagactaacttttgttaagtgttgggaaatattagtcatttttgtctgtataggttttctgtttaaaaaataaattaagcattatggcttaaagtatttcttaaagtttttttgaagtgcaatcagttgctgtaactacaacattactatgacatattcatgaaaatcttgggattataaaatgtcagttaattttagaagcacaattcaatgtccggacatttaagacaatataattataatagttttgtttgagattaagtaaataaataatatgttaaaatgcatatcttctcagtattttagttttccttttgctacagtaatagtaaatacaattttttttgattataagcaaagtataccatgacacatttattttaaacaatataatactgacactgtaagttcagaagtaactggaacaaagaagaaacatttataggtattcgtgcgtttgattatgtttcaaaataattttcatccagatcaaagtaatccataatatattcatgaaaacagttgtttaaaaaaactgaatgtcggactgggaacagtggctcacgcctgtaatcccagcactttgggaggccaaagtgggtgggtcacttgaggtcaggagtttgagaccagcctggccaacatggcgaaaccctgtctctagtaaaaatacaaaaaattagccagacgtggcagagtgctcctgtaatcccagttactagggaggctgaggcaggagaattgcttgaacccgggaggcagagattgcagtgaggcgagatcgcactactgcactccagcctgggtgacagagcaagactctgtctcaaaaaaacaaacaaccacaataacaaaaccccccaaacaaacaaacaaacaaacaaacaaaaactgaatgtagaggctgggtacagtgttgcatgcttgtagtttcaactgctaaggagactgaggtgggaagattgcttgagcccaggagttccaggtcgtagtatgctgtgatcgcacatgtaaatagccactgcactctagcctgggcaacatagtgagatgctgtctctaaaaaacagaaataaacaaacaaaaaactgaacataaaggtctttgctgtggcatgtatctgacagttattcatacagattaaattgcataggggggtaatattgctatatcctttaaatcattaagaacggttactctaaaataaaatgcctacggagctctgctgtattcctcttgccacttgttgaaagtgagatatttcaacttgtagttctgaagtggattcaaatatataaaaatgctttcacctttgaaaatttttgttttgtttttatttttggcatgacaaaatacattggcaacaattcagtagaagcaacagcccaagtatgaaaaatattctaatatcttctctgaggaccctgaagtcttacattctagaagtgttcaagtagattaaatatttttcctttaaaaatgttataattttaaagtacagtatttggtatgaaaaaggggagaatattaggatagatgtttactcatttaaaatttaaaagcaataatcctgtaaaaatatttatattaccaatattgtttcaatccttttacttctgccagctacagaaatcctaattcaaaatgctttaaattgtcaatctacaaacagggtacatatagtttagtaattagctggctaaaagcaacacaggtatatttgaaagtttctagtatgtgtatttattaactgaaggactgagagactaaagaatgttgatctttttcatatgatgaaggaaggtatcagtactttaactaatttgaacagttttgaaaaccatttaaagtctagttagctacactgtatatgaaacaattgatcaatagtgctcccaagagagctaattatagatgcagtcaacccttcacaagaagctggtaaatgaatgttagagaaaaagtgtgtgtttatttatgtttgaaaattttgtgcatttaaataaaaggcttctgggaaatacgttcccagagaatgtaaggagaattagttggacatttaaaatacatagttttctttttaaatacaagttttttttttcattgaaaaacctaagcaagtagacattgctaccaaatttacctgtattaagtttaaatatgttaatgcttttcccagtcaacaaatatttattagctgctgactgtatgtcaggtctcatggggatagaaaataattaccatgcatctctgagctcaatgaatttaatagttgttaggacaaaaccagagagtatacgatcaattgctagaatatgtggtaagactgtaccttcaagatgagaaagaataaattcagtcataggaatcagagtaggttttagtaagtaaacttttccattgacacttaaggcactatgggatttagatgggcattgctgaagggtgagcatctcaaaatgagtgagttttgtctttgctatgtttgcaaatttatatcatctgggcacttttctttgggcttatattaactggttataattatgaaggaaatgcatttagaatttttccccactaaaaatacaaaagcctagttttctgcacagtatatctttttttttttttttttgagacggagtcttgatcagtcacccaggctggagtgcagtggcgctatctcagctcactgcaagccccacctcccgggttcacaccattctcttgcctcagcctcccgagtagctgggactacaggtgcccgccaccacgcccggctaatttttttgtatttttagtagagatggggtttcaccatgttagccaggatggtctcgaacttctgacctcaggtgatcattttaatagtctcatttatgcaaggtggtacattgctatatccaagaaacaaaatgtatcacttacatatttttctgatttttggtgaaactattcagttaaagggatggtcttcttataatttttgataattcttatatttaaaataatttctcacacacatactgctgtatacgtactgtgtgctaactgattgtaccactggagcacccaaaataatttctgttaacacataattagatggacattaaacaagataattttgtggttgatatttaaatttctttgccttttaaatgggcaccagtgaatagagtgagctctgactgttttgttgcactggcattttgttttatttaattttgatataatccctaactttcaaaaaagtgctgagatgcatttatttaaaaatttaaatgattgaaattaattttaatttcagaatttttaaaagaattttgcaaaagcctttaaaaattgcagtggggttggcatgctaaaaaatcaaagacctgggattggaatttattggtgtaaaaattccaactcaagatgcgaaagataatttgataatgctcttcaacctctatgatgcttacatgctgatccaccttgcatttattaatttgttttttctttcattcagttaacacatttatttagcatagacattgtgctaggcaccaaagatagaaggatgaaaagtaaaaggttactgccctgggtaaaatcacaattgcgggatgggagagagaaggttaagaaggaagaaaggtagaagtgaaagatgcatttgggagagtaagggtggacagtgtaaaaggcatcaaaatgtttccatattctataatgttatgaatatttttatggagtaatgaataaagggctgttggagcacataaaaggaaatattaattttgactgagttaagggttctcagatactttttaaatgcatataatgtgaattttttattgcttacttcattgccctaaggtcaggtcaatatgttcttattttcacatttttaaaattattgaggtaaaatttatattacattaaattattcattttaaaatgaacatgtcagtggcatttagtacattcacagtgttatgcaaccatcacacctatcttgttccaaaacattttcatcacctgaaatgaaaactccatacctactaagcagttaatcctcattcctcccttctccccaaatctgctttctgtctctgttgatttattctattcttcatgttttctataaatgcaatcatacaatatataaccttttgtgtctggctgtttttcacttagtgtaatgttttctaaatttatgtattaatattttatagcacatcactacagatcgagtatcccttatctgaaatgcttaggaccagaagtgttttgaattttggatttttttttattttggaatatttgcatatacataatgagatatcttggggatgggacccaagcctatacaagaaatttacttatgtcttgtatatatcttatacacatagcctgaaggtaattttttacactattttaaataattttgtgcatggaacaaaatctgtgtacataaaccatcagaaagcgaaagtgtcactatcttagccatccatgtggacagtctgtggttgtttggcatcactgtcattcctgactctgaatttatgtggtatcattaagcaatcattttcttatacttattcacacataagttcttaacagtaaaaaaaaaaaaaatatggccaggtgcagtggctcacacctgtaatcccagcactgtgggaggctgaggtgggtggatcacgaggtcaggagttggagacaagcctgaccaacatgttgaaaccccgtttttattaaaaatccaaaaaaaaaaaaaaatcagccaggcgtggtggcatgcacctgtaatcccagctactcaggaggctgaggcaggagaattgcttgaacccagaaggcggaggttgcagtgagcagagatcgccactgcactccagcctgggcgacagagcgagactccgtctcaaaaaaaaaaaaaaaaaaaaaaaaagaaaaaaatatgacataccattaatacagagaaacaatgtatttagggtaactaagcagcacagtagcgtcactataatacctgtgtcagttgttaaacaacaatggccaccaaccgtggcagtctccacctatgttgtgttttgattgaaaggttactgtatactgtattttatttttttaggtgagaagaaacagttgaaggactaggaagaggatcctctagggatgagctggttggcttttaaaaatatttccttcacggtcatctgcctcgttaacaatggtttttgtcttagaagtctctctttgattttataaacagagatgatttcttattctgttatgaatgtgtgctgctcttgtacttcaataagcccaccacacattttcactctgccatctataggtattttttttctgtagagttaacatgacttgtcagatgaggtcaggtgtggaattttctacttatagtgccaagttggcactcaagaagtttcagattttggagcattttggatttcagatttttggattagggatgtcccatctgcacttcattcctttttattactgaataatattccatgatatgtaccacagtttggttatccattcatctattgatggacatttaggttgtttccactttttggctattgtgaatagtgctcctatgaacatttgtgtgtaagttttgtttgaacacctattttctgttcttttgcatatatacctaggagtggaattgggtcatatgaaagtcccgtgtttaattttggagaaagtgccaaactgttttccacagtagctgcatcattttacctttccatgagccatgtatgaaggttccaatttctctacattcttgcaaacacttattttccattaaaaaacattatagccgccctagcgggtatgtcagatactattttgatgcctatttcttgacggtaaagagctggggatctctgaaaaccatagggcaataatgctttggctgagtttctgatagatgagatacaataggcttagctgactcaacctatttcttttcccttagcaggaattatcctgagtttaccagagatacctcttggctgaccaaatttcaatactacatggtattgtttattgcccagaatctcctgtcacaagggcaggattctaactcccccaggacttatgaaagttaaatatttcaaagtttggtagcattgtttttgtatcttcactggacttactttgaagatgagcctaaagagattttgctcacatttcagaaggttcatgaagacttctgctgtagcactttaggtgaccattagtaaacttaggagctagtggcctaaatcagaggttctcaaactttttattcccaggatctcgttgcattctttaaaattatttggaacccccaaagcttttgcttatgtggtctatttctttttttttttttttttgagacggagtctcgctctgtcacctaggctggagtgcagtggcccgatctcggctcactgcaggctccacctcctgggttcacgccattctcctgcctcagcctctcgagtagctgggactacaggcgcccgtcaccacgcctgactaattttttgtatttttagtagagacggggtttcaccatgttagccaggatggtctcgatctcctgacctcatgatctgcccaccttggcctcccaaagtgctgggattacaggtgtgagccactgcgcccggcctatgtggtctatttcaattgatatttactgcattggaatttctttctgttgacgagttttttactttaaaattatttttgtctgtcaagaagagagtgtgttatggggttactgtggatacttgtttgtgggttcttttaaaaaaagaattcatgaggagttttggtctgaagctttgttttttttttgtatcatatttgtttcagtatggttttgttatcaggttaatactagcttcgtaaaacaaattgggtagtgtttccttctcttctgttttctggaagagattgcgtagaattggtgttaatctttaaacatttggtagacatttgggcctggggatttctttttgggggtacttaaacataagaattcaattttcttaagagttatagggctattcaaattaactatgtcatttcatattgagtgaattgtagtaatttctgttttttgagcaagtggtccatttcatctaaattgtcaaatttatgtgtgtagagttactgctagtattcacttactatcctttttatgtctgcacggtctgtaatgatatcccctatttcattactaatattggtaatttgtgttttctctcattctttgtcagtcttgataggggcttgccaatattattgatcatttcaaagaaccaattttttgttttgtttacttttctattgttttcctgttttcaattttattggtttccgctctttatcattttcttccttctgcttgctttgggttaattttgctctcttgtttttctgggttcttgagatgggagtttagattattgatttaagatttttcttcttttcttatgcatgcatttagtgttataaatgtctttctcagcactgctttagccatgcctcagaaattttgatatattttcattttcacttagtttagtgtttctttttttaaaaaaatttcttttgaaaattttttttgactcatggattatttggaagtgtgttgcttagtttccaaggatttggagatagttctttctttcttactgatttccagtttaatcccattgtggtcagagaacatgctctgtatgatttcagtttttaaaaatttgttgagttttgttttatggcctagtttgttgtctatcttggtatatgttctaggggcacataaaagatgtgtattctgtcattgaatggagtattctatgaatgttgattagattctgttgatcagattgtttaattcttctgtatcatttctgtctgtccagttctatcaatctttgactactggaatagtcagtttaccagtttgcatcaagtgtaagaaccttacctccctttatatccaattactttaccctgtttataatgtaattggcttacctgttttctctacatacatttagaaccacattaggcaatgtgcattaaccatcaaacataatttagaaaattcaggaggagaaggaaatcctattgtatttattcacactattatattttgcctctcttattctttcttccttcctgatgtttcaacatttcttttattttgtcctttctgtttagagaacttcctttagtcattttttttagagtgggtctgctggtgataaactctcttcattttccttcatttgagaatgttttgatttcccctgcatccctaagggatattttcattgggtataggattttgggttgactagtcatttctttcagcacttcgaaaatattgtgccacttctttctggcttctatggtttctgatgagaaatctgcgtcatttgaattattttccccttataggtaaggtgtcatttttctttggatgcttttaagatttttttgtttttagttttcagaagtttaatatgatgtatctttgcatgaatttctttgaatttatcctgcttgggatttgctcaactgtaggtttatgtatgtatgtgactataattaggatgttttcaattattattcctttgagtacattttcagtgtcactgtctttcttctgtcctccaggactctgaggacatgaatattagatattttgctatatcctcaaagtttcctgacattcggttcattttcttgaagtctgttttctctctgttatttagattggatatattctattgttctgtcttctggttcactgatttggtgctttccattctacaattgagcccttctattgagcttctatttttgtttgtttgtttgtttgttttaaatagtgacagggtctcactctttcatccaggctggagtgcagtggtatgatcatagcacactgcagcataaaactcccaggcttaagttatccttctgtctcagcctcttgagtagctagaactaaacgcatgcaccaacccgaaccagctattttaaaaaatttactattgagcttttaattttagttattgtagttttcagtttttttttcatttggttcttctttatgttttctacttctctgctgaggctatttccttcatttgtttcaaatgggttcataattgctcatttatatattttttatcatggctgctttaaaatgtttgtcagattattctaacatcttggtgttggcatctattggttatctttttcatttaatttgagatcttttgtggtatgacagtgatttttgcttgaaatccatatatttttgttttttattatgacactctggttcttttgtaaacttgttttagctagctttccttaacactggttcagtaagggaagggaggctgctaccttgttactgctagatggatatggaagttcagatggtcctctgggtggtggggcttcttgtagtgctggatggggagttctagctccccatgtggtcttcactgacatcttagcagaggtggcctcattactgttggtcaatgatgaaagttttgactctccactaggcattccttgataccattctgcgggagaagtgggagggtcactggggccagggacaggtgcaggtatggggatgctactggctggtgggggtaaaagtcccagatgactacctggttttctttgacatttccgggggtgggtattgggtacctcattaaagccgtgagagagtggaattctaggttcaccactaggtttgagtgggtcagggtggagccatagtattttttctccagtgtttatctggagttagaaaagatagtgtctaaaagtttcctgtcttactaaaagctgcctctttcctggtccttgggatagagagagcaaacttttttgggggactttttttctgtatctattgatgtttttaggttgctggcttctttagctccaagtctggtatacacaacgcgaaaagaaaacctaggaaattcaccagtgtcattccttggttctgagtttcctagccagcctgtcttctttccactttttagagtcctcttatgtttgtcttatatacagtgtccagggtttttagttgtgttttggggaaggaatggggaaaagtacttctgccccatcttcccggaattggaagtcttcatattagaaattttaaaaacacaagaacatgttagacttcagaggaatcacattattatataacctctggaaaactccactgtatacttgtgagaattagagtgaaaaaggcaaataaggggctgggcaccatgtttcacacctgtaatccttatactttgggagaccaaggcgggtggatagtttgaggtcaggagttagagacctgcctgggcaacatagcaagtttctgtctctatgaaaaaaaaaaattagccaggtgtggtgatgtgtacatgtagtcctagctcctagggaggctgaggtggaggttcttttgagcccaggagtttgagattacactgagctatgatcgcgccactgcactccaatctgggtgacagagtgagagatcatctattaaagaaaagtaaataacattattatccttattgtgaaaaaattagacccctgaaagagtcttggtaacccctggaggtttcatgaccatacattgaaaactcctaccataaactataatctgtccagggacttgaaaatattaatgttgacaatatcagttttagaacaatttttgttaaatacctattgttctagtcaggcactgatctaagtcaggggatataaccatgtatgagatagagaaagtccctgccctcatgacctttgaattctttgggtcaagtaatttggcaactgaatgaagtcatgagtcttctgtttggctaaactaaatacttacattcatatcttaggaggtgtctgggtttgtgggtgtgtgtatgtttatttacagtaggtgaagcagtatagctgtggtcattcacaggagcagttcaggctactgagcccactgtggtgcccagaggcagtggatctaccctccatcaggagggtagataggaatacttagttgtagtacagacaacatgattctgtacatgatttctcctcccttcctgtcttattccctttcttattcctcccctttatttctgccgttctttcttccttctttttcttttaatatttcaatagttttttgggaacaggtggttttggttacatggataagttctttagtagtgatttctgagattttggtgcacccatcacccaagtagtataccctgtatccaatgtgtagtcctttattcctcacccgactcccatatttcccccaagccccaaagaccattatatcattgttatgcctttgcatcctcatagcttaccacaccttaaaagtgagaacatatgatatttggttttccatttctgagttacttcacttttataaatacaatggaatactactcagccataaaaagaaatgaaataatggcacttcttccttctttcttaccttccttccttccagtttgtgttgtaggtagattgtttcctcagattgagtttacaattcatactgtcctttcatcctggcaaagttgtagccccacacttcattattcattttatttatgtatacattttcgtataaacatatatgtacgtataaacatatatgtacgtataaacatatatgtacgtataaacatatatgtacgtataaacatatatgtacgtataaacatatatgtacgtataaacatatatgtacgtataaacatatatgtacgtataaacatatatgtacgtataaacatatgtacgtatatatgtatatatttacatatttatatgtaatacaaggcacctgctacattttaggcataatgctaggcactagaataacactgtcaattacacgtgaagccctttagtcttagagtaagagttagaatattttagtgtcatggtttgtagaggtcattaaggcatgcactatagagcttgcaggtccctcaccattctagcttccaattttaactggggttaacagttccttgtgtgcatccaccataacacttaggaatgcattggctttgaaaacatttcctccctttctttcattcccagcatttaactcataagaattggacttgacttgcattttcttgagccattgctcttaagggcagtctgacattaggcatcaaaatgtgctaactatggttgtagtctgacacccttttttttcttggccctcccccaaaatggcaaaataaaataaccaaaaatttcaaacatttggtttaattaaaataggccttgtagaaatgcatttgaatatttgaatagtgcattaatatgctaggaaaatcaggggttcaaaagtgaatattgccgcattccttaggccctgaggaatagcaacaaataaatattgtgcaaattacggttttggaaagactggtacaatacaattaataaggcatgaaaaccagtagcaagaaaatgagaggaaggggtaaagtcatttctttattttaaaggtagaaatgtgcatttttgtgtttgggttttgccattttaagacacctgtgtctcacttgctacaatcacaaattccaagggtgaataatggaaatcattgtataggtgtaaatggtgtattgagtacttttttcagtctataacacacctatcttgttggcaccaaagagcaatgaatgaggcattttattaaaacctaggcttgtggttccaatcaaaggtcactggttggttcccacttttcagtttcagatttgtctgtgtttgatcagggggcagcaacgagatttttatggcaaagactttgtactagcctgtatctgtctgttgaaacttgaaagtctttagaactgtgatgctgacagtatgtgaacactgcaagaaagtgtgaactgtgtaatgtcttaaagaaactttcaagtatcatcttccttttgtgatgtttgaaagagtttcagataccattatgatactagtgaaaaggtattttattgattaaaggagattttttttcctagcaaatatacattaagtcagtcttcctattactttttctgttctctccctgcttcatacagcaagttcattaacatgtagatatgcagtgattgaagtcagactgctttttacagtggagttgtcttgatataatgagctcctctttaatgttgaaaaaattgttgttactttctaaaaagggttgtttgtgaatttcattaatcttcaaacaatttctgcattgttcagtttactacaattaaaatgctttccgatgctaaaaaatcactttttacagatgtattgcaaatgtaagcactgtgagagtggctttgttttttactttgaaagaaaaagctgctatttagttgagaattcttatttttttaaattggccctccatatggaaaatcagaggagagtacacttactgtactgctgaacaggtgagtttgctcataagggttaggtttcacaactagttcattcaatccttggactagagcattggtctaatcatagttgaaaaatgagggccttaaccttgccttctcagtttactagagtacaactccttcgtatttagaatgttggaagtcttgagaaagaagagatattagtgaaattaagtttctgctttgggtaaaagttctcaaagggatgtatgatacacctgactaaattcttggttgcagagcagtgattgtagttcatagtgaatagcttcgttctttgtaaattaccttttccacttaggccctggtcagcaggacttgaatggtatgagagtaattcttggcatctcttgaagactgggcacagaaagaggcagaatgtctttctggagaatatttagcagattgaaggcttaaaaatttccaggtgatgtcaaggaagttttccaggtaaatcccaggacagttggtttatgaaggcagggagttggagagttgagaataaattacttgaatatcttaaagtttttgccagcaatcagagtttatagagctatcctagtcctactatgaccactattcaggaaaatgttcttccaagatatctcttcctgctttagtttcagagaccatttacatgatgctagaacatctagttaagttagagatacactcaaaagttcttgatagttggaaaagttgtagagaaaaaatattttagatgtttggctaatttttcaaattgtgttttgacttcttaaggacagagccagcatctgaaacttaacagcgttctttagtaaaattgagctaatcatatgattaagttggcctttataagccattatgttgtagctatgtaacaaaagggcttatcaaatgttttaatcatcccaaatataaggtgatactttgatctgaaaaaggaacaattcttgtgctgccttacacacaaaatacttctatagacttgtaggagctaataatggtgataagaatgttactgatattatcatttacaataataataaagaataacaatgttgctaatattataatttataattataaagttaacagttgcaggtgagaaatatggatatttgaaatagatacctaagaatattctatataagcaaagaagtaattacagaatggtaaacaaaagagtcatggaattttatgtttagattaactctcattggagattaccagcactatgttaattaagtcagaagaaactttacaaaagaaaggtaaattgataagctgggactatccggggaggacatttcagaggatggtgtatagtccagaagaaagttgaatgtgggaatgagtttactggatccatttaatgtggagtacattttctagaggggagtttagggtgtgagatagggagaagaaagagctaggaacaaattggagaagagtaagcatttcagaaatttgtaaaatgcaatacagatgccatatggaaaagttcctaaccttactttgtccatctttacacttcatgtgaacatatatgcataaactttaattatactcaagaggcttttgacatgtttgataacattttccagtatttaagtgaagttagggtggagagatgaaattttatgagaaactatagttgtatttactaattgtgatcaaagtatttaataagactaaagggaaacaccacattttgaaaataccatcagaagtcttgggcttctgaagcttggaagacatttaactgacattgaaaaaggaaacctatgtgtggcaatgaagttatggtatgtaagaataaagaaaaggtggattataaagtcagaaatttctgaagctacttaacttgatctcagaggtattatcagctaagacctatgaattgggctataaatcgttacgttattggtctacagaataaaatttgtgccttccgtattttatgaattaacttttcatgctctttattagatgcaaaagcaatagaacaaagtgcaagaacaataatgtttaaatattagcagcaatttgaatgaaagtaaatttatgattataaaatgttatttgatgaaagtgaagccatactacatggcttgatgctgggtatttcatcaatctgaaatgttaaacattttaatgaacatagaaaatgttaagggtatttttcttaaattaaaaactaatgttttaatgctcacttctgcatgtgattctgtggttatatttgaactatttctataaagaggatgccacagttatcttttaattgtatttgaatatttgggccaagggacgaagttgaagcacttttattttagtgggaggaagtgtggaaaatgtgatgttttctgagataaaaatgagttagattagcattgctggtagttttatgaacatataataatttagtacagctttaggccatatttccatttattttattcagattttactgagagtgttgtttgtttggggatgtagaatatcagcactttcgatttgctttatttctcatttgtaggctatggctgtaatgaatttctaataattatgactgagtaatatctccagccgttctggcaacttgaatgtgttactggatagtctgtttctagtgatgattgtttatttatttaaggactttttttagatgcttgagatgtgagttactctagaatataattaagagctatggtattcttttgtgtaagtcctcatttttaattaaacagacttttgttttccttttatataaaaataaaaatataaaaaacccagaagtggtatgtcagtttttccaatcaagatgtcaagatcagaatcttgaggagaaatatttatatgaaaagaattatctggatatagacttaacaaaatatattattggattattggattattggtaaatatgaatttgttcatatttatgtaactagtcaagggcacatatggtggaaggcacttctgcttattaatatattcattatatctctatttcttttgcagtgatttaactttggtggatggaattctctgataaaaatgtttatgtgtccaagactttatatgtattccttctaattgtatttttgtattcaatagtatagcagggaaattatagttacaaataatttattgtatatttcgaaatagcaagaagagaagatttgtaatgttcacagcacaaagaaaagataaatgtttgaagtaccctgatgtgatcattacacattgtatacaggtatcaaaatatcacatgtacccccaaaatatacacaattattatacattaataaaaatttaaagacattatatgtaataataatgataatatattttatttaagaaacacttaaataccgataacacctgagcaaaaataattttaagaaagaaataattgtagttatgttgttagatgttcagctaattagtggtaatttagattcactaattatacacactgaatgatttagtaagttttcatagcattgtcatgttttttatgtataagttaaaaattcttttttattccatattgttgaattttttaagtgtcattgaggccacagattctgtttgtttgtttatttatttttggctgtgaattttgcaaattgtcctgctggctagtatgtgattgagattgagatgttttccatttttagatatttctatgtgaaacatttagagaagtagtcttgtacatcttttaagtagtcaatgaccttatcttttgccaaaatcaaatgacattcaatactgatactatggagagaggaatcaaaataggtacctaattataattactttttcccctgtcattatatcactacatgcaaaacaactgatttgtaagagatcacacaattgctgacttttggcaggtacaaaggttttttttctttgctcgtctctctctttcccctttcctgttttcatcacatgtaagatttattggaacagttcagactgacctccttctcgaaagatttaattttaattctaatagtttataagaaatagcagaaggacaaaaggaacttaatatgtttatgactgcttcatatttccagaaatccttcacatttgtggtatagttcaattgttaagagagtaaggaaggttttgagtaatttttgggagatcattacagagacttggacgaaacactatataattagctgccacagttgctgcttttggaataaaacctaatgtgaacaacatgaaggcagggactatgtctttttaactgttcttacccagtatacagtgttgtgcctggcacatggtgggaatatagtagttattgtaagaataaaggaaaataggatgggagagaagaaagaaaggggaaaaaacctaagttaattggacaaagtgataaattccaggtcattctgttgtgattgttttggctgatgcattgccctcccagactaataacgaacagaaatatgattttctactgagcatgaacatggtataactttgagaaacctgttatcaaagggttttaagcatttttgttattagttcacagtgactcaatttttccttctgctcatttttgttgggtagtgttgggaataacaagactcaagttgcatacagtatttcaaagaaagctttcatgatgactattaccatatttattatcttttcttttgaaactataggtccctatgaccaatcctctttttgaatggactgagtaccccctcctagtagggcctaccactttctaaactgccgcgttgaccatcctaagacacttcaaatactctgtaacatatatgttatatttaagaatcaaggtcattcactggtgagagaaagtggtctatttttcatctttttaataaggttgttgatgaaatggtgttggaatttaggactggcataggacttgaataataaagttcataattcagtgatgaaactcatctatcccgtctttatgcatttcttgtcattttatttactgttaattttatcctggttctgtttggagttaggagcaccgatctatgttagatggtcctagtatcaatgcctctttagaggtatggtctccacagggagagatggatgctggatttgtagccatttatatacaccgggtccagacagaataaagtaaaaaaaaaaaaaaatggccaaaatcagcagatggtgacaaaagtgatccctggctgccctcattgttcattagcataagacacttccaccagccccatggcagtttataagtgctatggcaacaaccttgaagtcaccactcctttccatggcaatgacctggaagttactgccccttttctagaaagttctaattaacctgcctgtcaattcacatcagcctgccccttaatttgcatataattgaaagtggatatacatgagtataaatacagttgccaacagcccatacttagctgactttgggtgcacagcctatgagttagcctgctctgcaaggagcagtaccgttcaagcaaatgttgctatctaacaccactaacttaaccttaagttctttcctagccaaagccaagaacttctgctaagccccagttttggggctcacttgtcctgcattactaggaggaaagttataaaaaaagaaaatgttttagatgataaattcttgggtttaaagtccatgtttcggtcctttagttgacattaatgatcaataattatttttattatgtaatgtaatacttatatcaaaaatgatttccatattcccataatgttatttatcaaataatttcatatctatgagagattgttactcacttcaagataggtattatacaatgccattttaattttcctggttctccaactgtgtcagacttatgtaatatttaccaaatcaaacttacttatgagtaccagcctagaggaaggctataattgtttatggcacagataatctcattctaaccttttagatctcctttgataacttttaggaatgttatataagtcttttagtaaaaaagaaaaacaaaaaatcccaaacctctattatgctgtgagacctgaacctcacttctgtaactcccaggattaggcaatttaaagtacatattcctttattaagtgtcatgggtagcaatatcttgttactactgtttagaaaaattgctttcatttgtggaaggctctaattgttgctggatgcaataaatgtttggcttaccttattcatttgcccagaccaatagacccttaaagtgtgaatagattccaaacaaaagaaaaaacctacattaacccatggagtgaaatatattttgattgcatgcattatttgggaggggggaaatgagggtgacctttgtaaattccatacatcttactttcagtctggagaatttgcttcccacatttaagtttttatagtggactttgtttttaaaatgtcggctatacagcatgcattttccttttttgattttagcttggtggatttttatgattcagagagtttttttaaaggaacacttaacttctgtgttttactttatgatttgtcaaaaagtactaatttttttgggggccgtgtatgttaatgtttagaatgttggaaaaaattttaggcattactatagtggtgtctgtatacaatatacaatatttgggtttcaataaaatatgaaaaattgggaaaatagaagatgtatcttatagatgtgtaagaaaaatgtacattataaattttgttaaaaatggtcaagaataccctttgaattgttaatctaagacatgcataaaacattttgtttgattaattttgtttttgaataaatttttcaggccaggcatggtggctcatgcctgtaatcccagcactttgggaggctgaggtgggcagatcacctgaggtcaggagttcaagaccagccttgccaacatggtgaaacccatctctactaaaaaaatacaaaaattagctgggcatggtggcacatgcttataatcccagctactcaggaggctgaggcaggagaattgcttgaacccgggaggcagaggttgaagtgagccaaggttgcaccactgtactccagcctgggtgacagagtgagactctgtctcaaaaaaatatatatattttttcatattaaaattacttttgttttactgcctgaagtttaactccataattataaatattatggcatctacaccaaataggggagtgtcacatgctgtgaatctatttaaaatgtgtgacttgtagattggagacaatctgaaaatctttgccttttatttatagtgtttagactctttttatttaatgtaattatctatatggttgggtttaatttagcgtctttaaaacattatttatttatttattttaatgagacagggtctcactctgttgcctgggctgagtacagtggcgtgaccacagctaactgcaactttaacctcttgggctcaagtaatcctcccacctcagctcttgagtagctggaactacaggtgtgtgccaccattcccagctaattttttattttaaatttttttaaagatggtgtctcactatgttgtctaggctggtctcaaactcctaggctcaagctatccttctgcttcagcctcacgagtagctgggactataggtgtgtgctaccacatctggctaatatttttgtaaagttggggtcttactatgttgcctaggctggtctcaaactgctagactcaagcaatcctcccacctaagccgcccaaagtgctggaattacaggtgtgagccactgcgcctggccttaatttaccatcttgttatttttttcctatttgtttcatctacagagtatattttaaaatttttgtttcagctccactgttgtttaaatagctatactttttaattatggttgctttaaagtttacaataaatatctttaacatcacagtctacctttaaataatattattttacttaatgtatagagtaagaaccatagatgcaacaatatacttcactttcttccttactgctttttgtgttattattgccataagtcagaaaacccacagtacactgttgcggtttttgctttaggcagttaattatctttttaaaaataaggttaattaaggtataatttagagcaatgaaattcactctttttagtaacacagtgatagacattttatacgtgtatataacatgcaactaccaccacacttaagatatagattttttatttttttattattattttttattttttattatactttaagttctagggtacatgtgcacaacgtgcaggtttgttacatatgtatacatatgccatgttggtgtgctgcacccattaactcgtcatttacattaggtatatctcctaatgctatccctccccttcccccaaccccaagacaggccctggtgtgtgatgttccccaccctgtgtgcaagtgttctcattgttcatttcccacctatgagttagaacatggggtgtttggttttctgtccttgtgatagtttgctcagaatgatggtttccagcttcatccatgtccctgcaaaggacatggactcatccttttttatggctgcctagtattccatggtgtatatgtgccacattttcttaattcagtctatcattgatggacatttgggttggttccaagttacccagtaatgggatggctgggtcaaatggtatttctaattctagaaggatatagattattttcatcatctccaaaggctttccatgcccctttgtagtcagcctgtcactcatacccctgacaaccactgttcatatttctgtctttacaagcttatgtcttccacaatgtcatagaagtggaatcataaagtacgtacatagccctttgtgtctggcttctttcattttgcgtaatgaaagaagatttatccatgttgttgtaggtaacagtattttgtatcattcttttgctgagtagattccaatatatggatgtgtgacaatttgttttttttatcaccagttgatggtcttctgggttctttttagtttttggtgatcgtgaataaagttgctgagttgcatacaggtctttgtgtggacatatgttttcatttcttttgggtaaaaacctaggcattggattactctgttggatgataaatgagtgttttacaagaaactgccaaagaagtttccacaatggctgcaccattttgtattctcatcagcatgggctctattgtgctataccattaccagcacttggtattgtcatttaaaaaattttagttatattgggaggccgaggtgggcaaatcacctgaggtcaggagtttgagaccagcctgaccaacatggagaaaccccgtctctactaaaaatacaaaattagccaggcgtggtggcgcatgcctgtaataccagctattcgggaggctgaggcaggagaannnnnnnnnnnnnnnnnnnnnnnnnnnnnnnnnnnnnnnnnnnnnnnnnnnnnnnnnnnnnnnnnnnnnnnnnnnnnnnnnnnnnnnnnnnnnnnnnnnnnnnnnnnnnnnnnnnnnnnnnnnnnnnnnnnnnnnnnnnnnnnnnnnnnnnnnnnnnnnnnnnnnnnnnnnnnnnnnnnnnnnnnnnnnnnnnnnnnnnnnnnnnnnnnnnnnnnnnnnnnnnnnnnnnnnnnnnacccgggaggcggacgttgcagtgagccgagatcatgccattgcactccagcttggtcaacaagagtgaaatgccgcctcaaaaaaaaattttttttagttattctggtagacttctattagtactgtatctcattaagttttaaatgtgcttttccctaatgactaaatgattttgaaacttttttcatgtgcctatttgtcatctctgtctctttggagcaatgtcttttcaaatttattattatttttaattaaattgaaagagctttttatatattccagatataaatcctttatgtgattattttatacaaatatttctcctagactgggtttgtgatttcattttttttgaaatatgtatacgttatggaatggctaaatcaaattacctcacatacaaaataaatttacttcatttatttgtggtgagaacacttaaaatatagtcttttagcaattttcaagtatataatatattgttattgactatagtcactatgttgtacaataggtctcttgaacttattcctcctgactaactgaaattttacatcctttgaccaacatcttcccatcctcctactccctgcccagcccgttcattttaagtgtctttcaaagagccaaaatttttaattttgatacagttcaatttttaaatttttgtcttttacagagtatgcatttgagatatctttacctaagccaaggccagaaatattttctcatacattttcttctagaaattttatagttttatgttctatatttaggtctatggcccattgtggcttcatttttatggaaggggcagggatcatttgttttgcctatggagctccaattattcacgactatcttttgaagatattaaaaattgagaacattttctgttagagtttcccttatagttaccatttctaacactcttcattcttttgataaatctacattgccattctgtattttttttccatctaaagaactttctttaacatattttgcagtgtagagctgctgctgatgaattctctctaaacatttatttgtcgaaaaagtctttgttttcacattagaaagatatttttgcctaaacggattctaaattggcagttttaatttctccagtattttaaagatgttgttttatggtctttgagcttgcatatcttctaatgaagagtctgctgtcactctcatttttgttcctttatatgtattgtttaatttttccccatgcggctgcttttaagatgttctttttatgattgttttccataaatttgattattattttccttgcatcttcttttatttcataattatttttaaaaacaattgctgttgatacatatttgtacgtatttatggggtaccatgtgatattttgttacacgcatagaatgtgtaatgatcaagttagggtgtttaggatatccatcatctcaagtattgatcatttccctgtattgggaacatttcaatcctttcttctattttgacataaacaatacattgttgttaatgataatcactctactttgctatcaaacattagaatttattccttctatttgtctctctgtttgtacccattaaccaacttctcattctgcaccctcccaatcacacattcttcctaatctcttgtcgacattctcatgattaacctcttttagctctcacgtatgagtgagaacatgcagtatttgtctttctgtgcctggcctatttcacttaacataatgacctcaagttctatccatgttgcaacaaatgacatgatttcattcttttttatggctgaatagtatcccattgtgtgtgtgtgtgtacatatacttttatatatgtttgtatatatatatttctttatcttttcttccattgatggacacctaggttggttccatagctttacaattgtgaatagtgctgcagtaaacagggagtgcagatatccctttgacatgctgatttcctttcctttggaaaaatacccagtggcaagattgctggatgatatggttgttctatttttagtttgttgagaaatctccatactgttttccatagtggttgtactaatttacattcccactaagagtgtataagagttctcttttctttccatcctcaccatcatctgttattttttgtctttttagtaatagccattctaactggggcaagatgatatctcattgtggttttgatttgcatttccttgatgattagtgatattgagtatttttaaaaatcatatacctgttggccatttgtatgtcttcttttgagaagtatctattcatgtcctttgcccacttctgaatgggattattattttttggttttgcagttgaattccttgtatattttggatgttagtctcttgtcagatgactagtttgcaaatattttctcccattccacaggttatctcttcattctgttgattatttcctttgctattcagaagctttttggtttaatatagtcccatttgtctacttttgtttttgttgcctgtgctttgggtcttagctataaaattcgttgcctagatcgtgtcctgaagcacttcccctgtattttctcctagcggttttatagcttcaggtcttatattaaagtctttaattcatcttgagttgacttttatatatggtgagagataggggactagttttattcttctgcatatggatatccagtttttccagcactatttatttaagagggtgtcctttccccagtgcatgttcttggcacctttgtcgaaaattagtggatttatgtaaatatgtggatttgtttctgggttctctgtattgttccatgagtctgtgtgtctgttgctatatcaatactatgctgttttggttactattgacttctaatatatgttaaatattttgaattctatttctgtgaaaaatgacattggtattttgataggggttgcattgaatctgcaggttgctttgggtagtatggtcattttaacaatattaattcttccaatacatgagcatgggatgcctttccatttatttatgtccttttcaatttctttcatcagcattttgtagtttttttggtaaaggctttcctcctccttggttatttattccctaggtatttttttttgttgttgcttttgtaaataggattgccctcttggtttctttctcagctagtttatttttggtgcatagaattgctactgatttttgtatgttgattttgtatcctgcaactttattgaacttctttattagaggtaagagtatttatttatttatttaaatagacaaagtcctgctgtgtcacccaagctggagtgcgatggcatgatcatggctcactgcagcctcaactgcctgggctcaagtgattttcccaactcaacctcctgagtagctgggaccataagcatgcaccatcacacttggctaatcttttaattttttgtagcgatgagatctcattatattgcccagggtagtcttgaactcctgggcttaagtgatctgcctggcttggcctcccaaggagctacgattacaggtgtgagccaccatgcctggtcagtttgacttcttcttttccaatttgggtgccttttatttctttctcttgactaattgttctggctaggactcccagtattatagtgaataggagtggtgaaagtgggcatccttgtcttattccagttattagaggaaaggctttcagctttcccccattcagaatgatgttatctgtggcttcgccatatatggactttattacattaaggtatatactttctatacctagtttgttgagagtttttatcatgaagaggtgttgaattttatcaaatgccttttctgtgtctattgagatgtgggttctttttttttttttttgggcttggactttactttgttaaagtttttggatccatgggtttatagttttattcaaatttggaaagctttggctgtattcttcactttctttcctctctcttttagagctcatatgtatgttagactatatggcctattcatttctttttaattcttattttctctcactgcttcaacttcaatcatttctattgctatgtcattgctttctactgttaattcaatccagtgtgttttttttattttagatattattttcttcctctctatgagtttttaaaaaatgatatggggtcttgctctcttgcctaggctggtgttgaactcctgagctcaagtgatcctcctgctttggcctcctaaaggctgagattaaagatgtgagccgtggtgcctggccctctctataagttttaactgtatccttttatatctttcattcctcattttgttcatgttttcctctgcatttttcaagatatggagtacattttaatagctgttttaacattgtacctgctaatttaataatttctgggtctgtttttattgattgatttttctccgtgtcatgggtcatatttttctgcttctttgcaagactgtacattaaaaaaaagtttaaaaattattgtggtaatattcacgtaacataaactcaccactttagaaaatttaaaatgcataattcagtgatatttggtatatttataatgttgtgcaaccactaccagtgtctagttccaaataatttcatcactccaaaaacaaaaccactttttggctgggtgtgatggctcacctctgtaatcccagcactttgggaggctgaggtgaaaggattccttgagtccaggagtttgagaccagcctagtcaacatagtgagatgccttctctctgaaagttttaaaaaattagccaggcatggtagctcatgcctgtggtctcagctactttggagaatgaggtgggaggattgttgagcccaggagattgaggctgtactgagctgtgataatgccactgcgctctagcctgggagacagagcaagaccctgtctccagaaaacaaaatgaaacaagataaaacccaaaactactttttaagcagtcactcaccatttctcccacccccaatcccagggcaataataatttttctgtttctatggatttacctattctagatatttcatataaatggaatcatgcaatatgtggcctttgtttttagcttcttttgcttagcatgttttctaagtttatccatttttttagcatgttttagtactttatttttattggcgaatactatttcattgtgtagctctacctcaatttgcttatctattcacctgtcaacagacatccttctaccctttagttattgtgaatagtgcttccatgaatatttgtatatatgtttatggttgaacaactgttttctttaggaagatacatagcagcataattgctgggtcacatggtatttcctgttgaactttttgaggaagtgccaaactattttccacagcatgtgcacattttatattcctaccagcaatgtattgagtgtgctaatttctattttagtgagtgttaaattgtgattttgattcatattttcctaatgaataatgattttgagcatcttttcatgtgcttgctggccatttgtatgttttctttgggaaatgactagttcagccttttgctcatttaaaaattggcttgtcttttcattattgagttgtaagagttctttatgtattataggtagtaggccctacttagatatgatttgcaaatattttcttcagcctgtgggtcttttcactttcttgatagtgttctttgatacacaaaatttttcatgtcatcactggggacttcaatactgagaactaaaagaaaatgaagatgattttttttttttactggcttagaaataaaaaggcctatgtcattgccattcacattttcaatagaagctcatattattgatattgtaaaattctaaaagtgatattaccgttaaagtttggacaaaaatatatggtggtatatattgttctacacagtaaatgtattccaagaaagttgcatgctcatttaattttgcttagttaaattcacttctaaggttggcatgaaggcacacacctatttgcatttaagataaagagttccaagataaagagttccttaataatgtacattgcctggcctgttagtaggtgctcaattaatgttactacttaattaatttttaagttttctaatagcagcatgtgtatttgtgtgtgtgtgtttgtgtgtgtgtgtgtaagtgtatgtatgtagactgttcttgatttggaaataaagtaccatagtttttcagaagtagagttagtagaccagttatggataatataaatattagcaatcatttaccaattactggtccctgattctgaaaaagaaaacaacccactgcattgatcacagttttcaaaataaaatctgtttgttgaacaaacttttgaattctaatggtacagagcattgggggtgcttaagaaatgtttttattcatgttatattaggattgaatatttctgttatagctcaacagaatttaaatggagctgcataactggttctgaagtcatcttgattttctgtttaattaataattcaagttattaaaaactcactcatgctgttgaatacagttctcaaatttttttacctagataaattctgtgggaccagtttgttgtgggaatttttttgtgtgtgtgactcagcagtttaacttaatagttcaaacaactgctttagaaatttgtttgtcaagtcatgatttataccattattttaaatttattttttattatactttaagttctagggtacatctgcataacgtgcaggtttgttacataggtatacatgtgctatgttggcttgctgcacccatcaacttgtcatttacattaggtatttctcctaatgctatcccttccccaagccccccattcccaacaggccccagtgtgtgatgttccctgccctgtgtccatgtgttctcatcattcagttcccacctatgagtgagaacatgcggtgtttggttttctgtccttgtgatagtttgctgagaatgatggtttccagcttcatccatgtccctgcaaaggacatgaactcatcattttttatggctgcgtagtattccatggtgtatatgtgccatattttcttaatccagtctatcactgatggacatttgtgttggttccaagtctttgctattgtgaatagtgccacaataaacatacatgtgcatgtgtcttaatagtagcatgatttataatcctttgggtatatacccagtaatgggattgctgggtcaaatggtatttctggttctagatccttgaggaatcgtcacactgtctcccacaatggttgaactaatttacactcccaccaacggtgtaaaagcattcctatttttccacatcctctccagcatctgttgtttcctgactttttaatgctcaccattctaactggtgtgagatggtatctcattgtggttttgatttgtatttctctgataaccagtgatgatgagcattttttcatgtgtctgctggctgcataagtgtcttcttttgagaagtgtctgttcatatcctttgcccactttttgatagggttgttttttttcttgtaaatttgtttaacttctttgtagattctggatattagtcctttgtcagatgggtagattgcaaaaattttctcccattctataggttgcttgttcactctgatgatagtttcttttgctgtgcagaagctgtttaattagatccatttgtctattttggcttttgttgccattgctttcggtgttttagtcatgaagtccttgcccatgcctatgtcttgaatggtattgcctaggttttcttctagggtttttatggttttatgtcttacatttaagtctttaatccatcttgagttaatttttgtataaggtgtaaggaaggtatgcagtttcagctttctacatatagctagccagttttcccagcatcatttattaaatagggaatcctttccccatttcttgtttttgttagttttgtcaaagatcagatggctgtagatgtgtggtgttattcctgtggcctctgttctgttccattgatctatatctctgttttggtaccagtaccatgctgttttggttactgtagccttgtagtatagtttgaagtcaggtagtgtgatgcttccatctttgttcttttggcttaggattgacttggcaatgcgggcccttttttggttccatatgaactttagaatagttttttccaattctgtgaagaaagtcattggtagcttgatggggatggcattgaatctataaattaccttgggcagtatggccattttcacgatattgattcttcctacccatgagcatggagtgttcttccatttgtttgtatcctcttttatttcattgagcagtggtttgtagttctccttgaagaggtccttcacatcccttgtaagttggattctttggtattttattctcactgtagcaattgtgaatgggagttcactcatgatttggctctctgattgtctgttattggtgtataggagtgcttgtgatttttgcacattgattttgtatcctgagactttgctgaagttgcttatcagcttaaggagattttggtctgagacaatggggttttctaaatatacaatcatgttatgtgcaaacggagacaatttgacttcctcttttcctaattgaataccctttatttccttctcctgcctgattgccctggccagaacttccaacactatgttgaataggagtggtgagagagggcatccctgtcttgtgccagttttcaaagggaatgcttccagtttttgcccattcagtatgatattggctgtgggtttgtcatagatagctcttattattttgaaatatgtcccatcaatacctaatttattgagagtttttagcatgaagggctgttgaatttcgtcgaaggccttttctgcatctattgagataatcatgtggtttttgttgttggttctgtttatgtcatggattatgtttattgatttgcgtatgttgtaccagcattgcatcccagggatgaagctgacctgatcgtggtggataagctttttcatgtgctgctggattcggttttccagtattttattgaggattttcacatcgaagttcatcaaggatattggtctaaaattctcttttttttgttgtgtccctgccaagctttggcatcaggatgatgctggcctcataaaatgagttagggaggattccctctttttctattgattggaatagtttcagaaggaatggtaccagctcctctttgtacctctggtagaatttggctgtgagtccgtttgcctggactttttttggttggtaggctattaactattgcctcaatttcagaacctgttattggtctattcagagattcaacttcttcctggtttagtgttaggagggcgtatgtgtccagggatttatccatttcttctaaattttctagtttatttgcatagaggtgtttatagtattctctgatggtagtttgtatttctgtgggatcggtggtgatatcccctttatcattttttattgcatctatttgtttcttctctcttttcttctttattagtcttgctagtggtctatcaattttgttcatcttttcaaaaaaccagctcctggattcattgattttttgaaggttttttttatgtctctatctccttcagttctgctccgatcttagttatatctttgcttctgctagcttttgaatttatttgttcttgcttctctagttcttttaattgtgatgttagggtgtcgattttagatgtttcctgctttctcttgtgggcatttagtgctataaatttccctctacacactgcattaaatgtgtcccagagattctggtatgttgtgtctttgttctcattggtttcaaaggacatctttatttctgccttcgttatttacccagtagttattcaggaacaagttgttcagtttccatgtagttgtgcagttttgagtcagtttcttaatcctgagttctaatttgattgcactgtggtctgagagacagtttgttgtgatttctgttctttcacatttgctgagaagtgttttatttccaattaagtagtcaattttaggataagtgcgatgtggtgctgagaagaatgtatgttctgttgatttggatggagagttctgtagatgtctattaggtccacttggtgcagagctgagttcaaatcctggatatccttgttaaccttctgtctcgttgatctgtctaatattgacagtggggtgttaaagtctcccattattgttgtgtgggagtctgagtctctttgtaggtctctaaggtcttgctttatgaatctgggtactcctgtattggatgcatatatatttaggatagttagctcttcttgttgaattgatccctttaccattatgtaatggtcttctttgtctcttttgatctttgttggtttaaagtttgttttatcagagactaggattgcaacccctgctttttttttgttttccatttgctttgtagatcttcttccatcactttattttgagcctatgtgtgtctctgcacatgagatgggtctcctgaatacagtacactgatgggtcttgactctttatccagtttgccagtctgtcttttaattggggcatttagcccatttacatttaaggttaatattgttatgtgtgaatttgatcctgtcattatgatgttagctggttattttgcccattaattaatgcagtttcttcatagcatcgatggtctttacaacttggaatgtttttgcagtggttgttactggttgttcctttccatgtttagtgcttccttcaggagctcttgtaaggcagggctggtggtgacaaaatctctcagcatttgcttgtctgtaaaggattttatttctccttcacttttgaagcttagtttggctggatatgaaattctgggtggaaaattcttttttttaagagtgttgaatattggcccctccctcttctggcttgtacggtttctgcagagagatctgctgttagtcttatgggcttccctttgtgggtaacccaacctttctctctggctgcccttaacattttttccttcattttaaccttggtgaatctgaaaattatgtgtcttggggttgctcttcttgaggagtatcattgtggtgttctctgtatttcctgcatttgaatgttggcctgccttgctaggttggggaagttctcctggataatatccttaagagtgttttccaacttggtaccattctccccatcactttcaggtacaccaatcaaacgtagatttggtgctttcacacagtcccatatttcttgtgggctttgttcatttctttttactgttttttctctattcttgtgttcttgctttatttcattaatttgatctgcaatcactgatatgctttcttccacttgattgaatcggctattgaagcttgtgtatccatcacacaattctcatgctgtggttttcagctccatcaggtcatttgaagtcttctctacactgtttattctatgtagccattcatctaaccttttttcaaggtttttagcttccttgcgatgggttagaacatgctcctttagctcagagaagtttgttgttaccgaccttctgaagcctacttctgtcaactcttcaaactcattctccatccagttttgttccagtgctgacaagaagctgcaatcctttggaggagaagaagtgctctggtttttggagttttcagcttttctgctctgatttctcctcatgtttgtggtttttatctacctttggtctttgatgttggtgacctacagatggggttttggtttggatgtccttttgttgatgttgatgctattcctttctgtttgttacttttccttctaacaggcccctttgctataggtctgttggagttcgccggaggtccactccagatcttgtttgcctgggtatcaccaacggtgggtgcagaacagcaaatattgcagaacggaaaatattgctgcctgacccttcctctggaagctttgtcccagaggggcacttgcctgtatgaggtgtctgtcggcctctactgggaggtgtctcccaatcaggctacatgggggtcagtgactcacttgaggaagcagtcagtctgttctcagagctcaaacgctgtgctgggagaaccagtgctctcttcagagctctcagacagggatgtttaagtcttcagaagttgtctgctgccttttgttcagctatgccctgcctacagtggtggagcctatagagacagtaggccttgctgatctgtggtgggctccgcccagtttgagctttctgtctgctttgtttacctactcaagcctcagcaatggcggatggccgtcccaccacccagctgtagccttacaggttgatctcagactgctgtgctagcagtgatcaaggcttcatgggcatgggacccgccgagccacacatgggagggaatctcctggtctgccggttgctaagattgtcgaaaagcacagtatttgtgtgggggtgtactgtttttccaggtactgtctgtcacggcttcccttggctatgaaagggagatccccgaccccttgtgcttcccaggtgaggcgatgccccgcccttcttcagctcaccctccatgggctgcacccactgtccaaccagtcccagtgagatgaaccaggtacttcagttggaaatgcagaaatcacccatcttctgcgtcaatctcgccgggagctgcagactggagctgttcctatttggccatcttggaagcgaccttgatttataccattatttttataacaaacatcaaataaccatcatactattattgccagcagcagattttggaaatggtacattcaaatgtgtaaagttattgcatatgaatgaagagagatattatttcaatgttatatttttattactagcttctgtttttattaaggataatgaaaaccttatgtctggccctgtgaacaaaactattgtgacctttgatgtgacccacctgttgtgctttcacaattgataatagtcccctcatgtgagggtgatctgtaaaataacaatgtcctagcaagatggaaaataacatttgcaaattgaagttgcagaaattgaaatatgcttgggtcatgtcctaaagtactaaaaataacttatctaaccaaatattttgagagaagaagatattgacagatgcctgactcacagtgcctttttcaggtagaattgttgattggttgtagacttgtctattaagcttctgatagacttcctgaatcagtgtttggtaatttttacaaccagaaaacatgctaaccaatgcctaggtcttaggaattcccaactgttgcatttatggaaaataaaaattattaatttatttggcaattaagacttttttggtttgtttttgtttttttttgttaagacagggtctcacccttttacctaggctagagtgcagtgttgcgatcttggatcaccacaacctctgcctcccagggtcaagggatcctctcaccttagcctcttgagtagctgggactacaggcatgggccacagttcccagctaatttttgtattttttgtagagacggggttttgccatgttgcctaggctggtttcaactcctgagatcaagtgatctgcccaccttggcctcccaaagtgctgggactacaggccactgtgcctggccaagaccaattttttgaatcatgcttcaaaaaagaaagaaagaaatataagtaatttgcttatttgatttttggggcataggtataaataatagctttccctgttagacaatgtctgctctgggtttactgggagggtagtctgtcagctaattatatacattttgtagatacatttaaaaacaccatcatgtagtagatattttcacgagcttgcacaatcttctttagcatatccattcttagaaagatctagtgatgatatattcagtgagtgaacatcagtatctcaaacaaaactaacaatgtactactgcccttcaatatgcaggtcaaattccatcattatgaagacattgtattataaaaacattgacatatctctgcttgtggcttaggttaaggataattcctaactagtcaatactcagtttaaatcttctgcagaaatctttccctcttcagcaattatgtggacattaagtaccatagctataactgttgatgaatgttccaatgataggaactttgtagaaaaaggaaaaggatatggcatcaaggctccagttgaagatgtgatggacgaagcttttctaaatgtctcttgcttggcccttagcattgctgctgcagacatcagtgaagtccctttcctgcttggggtgtttggggtgtgagggtcaggaggacagtttgttcttggggtccccagacaaaactcaatgaatattttcttatagaaactggtgttagttataattcagtgctcagccattctatgagtgaagtggcatagttttctaactcctattggcatcattgtttctatgggaaagtacattccaaacttttgaaactaaatccatttgtgtgttgggaacttctgatatttccaaagactataaaactgcattgttttagaattggagggaacttggaagccctttatttcaagttcattttatatacaaggcaaagttctagaagaaacctaagtccaacttcgctggaaaaaaatgtgatcttatttaaaaaatgttttaaaactattaaaaaaatcagtgttatctataactttctttcttttaggttcctagtctcttggtttttaaagttttcaaggttctgtgatatgcaggcctaagaagtgctcatttgagaattttctaggtttttctatatgaagacttttgcatcaccaaccaatattgtatgatatatagattaagagatgaataagaatttgaatgaataagaatattggacttattggttctgctgtgccattctatctaatacagtgttgaaaatgtgttatggttgacaagtcattactttaaattgccagttattgattctgatttgatacatttaagaaaattcctaattatgtattaccttgaaactttatgtgcttttgagacatagactggtatgtaaggtgcacacaagacaaaaacatgtgctcaacagatgtagtgttatttgttttcaaaaactgatcatcaaaattatctttgtttggaactgtgaactttatttttatgtgaatttttacttgatatcttattggttataaataaaactgaaggaaatatatgtttattttaaaaaatgacacaaatttattgtcaccaaatgacataatatgattattcttgtgtttgggcactttcattttagtatttaggttttgtttattatctctctctctcctgttcaaacgtgcatcccaataggacaaaattaaaagttagcaatattactctttttcagaagacaaaatttcatattttcaatgagggtatataatctttaaaacttttatcactttaagcatcttcagcttagggtgaaaaatgtagcaaccattttctgcttctgcaaaggaatgacaagaagttaatacatgactttcaagcatgttttccacctttaacgtcttcagaattcaaatttcagaatatgacttctcagatctcaagatgcaagtatttttttgatcttaatactctttattgatatttctattaattctccattttgtttagtttttaggggttattcagtttttcagtcacctatcatcttacccagcttcatagactaaattatgccaaaaatattaaagatatattcatttagctttaaatactatgtttctattgcaaggtactgatattatatacttttgatttatgttgaacattttaatgatttctttgctgaatgaatataattagtatgctaagtattatgttttaaaaagatgccaatctgtaattttgtgtctaggtattttttgatgataaagggcatcaatattaaatgaaattttaatttagtgatttcattttcttgaaaatatttctatcagaaattcatattatacttgcattatgctgaacatgatgaaacattctcttctctttcccttggcgtgtccttattgcaacacacaccaaaatatacagatgtttaatttaaactgaaatattcctccatagaataaacagaatatctcacctatgaagagtgattacactttgtaaatttgttttaagacctttgtaattcacagcttctagctttgtgtttggtgcttgacagtactggcatatcatgcttcagaagatatttaggatatttttgaaccttgccattatatcactgagaccagaagttgatatttagactgcattttattttgggcttaaatgttaaggcatattatgactaggtctgtttttataaagtattttccttcaattactctggagtatacattgttattttaaaatgttttgaatcatgatgtagtggacatgctctaagtaggattcagtagttgagatttgctaaggagactacaagaaaccagttttcttttattattaagtgagcaagattactatgagatataattgtatattaagcaccaggattgaacatttgttacagaattgaatgagtttttctgatttctgaagaattaatttagagcccagtgtagaagagattaaagtcataggactataagccagttagctagctttgtctcatttcttgatcatacagtggattaaaaaactgaagagtaaggataaataggccctttcctaaatagagtagtgttaacagagagggttctttgggattagttctaagactagtcacttaaaaaaatgaatttgaagaggaagtatagggaaatctcttatttccttgaaatgagaagcatgttacaaactttttcaggtagaaaaatgctagttacgaatggataatataaaaagaataccacatataggaaaataagaagaaaatggcataggaagtcttcacttgcccaattggagattatttccatttttatttctgtttaagacaaagacaacaaagcttaactcttacttactatctaaagtaggcagaattattttagagatttctgtttgtatgtgaccaaaaaatcagaagaaatattggatgtcatgaggaaaaatatttgaaacaaaatacaatagactcttgtccttaagcgaaacaatgtagtagcaaactggctggaaaaccaggttttgttattgtatattcagaaagaaatacggatcaaaagaaatcaagaaaaagattagcgagtatgagtgaattcacattaatatagactacacataatgtaagactttagtgtggaaagaccaagtctgcgagtggatattatttaagtgtaaatacttatgaaaggtatatttagagtatgggcttttaattcagaagacctggatttatatccagattccaacatgtgacagctgcaagtagaccttagacctcaagtttcctcattaaaaaaataggaatgtaatatttattccatagggttgatatatatattaagcaaggttaaatttgttatgacatgagtaaaagaacatgacacagtagaatttaatacattcagcttgaattaaatatatgcccatctctttaaattatattctttttttattataaatgtatatatgggtccagtgctgattttttcttattgcttatcttcaaatgggggcattttaatactggatagctacttgctgaaaaataatattaggaggggttgtgtaggggcaagttttaaaaaattagtcccagcagatttaactgggatttgttgtcttgaaaatcctcatatatgtatatatattttttcctttctctctttctctctatatatatctatgaggaaacattctcttctctttcccttggtgtgtccttattgcaacaatcaccaaatttacagaagtttaatttaatctgaaatatatatctatatagagatgtatatctatctatctgtagaggaacatatatatatatatagaggaatatatatattttaacattatatatatttatatatatttacattctatatataatatatttacattctatatatatataaaatatgtttacattattttcctatatctctccttagtttttggcattagaagtttggtgtggcttacaacaaagcaccttaagtcaggctatccgtgttgtgatctggtcatctctgcttcctttccttcacctcggacagtgtcttaggagattagattatagacaagatagtctgtctgcatgtttcttctttattcagctctactttaccttcaattcatcagtgtggagctgggatatttcttcgcaggaatatttcctattagttctgttgtctataatggccctaagtcttatcactttaatcaaaggagaatttgatatcctttcatacgtttagagaaatttattcttgcttgaacatgaggtggttggtgtcaggttgtattctcccttattctggctcagatatcaatgtatttggcagatatttttcatactgtggcttgagcttttaggtgtttcactgtatcattgaagagtcttccacctcccattttgcattcattttagttgttttcaaaggagaagggtaaagaaaaaattgcttttatttcttcactttaacaagaattctgaattgcactttaaaaaaatgtttatatcctctactccttttatgtcaaacattttctaacatttactgagtatctaccatgtgttaagccttgtccaatgaggtttatgcaattattatctctcttgatccttaaaaatcctgtatattttcaaagttgtctcatttaaagattagaaatctgaggctcagagaagctgatagtgcagtgtcacacagtaatagagctggaattagaggctagatctatctgactgcaaagctgtgtttttttttctgttatatgtcatccagtccttgtttatacaatcacaaattttggataaatgagattttatgctgtgtttcatagttagactttctactgccaccttttggctaatttaaatttaataagcgtttctgtacattttatccacccacacatataagcaataataataataataggtcataaatttattttgatgttttgcatctgggtgtgcacagacacatactgcattggtaagatttttttctcttttggattatctgttaaagggatcaatgttaaagggtctgagtgccaccaactagaatagtccactgatacctgagaatgaacaaggtaatatttctgagatacattatttatgcaccaattaattccattcttgtttaatataccgtgtaatttatttgacattctgaattacaggaaaatatccaaagccatgataggtaaatatagcttatttattttactggaagattgtgagtggttagctggatagcaacatttggggacaaatgtcaaggttgaagaggagaatagttaggccaaattgtatggacaagaattgactgctgcagttttcttctcatgcctgggaaaatatttgcctgtttttctttttctctccattgtgtgttagagtaacaggatcttccaatatagccaaacaaaatagcatggaatgcttatacaagacttaattagtagtaatgtactgtatcactcggagattttggcagtctggctatctggcttggaggcctgctataagattttccagctttctgtttcaggaactaatatcctatggtgcttctataactctaattattatttacctgatggttagacaattttctgctggcataataatgtattcagtgttttaattcttgaattaataatatcaacaataacaacttagaagttacattgctattatagtatgttaatatttcaaatagattaaaactgtggtagaaattggcagacatatcgtggtctgaagctccaaagatgtgactcagataaaaaatgtgttgagagcagcctgtccaggtgcatcagggatggcatgggttttagatttttaaaaagcactcaatgcccataaggtaggagaccaccagtctcaaaacagtcactagagtgaatacatagtagtattcaggcagctacaaaataactgggtgtgtacttttgaaggaaagggaaacaccctagtgcttttcttatggcctgtgaaatcagagtctaaaaagttttcccctgaggcaagctatttttgaaagtgctcttgcccagagaagtgctatcaatttctcttcttattttccagttccttgggttctcattcacatatcttctcattgttgtgctcatttctgcctatcatttcataagtctattttcatagacgttcccctctttttcactacccttacatttccctatttcacttagaaaggttacctattgaaatctgtgatagccaatactggttttacacaaggacagatcccatctgttaagttaatgcttataacttgacagagaaaaactgagtgtgaatgtgggatggaagtaagagcaaatgctttggagtcacatattcgtggactgggaccctagccctcccttcacacaccctctgaataactttggacaagttagattacttctctgagtctgaattttctaaaagatgagaataacgtcttccttgaaatattggtatgagatgtaagtgagataacttatgtaaaacacagctacaacaatgattggaatatagtaagtgtgacatattgtacttatttcttcatttcttatagagtaagtatatttcctccttcccattgactttggccatgtaattatgagcagacttttagaaacattgtaaaatttctaccgggcctcttatcctgtgccttatgttacaagaagggcatgtttcatacgtgggatgtacctgcaaactgagatctagaataagaaaataatggagcgggcttgaatctgactcacagccttgagcagagacacagaagctgacctgcatccaccaacttgtaatacaacctgagaaatgaatatttatttttgtaagtcactaagattttgaggttgttatgtaccataaaaccatttcttttaccaatttttgtgttttggagctttgctgccgtcacaatgactcccgaagtcccagtggcttgaaacgacagacatttatttttcagtgatgggtttgcaggttggctgtggctctacttgtctctgtttgtttctctgtatgtcatttcagtctgtgattcaaattgaaggagcagctcctatctgggacatgctgttctccaaacagaggccaagaatacaacactatgcaggtgcattaatagttttcgtacagatatggcatttgttacatcttctcatattctgttagccaggttatatgtctaagcctggtgatgaggcaaagaaatgtatttcatctattgggaggcaaaagaagtcacatggcaaagggtgggaaaagataatttggaacataatacaacctaccacatgtgttaggcttctaagacatgttagattccttccctcttcagcacttatcttcccatttcaggattactgagcaagtataaaatatgaatacatctgggagaggtaaattagattaacttaatttcacccagggtagcaattaaatactgttcccagagcaggttccagctgagggttgcaacaaaaaagagtaaagaaatagttaaatattagaaagtggaaatgcaatttcatgaagctgtcagtttccaggattctaaaatgaagtgtctgtggcagtgacccttttcttttgactaattgcctaggttgatttttttttccctcttcagtgctctaggaatttttatgagcctctttaaagtaactgagatgccagtcaggatacttgcaatgaacagctgatatctggctgttgctcctgagtgaaaagtcctttttggccgctggagcttcttctttggattgggatctactgtattagggcatgaaagtttgtttaaaaagtgtttctatctattatataatctgccatagttccttctccctacatttatgcatgtaggtgtgggtaagagtatcttagaagatgtccggggaaaaacttaaaaactttatagaattaagaggactgtagtcctcaatgccacatttgagttcattctgtgaccttaatttctcttttgtgttctatgtctctattttcttgccagtttaaaaatatctgggtcttattttaagtaaaattgatatacgaaaggctggattaatatttagataagttagtacttttaaagttagtatcacattatgaaatttgggagagagatttactttatttatttattttaatttattattattatactttaagttttagggtacatgtgcacaatgtgcaggttagttacatatgtatacatgtgccatgctggtgtgctgcaccaattaactcatcatttagcattaggtatatctcctaatgctatccctccccactccccccaccccacaacaggccccagagtgtgatgttccccttcctgtgtccatgtgttctcattgttcaattcccacctatgagtgagaacatgcggtgtttggttttttgtccttgcgatagtttactgagaatgatgatttccaatttcatccatgtccctacaaaggacatgaactcatcattttttatggctgcatagtattccatggtgtatatgtgccacattttcttaatccagtctacattgttagacatttgggttggttccaagtctttgctattgtgaatagtgccgcaagaaacatatgtgtgcatgtgtctttatagcagcatgatttatagtcctttgggtatatacccaggaatgggatggctgggtcaaatggtatttccagttctagatccctgaggaatcgccacactgacttccacaatggttgaactagtttacagtcccaccaacagtgtaaaagtgttcctatttctccacatcctctccagcacctgtagtttcctgactttttaatgatcgccactctaactggtgtgagatggtatctcattgtggttttgatttgcatttctctgatggccagtgattatgagcatttttttcatgtgtcttttggctgcataaatgtcttcttttgagaagtgtctgtttatatccttcgcccacttgttgatggggttgtttgtttttttcttgtaaatttgtttgagttcattgtagattctggatattagccctttgtcagatgagtaggttgcgaaaattttctcccattttgtaggttgcctgttcactctgatggtagtttcttgtgctgtgcagaagctctttagtttaattagatcccatttgtcaattttggcttttgttgccattgcttttggtgttttagacatgaagtccttgcccatgcctatgtcctgaatggtaatgcctaggttttcttctagggtttttatggttttatgtctaacgtttaagtctttaatccatcttgaattgatttttgtataaggtgtaaggaagggatccaatttcagctttctacatatggctagccagttttcccagcaccatttattaaatagggaatcctttccccattgcttgtttttctcaggtttgtcaaagatcagatagttgtagatatgcggcgttatttctgagggctctgttctgttccattgatctatatctctgttttggtaccagtaccatgctgttttggttactgtagccttgtagtatagtttgaagtcaggtagcgtggtgcttccatctttgttcttttggcttaagattgacttggcaatgcgggctcttttttggttccatatgaactttaaagtagttttttccaattctgtgaagaaagtccttggtagcttgatggggatggcattgaatctataaattaccttgggcagtatggccattttcacaatattgagtcttcctacccatgagcatggagtgttcttccagttgtttgtatcctcttttatttcattgagcagtggtttgtagttctccttgaagaggtccttcacgtcccttgtaagttggattcctagatattttattctctttgaagcaattgtgaatgggagttcactcatgatatggctctctgtttgtctgttattggtgtataagaatgcttgtgatttttgcacattgattttgtatcctgagactttgctgaagttgcttatcagctaaggagattttgggctgagacaatggggttttctagatatacaatcatgtcatctgcaaacggggacaatttgacttcctcttttcctaattgaataccctttatttccttctcctgcctaattgccctggccagaacttccaacactatgttgaataggagtggtgagagagggcatccctgtcttgtgccagttttcaaagggaatgcttccagtttttgcccattcagtatgatattggctgtgggtttgtcatagatagctcttattattttgagatatgtcccatcaatacctaatttattgagagtttttattagcatgaagggttgttgaattttgtcaaaggccttttctgcatctattgagataatcatgtagtttttgtctttggttctgtttatatgctggattacatttattgatttgcgtatattgaaccagccttgcatcccagggatgaagcccacttgatcatggtggataagctttttgatgtgctgctggattcggtttgccagtattttattgaggatttttgcatcaatgttcatcaaggatattggtctaaaattctcttttttgtttgtgtctctgcccgactttggtatcaggatgatgctgtcctcataaaatgagttagggaggatttcctctttttctattgattggaatagtttcagaaggaatggtaccagttcctccttgtacctctggtagaattcggctgtgaatccatctggtccctcttttggttggtaagctattgattattgccacaatttcagagcctgttatgggtctattcaaagattcaacttcttcctggtttagtcttgggagggtgtatgtgttgaggaatttatccatttcttctagattttctagtttgtttgcgtagaggtgtttgtagtattctctgatggtagtttgtatttctgtgggatcggtggtgatatcccctttatcactttttattgagtctatttgattcttctttctttttttctttattagtcttgctagtggtctatcaattttgttgatcctttcaaaaaaccagctcctggattcattaattttttgaagtgttttttgtgtctctatttccttcagttttgctctgatcttagttatttcttgccttctgctagcttttgaatgtgtttgctcttgcttttctagttcttttaattgtgatgttagggtgtcaattttagatctttcctgctttctcttgtgggcatttagtgctataaatttccctctacacactgctttgaatgtgtcccagagattctggtatgttgtgtctttgttctcgttggtttcaaagaacatctttatttcagccttcgtttccttatgtacccagtagtcattcaggagcaggttgttcagtttccatgtagttgagtggttttgagtgagtttcttaatcctgagttctagtttgattgcactgtgatctgagagatagtttgttataatttctgttcttttacatttgctgaggagagctttacttccaagtatgtggtcaattttggaataggtgtggtgtggtgctgaaaaaaaatgtatattctgttgatttgggatggagagtcctgtagatgtctattaggtccacttggtgcagagctgagttcaattcctggatatccttgttaactttttgtgttgttgatctgtctaatgttgacagtggggtgttaaagtctcccattattattgtgtgggagtctaagtctctttgtaggtctctaaggacttgctttatgaatctgggtgctcctgtattgggtgcatgtatatttaggatagttagctcttcttgttgaattgatctctttagcattatgtaatggccttctttgtctcttttgatctttgttggtttaaagtctggtttatcagagactaggattgcaacccatgcctttttttgctttccatttgcttggtagatcttccttcatccttttattttgagcctatgtgtgtctccgcacgtgggatgggtttcctgaatacagcacactgatgggtcttgactctttatccaacttgccagtctgtgtcttttaattggagcatttagtccatttacatttaaagttattattgttatgtgtgaatttgatcgtgtcattatgatgttagctggttattttgctcgttagttgatgcagtttcttcctagtctcgatggtccttacattttggcatgattttgcagtggctggtactggttgttcctttccatgtttagtgcttccttcaggagctcttttagggcaggcctggtgatgacaaaatctctcagcatttgcttctctgtaaaggattttatttctccttcacttatgaagcttagtttggctggatatgaaattctgggttgaaaattcttttctttaagaatattgaatattggctcccactgtcttctgggttgtagagttcctgccaagagatccgctgttagtctgatgggcttccctttgtgggtaacccgacctttctctgtggctgcccttaacattttttccttcatttcaactttggtgaatctgacaattatgtgtcttggagttgctcttcttgaggagtatctttgtggcgttctctgtatttcctgaatgtgaatgttggcctgccttgctagattggggaagttctcctggataatatcctgcagagtgttttccaacttggttccattcttcctgtcactttcaggtacacgaatcagacgtagatttggtcttttcacatagtcccatatttcttggaggctttgttcatttgttcttattctttttttctctaaacttctcttctcgcttcatttcattcgtttcatcttccatcactgataccctttcttccagttgatcacatcggctcctgaggcttctgcattcttcacatagttctcgagccttggctttcagctccatcagctcctttaagcacttctctgtattggttcttctagttatacattcgtctaaatttttttcaaagtttttaacttctttgcctttggtttgagtttcctcctgtagctcggagtagtttgatcatctgaagccttctcttaactcgtcaaagtaattctccatccagctttgttccgttgctggtgaggaactgcattcctttggaggagaagaggcgctctgctttttagagtttccagtttttctgctctgtttttttccccatctttgtggttttatctacttttggtctttgatgatggtgatgtacagatgggtttttggtgtagatgtcctttctgtttgttagtgttctttctaacagacaggaccctcagctgcaggtctgttggagtttgctagaggtccactcctgaccctgtttgcctgggtatcagcagtggtggcagcagaacagtggattttcgtgaatcgcgaatgctgctgtctgatcgttcctctggaagttttgtctcagaggagtacccggccgtgtgaggtgtccgtctgcccctactgggggtgcctcccagttaggctgctcggggttcaggggtcagggacccacttgaggaggcagtctgtccattctcagatctccagctgcatgctgggagaaccactgctctcttcaaagctgtcagacagggacatttaagtctgcagaggttactgctgtcttttcgtttgtcggtgccctgcccccagaggtggagcctacagaggcagggaggcctccttgagctgtggtaggctccacccagttcgagcttcccggctgctttgtttacctaagcaagcctgggcaatggcggggcacccctcccccagcctcgctgccaccttgcagtttgatctcacactgctgtgctagcaatcagcgagactccgtgggcgtagaaccctctgagccaggtgctggatataatctcctggtgtgccgttttttaagcccatcggaaaagcacagtattagggtgggagtgacctgattttccaggtgccgtccatcacccctttctttgactgggaaagggaactccctgaccccttgcgcttcccgagtgaggccatgcctcgccctgcttcggctcgcgcatgttgtgctgcacccactgtcctacgcccactgtctggcactccctagtgagatgaacctggtacctcagatggaaatgcagaaatcacctgtcttctacgtcgctaatgctgggagctgtagaccagagctgttcctatttggccatcttggctcggcccgaggtttactttaagaagtttaacctggtgaatagaatttggaagacacggttaataaacaagttgatggctagccatatgcagaagatagaaacaacccctgtatctcaccatatagaagaattaactcaaaatggattaaagacttaactataagacctgaatctataaaaattctggaagaaaacttaggaaacacatttctcatcattggcctaggcaaagaattcatgactatgacctcaaaagcaaatgcaacaaaaacaaaaactgacaagtggaacttaattaaactaaagagcttctatacagcaaaagaaacaatcaacagattaaacagacaacctacagaattggagaaaatatttgcaaagtatgcatctaacaaaaaacatatccagaatctatgacgaatttacacaaatcaacaagaataaaacaaataactgcattaaaatttgggcaaaggacatgaacagacacttcccaaaagaagacatgtaagtggccaaaaaatacatgaaaaaatgctcaacaacactaattcatcagagaaatgcaaattaaaaaccacaatgagttagcatctcacaccagtcaaaattgctattaaaaagtcaaaaataacagatgttggtgaggacgtggataaaagggaacacttatgtactgttggtgggaatgtaaattaacctctatggaaaacagtatggaaatttctcaaataactaaaaataaaactaccgttatctgacccagcaatctcgctagtaggtttctacccaaaggaaaagaaatcattttatcaaaaagacacctgtactcatctgtttactgcagcactattcacaaatggcagtcactgaatcaacttaagtgtccatcagtggttgattggataaagaaaatgtggtgtatatatatatatatcatagaatactactgagccataaaaaagaatgaaatcatgtcctttgcagcaacatcaatggaactagatggaagccattatgctaagttaaataactcagaaacaggaatactgcatgtttttgtgtataatcaggatcaaaatgatgagtacatgtggatacaaagatggaaataatagacaccaggaactccaaaagggagagggttggagagaggcaagggttgaaaaattacccattgggtacaatgtttactgtttgagtgacaaagtcaacaggatcccaaacgtcaccattatgcaatatactcaggtgacaaatctgcacatgtaccccctgaattaaaaaaaaaattggatttttattctagccactgaaaatgaaagttcatttatgtttttttcttctttgatctccactttctcaaaatctgctaagtggggatcaatagcctttctctctttcttactgggacatgtactagtggatttgaaagcgctttgctttcagaagaaaggtataagaggagtactgttagtgacataagtagaaaggagaggtctgctcagatatgaatagtatatactttggatagcaaatttactcttctttccagcttttgaaggataatgacttatgttcatgaattgagtttgagaaatagaggttttttgaaaggcagatacatttgttttgccatgaaacaattattgaacaaatcactgttgtattttcgaaaataaattaaagggtataagtacagcttatttacgttttttttgtgttgaaaatagttgccagtgtttgaagtagacaagatataaaatatgatgtggcacacagcacagcaaatatttcctttgatctatcatgggaatgtgttcatattaatttcttagctatgatttttctggataaagtttgtttgcgtaaggattttccatttttaacttcagtagacatattacagagctctggatattcagagaactcttctaggctttgtaggggtaattaaaataaataagacaagtcttctcccctcaatgagcttatagcctagtgaagaagacaataggtattatataaattattgtaatataaagcaaaacttgtctgtctaagcaaagtataaagcgcatgctatcattatgctaaagaataagagattaactccaattgggagagttaactttcaggagggcttcgtggaggaagtagcattttgtatttaacaggtagagttgaaggggaatgacgttccacttgctttgaggaaggaacataaataaagccctgaagggagggaaatgcagcctattttgaggaagcagtgaacaatcttatttggcagaattgttgtctgtcttcaagatgaagctgtgaaggaaaatttggccacatttatgaaagcctttaacaggacggtaaagatttcaggctttatgtgtaggactgctgtggagccaaacagactttgaacatactagtgacatgatcatatttatatttaaggaagataactggaaagattatggatggggcgagcaatgaatagacagaagatattagaattaaaggtatcaattaggctgtttagaagtttagttgagaggcagtaaggggttagtcaagggcagtgagagaatagaaagtagttaaatttgagaatcattttggaaatggcataaataatgacaaatatttcatttggaaatgaacctagtgacagattagttttcagactcaatatgcattttgtagatatactttagaggattgggcaaccagttattcaggaatacttttaatgaactgttttaaataatctcatcatagtgacagttatattttcttgatctttgatgcccatgtatctgatgtggccatgggtttaagtcctaacattgggtgtaatatatatagatgttaaatgtataggttatatgtaagaagtattgaaactgcattgctagcatgtctggctcttcctaagctcatatgagaatgaaagcaaaagtactattttgagtggttataatgatgtcttgattgtaaaattttatattttcaaagaattttcattctatcatcacattcctctcttacatcaactctgacacaatggggttttctagatatacaatcatgtcgtctgcaaacggggacaatttgacttcctcttttcctannnnnnnnnnnnnnnnnnnnnnnnnnnnnnnnnnnnnnnnnnnnnnnnnnnnnnnnnnnnnnnnnnnnnnnnnnnnnnnnnnnnnnnnnnnnnnnnnnnnnnnnnnnnnnnnnnnnnnnnnnnnnnnnnnnnnnnnnnnnnnnnnnnnnnnnnnnnnnnnnnnnnnnnnnnnnnnnnnnnnnnnnnnnnnnnnnnnnnnnnnnnnnnnnnnnnnnnnnnnnnnnnnnnnnnnnnnnnnnnnnnnnnnnnnnnnnnnnnnnnnnnnnnnnnnnnnnnnnnnnnnnnnnnnnnnnnnnnnnnnnnnnnnnnnnnnnnnnnnnnnnnnnnnnnttttttggttgtgtctctgcccgactttggtatcagaatgatgctgtcctcataaaatgagttagggaggattccctctttttctattgattggaatagtttcagaaggaatggtaccagttcctccttgtacctctggtagaattcggctgtgaatccatctggtcctggactctttttggttggtaagctattgattattgccacaatttcagatcctgttattggtctattcagagattcaacttcttcctggtttagtcttgggagagtgtatgtgtcgaggaatttatccatttcttctagattttctagtttgtttgcgtagaggtgtttgtagtattctctgatggtagtttgtatttctgtgggatcggtggtgatatcccctttatcattttttattgcgtctatttgattcattgtctcagcccaaaatctccttaagctcataagcaacttcagcaaagtctcaggatacaaaatcgatgtacaaaaatcacaagcattcttatacaccaacaacagacaaacagaaagacaaatcatgagtgaactcccattcacaattgcttcaaagagaataaaatacctaggaatccaacttacaagggatgtgaaggacctcttcaaggagaactacaaaccactgctcaatgaaataaaagaggatacaaacaaatggaagaacactccatgctcatgggtaggaagaatcaatatcgtgaaaatggccatactgcccaaggtaatttacagattcaatgccatccccatcaagctaccaatgcctttcttcacagaattggaaaaaactactttaaagttcatatggaaccaaaaaagagcccgcattgccaagtcaatccaaagccaaaagaacaaagctggaggcatcacactacctgccttcaaactatactacaaggctacagtaaccaaaacagcatggtactggtaccaaaacagagatatagatcaatggaacagaacagagccctcagaaataacgccgcatatctacaactatctgatctttgacaaacctgagaaaaacaagcaatggggaaaggattccctatttaataaatggtgctgggaaaactggctagccatatgtagaaaggtgaaactggatcccttccttacaccttatacaaaaatcaattcaagatggattaaagacttaaacgttagacctaaaaccataaaaaccctagaagaaaacctaggcaataccattcaggacataggcatgggcaaggacttcatgtctaaaacaccaaaagcaatggcaacaaaagccaaaattgacaaatgggatctaattaaactaaagagcttctgtacagcaaaagaaactaccatcagagtgaacaggcaacctacaaaatgggagaaaatttttgcaacctactcatctgacaaagggctaatatccagaatctacaatgaactcaaataaatttacaagaaaaaaacaaacaaccccatcaaaaagtgggcaaaggacatgaacagacacttctcaaaagaagacatttatgcagccaaaaaacacatgaaaaaatgctcataatcactggccatcagagaaatgcaaatcaaaaccacaatgagataccatctcacaccagttaaagtggcgatcattaaaaagtcaggaaacaacaggtgctggagaggatgtggagaaataggaacacttttacactgttggtgggactgtaaactagttcaaccattgtggaagtcagtgtggcgattcctcagggatctagaactagaaataccatttgacccagccatcccattactgggtatatacccaaaggactataaatcatgctgctataaagacacatgcacacgtatgtttattgtggcactgttcacaatagcaaagacttggaaccaacccaagtgtccaacaatgatagactggattaagaaaatgtggcgcatatacaccatggaatactatgcagccataaaaaatgatgagttcatgtcctttgtagggacatggatgaaattggaaatcatcattctcagtaaactatcgcaagcacaaaaagccaaacaccgcatattctcactcataggtggcaattgaacaatgagaacacatggacacaggaagggaaacatcacactctggggactgttgtggggtggggggaggggggagggatagcattgggagatatacctaatgctagatgacgagttagtgggtgcagcgcaccagtgtggcacatgtatacctatgtaactaacctgcacaatgtgcacatgtaccctaaaacttaaagtataataataaaagaaaaaaaaaactctgacacaataaatattatatattatctattttataagtctgggaaaactgagaaaccataatattagtgacatttcagaggttacacagttagctaatagcagggaaagcaagatcatgcacttctttgggctagtggcaactattatgtaccaatgttactctgcttttaccagttttcttttgggctgacctacttttagtgaaataactgcatagatatcacagataactcctccgttgtctctaattcatttaaagaacatgtaacaatatgtacatggtggtattatttttttaaacacctttttttttttttttttgagccagggacttgcgctgttgcccaggctggagggcagtgttatgatcccggctcactgcagccttgaccatctgggctgaagcgattctctcacctcagcctcctgactagctggaactacaaaaatgtgctatcatgtttggctaatttaaaataatttttttgtagagacggaggtctcactgttgttgcccaggctggtctcaaactcctgtgctcaagcaattctcccgcattggcctcccaaagtgctgggattacaggtgtaatcccaacagtttgcagtcttacatttagatggatttttgcttttacattaaaaatcttgtgtgcctattaagaatgtaaaactcaattggatttgagtctcatcttttttatttgtggaataagaatcattcctttatatatgtcggcattgtgttttactgtaatgttctagtggtgttcttgtttgaatcacagttcaagtaatgccaagaactgtgatttcaacatcttctcagcaacattactctgtgcggagatgattcttccccttacatcgtttgctggtttgtttgtttgtttatttatttattgagatggagtcttgctctgtcgcccaggctggagtgcagtggcaccatctcagctcactgcaacctccgcctcccgggttcaagcaattctcttgtttcagcctcccaggtagctgggattacaggcacatgccactttgcccggctaatttctgtatttttagtagagatggagtttcaccatgttggccaggctggtctcaaacttctgacctcaagtgatccgcccgccttggcctcccaaagtgctgggattacaggcctgagccactgtgcccggcccccttccactgttttactttatcccctgtgtccctctcttttgagtgtgtgagtgctttaaagtcctataattttgttttatttctttttaaattatctctttctctcataagcttgtgtacattttcttagttacattttagtttgggatcagaaaaaaccaccacatactactgccagttgacctcctgagtgtgaagttgcacatatgcttctttttgtctctatcactttctaacctaacaatgtgttgtagaaactagaaactagaaagtgagtttttctttcagtatgtagagtgttactgatttacttttttcaggttgtctcattgcttcctttccatatgtttcctttctagattgcatatacatttcaaggaactgacttatttggtactgatgttgagactattgattttactcacagtactcccagagtcattcccttcttctggaccctgattactcaggcagtggttataaaagtgcattttcagatacttttgttattttcctttacttatcaccagtgacttgcatttatttacttgagttttttacattcatgatcaagcaggctttaaggccctgtgccagaagttgtcaaattttcttggttcacagtgtctttagtgtgtcagtaattttttcacagtgactttggtccaaaagaaatacctaacagtttactttactacatggttgggataaaaaaaaacttcaatatttatatactaataacttagtagctctttgaagaaataatacagatatattgaagccaaaagcactactttaattttattcttaaataatcacaattattaatgagatgtgtgtgcttcttgagcactgcacacttttcagacactgcaaacagattgaatgttgctgtcctcatttcctgttccacatggattttagcatagttgctttttatcacaggaaccactgaaaacccagctttgcaaagatgtgatgtcatagagatgaatgtggtgtgatgtaatgttgaaaccgtaaactgatttgtgtttgcggttcactaagtgatcaacaaatgtcatgtgttactatttctcttaaaaagttaagatatcccacagtacttctgtgacttctttatggtgtcttggggtgccttgatacacaatttgggacatatagcccttagtactcttttcttgtctaccttgacaccacattttctggtgtacatcaagtgtttggaagatggtaggttttggttggtttctattgtccttaggcaaatgtctgattcatggaagttgggacaaaaaaagaacatatatacaatctgctgttctgaaataagacattttaaagtgtaatactttgtttagttatgtcttgccatgcttattgctttcctcttgaatgaattctgatgactgtaagacactgaaatgggcttgtcagagccatagttcaaaaccttaatctccttccttttgtttttaatgtgtggaactcatcttagacatctgctctaagaaaaacaattagagaaattatgatgcagtggtctcatcctgcatgttattttgcaacttggctagctcctgcgcttttaagtttcagtagcttaatagtcttatttcaaggtaaacactgtgaggcaagtgtagcttaagtttcttgtcattagtttgactgagtcaccttgctctgattcaccactgcagacaaccaaatagggaataagaattcagtgggtggatgcaaggggcaacatctgctttgccagcattctactcactgaatatctatttgtagaattcaggtactacattaaaaaaaacaaaaacaaaaacaaaaacaaaacaggtaaagcctgggaatataaaaaacatctcctttagagaaagttttgatacattgcaattctgttttgacttggctggaatttttcttgcttaaaaaaattggtttaatcctccctagagtgttaagtgctaagtcaatattttgctaattatgcagaaggagcaccagatggtttctgaggatgacactctatgggtgggagcactgatgactgaaactgtggtaaactttgtagctctgtaatcatcctcatctatagaatacatccatgtgcttttgaaacagaagaacaaacaattaaacaatatttttaaggtaaaaaatacttttccctccaaagagtgagtttaggttgcttgtaaactgtcattcagtaagaagtcgtcaattagaatgaagctcctcttttaactatcagagaaatatgtttatatatatttccttggaaacttagttttttcgtcttagtatccttcccttttccccaacgataatttcaaattgcaagctgattttttttattcaacaagatcaggttattgagataaaaaatgttgggggttttattatatttgccttcagttagcctgcaagaaggattggttgctctcctctatcacccactccccaatcagtttacccacatggaaaatggagaataaaaattaattactatgctagaaatgtctctgtaatggactccaaatctaaagcaatgatggtaccaatctccaggatgtacatataacaacaattatgacaatgtagtaagctcagcataacctacctttcagcgtatcttattggaagcaagagccagggtattaataatcataatttaacataaaaagatggattattttaaaaatagactttgataagtaaattgatatactatacaatgaaatatttctttttaccaaataggttaactaaattgcccttgctttaaaaatgtggtgtaatcaaaatttattgaagactctatactaaggtagtgcatagatttataaaaggaaaaagaaaataacccttaagaggctttgtaatctgaagaaatgatactgaaacaatttaagagttgccccattcatgtaggccaggatcagatgctgaattaatacaagttgaagggaaaaaaaatagggcggtatagaattaagataaataggccattgactccaactagttcagaatgataaacttttcttgatttgaaaaaggaagtaaatgagtaaaactacctgtatgtttaaatgtaaattcaggagcttgtattctttgaagtgcacaaacaaatggggtggaatcatgatgcaatgtaccaatttgtgaattaacagtttctgaattttgagagtggcaaccttttccttcctcagacgtcattcatttctgtttgttttgatatgacattagattggtaaatctttcacatgcttcattatatagaaatgaggtctgtagatattgaattatcttaaaagacagatataagattaactgaaatgaaagagatattcgtaaaagccacgataaagttagatttcaagagcattaaaatgaaatgtccagtaaaaatgatatctagagtgttgttatgtttattgagttgtgtttacagagaaaggagttaagctgaaataatctgcttgattcaacctattttatagcaaccattttacttttgcataaatggataaatattcccaaagtgtatgtttgccagaaagtgggcaaagttagctggaagaaagagctgtttattgctcaatatgcccgattaaaataaaatttaaaaactattaaaaatttaaaaagggagtatattttctgtggacctgtctgggcataatcatgactcgttctcctgtcatttgtatgaacttattctatagtgtttactctggtatttattagcacagtactaaaatacctttcatctttttttgtccaacaatattttgtagtatatttgaaaaacagcatgttatattaaaggtgtttccattatgcttagaccaccatcccagaaatatcaatcccaacactttatttttagatttagtcagttgtactgactcgagggaaatgtaaaagatgcttgcaattaatatactgtgcatattgtagcataaatagcattaactgtgcatagtataaatatcttaaaaataaagctttgccagataacctttatatcattattaagaaggttaaataatatgtgtcaagatctgtgaggacttctctgaaatttatttctgaaataaatttatttaattgaatatatatggtataaatatataaattcaattaaataaatgcaattaaataaatacacatatatggtaaacatttctaaaggtacaaaaggtatagagtaaaaaacaggtctcctgtttatttcctgcaagttcctcagttctcaggttctctccctggaagccatgtctattaccagtttttaatgtatttatcaaaatatgttctgtgaaattttttctttttatttaattgttatgtctttattggtacatatttgcatatatttatggagtatacatgttattttcttataagcctagagtgtataatgatcatgtcggggtatttaggactcatcactttaagtatttatcatttctatgtgttgggaacatttcaagtcctctcttccagctattttgatataatacattgttgttaatgatagtcatcctactctgctattgaacatagaacttttcccttctatctaactataggtttgtactcattaaccaacctttcctcatctcccaccctcctacccacacatcattcctaacctcgggtctatactctctctccatgatcatgaccacattttttttttacctctcatgtatgcgggagaacatgcagtatttttctttctgtgcctggcttatctcacttaacataatgacctccagttccacccatgttgcagaaaatgacatgatttattttgtttatggccaaatagtattccattgtgtatatagaccatattttctgacactgaggttgattttatgactttgctacagtgaatagtgctgcagtaaacatggaggtgtaggtatctctttgatatactgatttcctttcctttggataaatacctagtagctggattgctggatgctatggtagttctgttttttgctttttgagaactctccagttagaaaagttttcttttctccacatcctcctcactggcatctgttatttttttgtctttttagtagtagccattctagctgcagtaagatgatatttcattgtgattttgatttgtattttcttgatgattagtgatgttgaacattttttcatgtctgttggctgattttatgttttcttttgagaatttattatttatgtattcatgtcctttgcctactttttaatagaattagttgtccttttttttaatagttgagttgttttagtttcttgtaaattctggatgttggtccattgtcagattactagtttacaaatattttctcccattccacgtattgtctcttcactctgttcattgtttcctttgctgtgcagaagctttttggtgtagtatagtcacttttgtctatttttgttttcatttccattgcttttgaagtcttagccataaaatctttgcctagacctatgtcttgaagtatttctcctagtagttttatagtttcaggtctatgtttaagtctttaattcatcttgagttgattttagtctcatttcattcttttgcatatggatatccaattttcccagcatcatttctagaagagggtgtcttttccccaatgtatgttcttggcacctttgtcaaaaatcagttggctgtaaatatgtgggtttatttctgggttctctgtattgttccatttgtctatgtctgttttgatatcaataccatgttgttctgttttatatagccttgtaatgtattttgaagtcagatagcattatgccttgagcttttttctttttgcttagtattggtttggctatttgggccctttttttagtttcataaaaattttaggagtgtttccttctatttctgtgaaaaaatgacattggtattttgatagggattgcattgactctacaggttgctttggttagtatggttattgtattagtcttttcttatacagctgtaaagaaatacctgaaattgggaaatctacaaagaaaagagatttaatcaggtcacaggtttgcaggctatacaggcttctgcttctggggaggcttcaggaagcttacaatcatggtggaagggcaaaggggaagcaggcacatctccacatggctgtcaggaggaagagtgagtaagaagggagaggtgctacacacttttattttattgtatttattattattattatttttgagacagagtttctctccgttatcttggctggagtgcaatggtatgatcttggctcattgcaacctctgccttcttggctcaagtgattctcatgccccagcctcctgagtagctgggattacaggtattcgccaccatgcctggctactttttgtatttttagtagagacagggtttcaccatgttgaccaggctggtcttgaactcctgacctcaagtgatctgcccgccttggcctcccaaagttctgggattatgggtgtgagctaccatgcctggctgtgttacacacttttaaacaagcagatctcaggagaactctaccacaagaacatcaagggggaaatccatccccatgatttagtcatctcccaccagctccctcctccaacactggggagtacaattcgacatgagatttggttgggggcacagaaccaaaccatatcatcctgcccttggcccctgccaaatctcatgtccttctcacattttaaaacacaatcatgccttcttagcagtaccccaagtcttaactcatttcagcattaactcaaaactccaggtccaaagtctgatctgagacaaggcaagtcccttccacctatgagcctgtaaaataagaaacaagttagttacttccaagatacaatgggggtataggcattggggaaatactccctttccaaaagggagaaattggcaaaaacaaagggccccatgcaagtctgaaacccagcagagcagtcattaaaccttaaagctccaaaataatctccttcaactccttgtctctcattcaggccacagtgatgcgatgggtaggctcccaagaccttgggcagctccacccctgtggtgcaggatatagcccctgtagctgctttgatggactggtgttgagtgcctgtggcttttccaggtgcacaatgcaagttgttggtggatctaccattctagggtctagagtacagtggcccccttctcacatctctactaggccatgccccagcagggactctgtgtggggcttccaaccctacattttgcatccatgctgccctagtagaggttctccatgaatgctctgaacctgcagcatacttctgcctggacatccagttgtttccatacatcctctgaaatccaggcagaggctcccaagcctcaactcttgccctctgcccacctgcaggcttaacaccttggtggctcccagcttgcaccctctgaagcagtggtctgagatgtatctggagcctttttagccatggctggagctggagctggggcagctgggatgccatgtcctgaggctgcatagagcagtcggggccctgagtatggctcacagaaccatttttcccttctaggcatccaggtgtttgatggtagaggctgccatgaaggtctctaaaatgccttggagacatttttcccattgtcttggctgttaacattcagatcctcttaacttatgcaaattcctgcagctggcttgaattcctccccaggaaatgttttttttcttttctaccacatggccaggctgcaaatttttcaaacttttccactttgcttccattttaaatataaattccagtttcagattatgtctttgctcatgagtataaacatatgccgttggaagcagccaggccacatcttgaatgctttgctgcttagaattttcttctgccagataccctaagtcatctctctcaagttcaaagttcaggcaggggcaaaatgccaccagtctctttgctaaagcatagcaagagtgacctttgctccagttcccaataagttcctcatctccatctgagaccacctcagcctggacttcactgtccatatgactatcagcattttggccacaaccattcaacaagtctctagaaagttccaaatgttccctcatctttctaccttcctctgagccctccaaactgttgcaacctttgcccattccccagttctgcagctgcttccacattttcaagtatctttatagaaatgtcccacttttcctttttgcaaatttctatattagtttattctctaattgctgtaaagaaatacctgaaactgggtaataaagatgtttaattggctcatggtttctgtgggctgtacaggattttgcttctggggaggtctcaggaaacttataattatggtggaaagtgaaggggaagcaggaacatcttcccatggccagcaggagccagtggaggtgctacacacttttaaacaagtagatctggggagaactctattacaagaacagcatggggacatctgcttccatgattcagttgcctcccaccaggccttttctccaacattggggattaggattcaacatgagattttgggcggggggcaggggacgcagagccaaaccatatctgttattttaacaatattaatttttccagtccatgagcatgggatgtctttctatttttttgtgtcctcttcattttttttttccatcagtggtttacagttttccttgtagaggtctttatccttgattaaatttatttcgaagtttttttttgtagctattgtaaataggattgccctcttgatttctttctcagctaatttattattggtgcatagaattacttcagatttttatatgtattttgtatcctgaaacttcactgaacttgttggtcagatgtaagagtttttggtggagtcttaagatttttctagatataagattatgtcctctgcaaagagggacaatttgacttcttttccaatttgtatgccttttattcctttttcttgcctaattgttctggctaggactttcagtattatgttgaataggagtggtgaaaagtaggcattcttgtcttgttctagttattagaggaaagtcctatagatctattcatatttgctttatatatttgggggctctggtattgagtgcatgtaagcttatttatttatttatttatttatttatttatttatttatttttgagatggagtttcactctgttgcccaggctggagtgcagtggtgcaatctcagctcactgcaagctccgcctcctgggttcatgcaattctcctgcctcaacctcccgagtagctgggactacaggcacccaccaccatgcctggctaatttttgtatttttagtacagacggagtttcaccttgttagccaggatggtttcaatctcctgacctcgtgatctgcccaccttggcctcccaaagtgctgggattacaggggtgagccaccgtgcccaaccgataaatttagaattcttacatcctcttgctgagttgttccctttatcattatataatgacattttcatctctttttacttactgtttttgacataaagtctgtgttatctgacataagtatagctactcctgctgacttttggtattcctttgtgtggaatatcttttccattcctttactttcagtcgctctgtgtcttcacaggtgacatgagtttcctgtagacagcatatacttgggctatattttgtattcattcaaccagtctatatatttttagtagaaagtttaatccttttacattaaaggttattattgatatgtgaaggcttattcctgtcattttatgaattgatttctgtttgctttgcctacaatttgttcctttctttctctcttatttaacattgtggtttggtaattttctgtagtggtaacatttgaattctttctcttatttatgtgtttgctctaccagttttatactttcatgttttttttttttcatgatggtagatgttgtcttatcacttccaggggtagaactccataagcatttcttgtagagcttgtcctgtggtgatgaattccctcagtttttgcttatctagaaaagactttatttctctttcatttatgaaggataactttgctgggtattgtatatttagtggcagttttatttttctcttaacattttgaatatattatcccattctgtcctggcctgtaagatttctgctgataaatctgctattagtttgacgggggtgcttttctaagttactgggcacttttctcttgctgttttaattctctctttaacttttgacagtttgactataatgtaccgtggagaagacctttttaacttgcatctctctggggatctctgagcttctcatatctggatgtctaattctcttgctagatgtggggagtttttagctatgaattggttaaataggttttctatcctgtttgttttcttgtcaccttctgagacactgaaaatttgaatattaggtcactttatggtgtcccacagatcacatagtcttccttcattcttaaaagttctttttttctttattttaatctgacttggttatttcaaaagacctgccttcaagttctgaaatttgttcttctacttgatatagtgtatgatcgaagctttcaaatgtattttttatttcatttaatgaattcctcagttacagaatttttttaatgatatttatctctttggcaaatttctcatttctctcctgaattgtttttctggatttttttttattattatacttaaattttagggtacatgttaacaacgtgcaggtttgttacatatgtatacatgtgtcatgttggtgtgctgcacccattaactcatcatttaacattaggtatatctcctaatgctatccctccccactccctccaccccacaacaggcccagtgtgtgatgttccacttcctgtgtccatgtgttctcattgttcaattcccacctatgagtgagaacatgtggtgtttggttttttgtccttgcagtagtttgctgagaatgatggtttccagcctcatccatgtccctacaaaggacatgaactcatcattttttatggctgcatagtattccatggtatatatgtgccacattttcttaatccagtctatcattgttggacattaggcttggttccaagtctttgctattgtgaatagtgccgcaataaacatacgtgtgcatgtgtctttatagcagcatgttttataatcctttgggtatatacccagtaacgggatggctgggtcaaatggtatttctagttctagatccctgaggaatcgccacactgacttccacaatggttgaactagtttacagtcccaccaacagtgtaaaagtgtttctatttctgcacatcctctccagcacctgttgtttcctgacttttcaatgattgccattctaactggtgtaagatggtatctcattgtggttttgatttgcatttctctgatggccagtgatgatgagcatttgttcatgtgtcttttggctgcataaatgtcttcttttgagaagtgtctgttcatatcctttgcccaattttttgatggggttgtttgtttttttcttgtaaatttgtttgagttctttctagatcctggatattagccctttgtcagatgagtagattgcaaaaattttctcccattctgtaggttgcctgttcactctgatgataatttcttttgctgtgcagaagctctttagtttaattagatcccatttgtcaattttggcttttgttgccattgcatttggtgttttagacacgaagttcttgcccatgcctatgtcctgaatggtattgcctaggttttcttctagggtttttatggttttaggtctaacatttaagtctttaatccatcttgaattaatttttatataaggtgtaaggaagggatccagtttaagctttctacatatggctagccagttttcccagcaccatttattaaatagggaatcctttccccatttcctatttttgtcaggtttgtcaaagatcagatagttgtagatatgtggcattatttctgagagctctgttctgttccattggtctatatctctgttttggtaccagtaccatgctgttttggttactgtagccttgtggtatagtttgaagtcaggtagcgtggtgcttccatctttgttcttttggcttaggattgacttggcaatgtgggctcttttttggttccatatgaactttaaagtagttttttccaattctgtgaagaaagtccttggtagcttgatggggatagcattgaatctataaattaccttgggcagtatggccattttcacaatattgattcttcctacccatgagcatggaatgttcttccatttgtttgtatcctcttttatttcattgagcagtggattgtggttctccttgatgaggtccttcacatccctcgtgagttggattcctagatatttcattctctttgaagcaattgtgaatgggagttcactcatggtttggctctctgtttgtttgttattggtatataagaatgcttgtgatttttgcacattgattttgtatcctgagactttgctgaagttgcttatcagctaaggagactttgggcttagaagatggggtttctagatatacaatcatgtcatctgcaaacagggacaatctgacttcctcttttcctaattgaataccctttatttccttctcctgcctgattgccctggctagaacttccaacactacgttgaataggagtggtgggagagggcatccctgtcttgtgccagttttcgaagggaatgcttccagtttttgcctattcactatgatattggctgtgggtttctcatagatagctcttattattttgagatatgtcccatgaataccctaatttattgagagtttttagcatgaagagttgctgaattttgtcaaaggccttttctgcatctattgaggtaatcatttggtttttgtcattggttctgtttatatgctggattccgtttattgatttgcgcatgttgaaccagccttgcatcccagggatgaagcccacttgatcatggtggataagctttttgatgtgctgctggatttggttttccagtattttattcaggatttttgcattgatgttcatcagggatattggtctaaaattctctttttttgttgtgtctctgccaggctttggtatcaggatgatgctggcctcataaaatgagttagggaggattccctctttttctattgattggaatagtttcagaaggaatggtaccagttcctccttgtacctctagtagaattcggctgtgactccgtctggtcctggactttttttggttggtaagctattaattattgcctcaatttcagagcctgttattggtctattcagagattcaacttcttcctggtttagtgttgggagggtgtatgtgtcgaggaatttatccatttcttctagattttctagtttatttgcatagaggtgttgatagtattctctgatggtagtttgtatttctgtgggatcggtggtgatattccttttatcgttttttattgcgtctatttgattcttctctcttttcttctttattagtcttgctaacagtttatcaatttcgttgatcttttcaaaaaaccagctcctggattcattgattttttgaagggttgtttggtgtctcaatctctttcagttctgctctgatcttagttatttcttgccttctgctagcttttgaatgtgttttctcttgcttccctagttcttttaattgtgatgttagggtgttaattttagatctttcctgctttctcttgtgggcatttagtgctataaatttccctctacacactgctttgaatgtgtcccagagattctggtatgttgtgtctttgttctcgttggtttcaaagaacatctttatttcaaccttcgtttcgttatgtacccagtagtcattcaggagcaggttgttcagtttccatgtggttgagtggttttgagtgagtttcttaatcctgagttctagtttgattgcactgtggtctgagagacagtttgttataatttctgttcttttacatttgctgcggagtgctttacttccaactatgtggtcaattttggaataggtgtgagtggtgctgaaaagcatgtatattctgttgatttggggtggagagttctgtagatgtctattaagtctgcttggtgcagagctgagttcaattcctggatgtgcttgttaactttctgtctcgttgatctgtctaatgttgacagtggggtgttaaaatctcccattattattgtgtgggagtctaagtttctttgtaggtctctaaggacttgctttatgaatctgggtgctcctttattgtgtgcatatatatttaggatagttagctctttttgttgaattgatccttttaccattatgtaatggccttctttgtctcttttgatctttgttggtttaaagtctgttttatcagagactgggattgcaactgctgcctttttttgttttccatttgtttggtagatcttcctccatccctttattttgagcctatgtgtgtctctgcacgtgagatgggtttcctgaatacagcacactgatgggtcttgactctttatccaatttgccagtctgtgtcttttaattggagcatttagcccatttacacttaaggttaatattgttatgtgtgaatttgatcctttccttatgatgttagctggttattttgcttgttagttgatgcagtttcatcctagcctcgatggtctttacaatttggcatgtttttgcagtggctggtaccggttgttcctttccatgtttagtgcttccttcaggagctcttttagggcaggcctggtggtgacaaaatctctcagcatttgcttctctgtaaattctccttcacttatgaagcttagtttggctggatatgaaattgtaggttgaaaattcttttcttcaagaatgttgaatattggcccccactgtcttctggcttgtagagtttctgccaagagatcagctgttagtctgatgggcttccctttgtgggtaacccgacctttctctctggcttcccttaatattttttccttcatttcaactttggtgaatctgacagttatgtgtcttggagttgctcttctcgaggagtatctttgtggcattctctgtatttcctgaatgtgaatgttggcctgccttgctagattggagaagttctcctggataatatcctgcagagtgttttccaacttggttcccttctccccgtcactttcaggtacacgaatcagacgtagatttggtcttttcacatagtcccatatttcttggaggctttgttcatttgtttttattcttttttctctaaacttctcttctcgcttcatttcattcatttcatcttccatcactgattccctttcttccagttgatcaaatcggctacttaggcttgtgcattcgtcacgtagttctcatgccgtggttttcagctctgtcaggtcctttaaggacttctgtgcattggttattctagttagccattcatctaattttttttcaaggtttttaacttctttgccatgggtttgaacttcctcctttatctcggagtagtttgattgtctgaagccttcttctctcaacttatcaaagtcattctctgtccagctttgttccgttgctggtgaggacctgcattcctttggaggaggagaggcattctgatttttagagattccagtttttctgctctgttttttccccatctttgtggtttagtataccttttgtctttgacgatggtgacatacagatggggttttggtgtggatgtcctttctgtgtgttagttttccttctaacagttaggaccctcatctgcaggtctgttggagtttgctggaggtccactctagtccctgtttgcctgggtatcagcaacagaggctgcagaacagcggatattggtgaacagcaaatgttgctgcctgatcgttcctctggaagttttgtctcagaggagtacccagccgtttgaggtgtcagtctgcccctactgggggtgcctcccagttaggctactcgcgtgtcagagacccagtttaggaggcagtctgtccgttctcagatctccagctgtgtgctgggagaaccactactctcttcaaagctgtcagacagggacatttaagtctgcagaggtttctgctgccttttgtctggctatgcactctccccagaggtggagtctatagaggcaggcaggcctccttgacctgcggtgggctccacccagtttgagcttcccagtggctttgtttacctactcaagcctcagcagtggtgtgtgcccctcccccagccttgctgcagccttgcagtttgatctcagactgctgtgctagcaatgagagaggctctgtgggcgtaggaccctctgatccaggcacgggatacaatctcctggtgtgccgtttgctaagaccattggaaaagcgcagtattagggtgggagtgacccaattttccaggtgttgtctgtcacccctttctttgactaggaaagggaattccctgaccccttgcacttcccgggtgaggcgatgccttgccctgctttggctcatgctcggtgcattgcacccactgtcctgcacccactttccgaaactccccagtgagatgaacctggtacctcagttggaaatgcagaaatcacccatcttctgcgtttctcacgctgggagctgtagactggagctgttcctattcagccatgttggctccaccctctgtttttttttttaatccatgttctcttgtgtctcattgatcttctgtaatatcattattttgaattatttttctgggatttcataagttttttttcattgaaatatattgctggagaattattgttttccattggacctgtcatatttccttgctttttcatgtttctatatctttgcattgatatctgcacatctggtttaataattacttctaattttctgaatttacatttatagcagaggactcttccttgaagctctgtctatggggttcgttgagtagagcactttggctttgatcctgggtacatgcatttgtgtagtctctgtatgatttctttggctgtaaacagtgtcaatggtgtctgagatttcctcagtggcttaggctgtggttgttagtggaggctgtggtgatattttgttggagacagggacaccagatgggccagtccttgttccccagtggttacagtagcaggctaagcatgcctgttcttgggccctagagtgtcatacattggcactggtgttagtggatctaggtgggctgattcttaggccttcaggtagcttcttgggtgtcaggagtggtaatggtggcctgagtgggtggaagggtctttgggtccctggccagtgggtgttgcatgggcaatggcagtagcagtgggggaacaaccttttggctcacaacagatctgtgcttgtgttggcagtaactatgacaggcttggtggacagtccttgaaccacaggtggcacatgggggtgggtgccagctattgtggtagtggtagattgggtaagcttgtcctcaggttcccaggaggagtacttgggagccaatggtggtggatagggcagagcaatccccaagcacccagatgatgtggcacttggtggggcagagcactgccaggtggatctgtcccaagtcccccttggtggtacatatgggcactagttttgataggtgggggcaggatgatttccaggctcatggcagaatgtttgagaggggacagcagtgactgtgctgcagccctgcttttagggattgtggaggtgctttcagtggtagcagctatagacaggtggctagggagcatgtgctttggccccaggtagtggctatgggcagggttgtctgtccttaggatggttgtaaatgaactatggccctgctgctaggaatggtgggattgttgccagtggctcatgtttcagctttggcagtggcagccagcagtagtgactggctgcaggtggagggtgtcaatggggatccagggatgtggagatgcaggggctgttgggctccaaggcaggatgcagtctggagggtgctgggctctcaaaatggcatcttgctgtagttgcttaggacttggggcagtgtgtgagaaccaatgtgagctccctcttgggagcaatattgttacgtggtctcctggcagcttcctgtgttagtctcagtgcccaccaaggttgacaagctcccctatgattaggagtgcaggagttcactgtgggaatatgaaccactgagggtctttcacttccattttccctatgttggggagtctctccaacctcccagctgatattgccaggcaggctgcttggtttccctttccttccttgccttaggtatttcctattacttccctattgaatttcagtgttctctcttaagtgatcgatttgaagggtgattattgacttcctattttggttcttctttgtgtaggaggcctaccagatgcctctagtcagcaatcttgaagcctctttgtttgtttttccttaacacaaatggtactttattatacatatttgcttttgtatatcgctttttaaaagtttcacaatacatattgaggatatatgtatcaggatgtgtagcctttctcattcattttatttattttatttttatttatttattttgagacagacttttgctttgtggcccaggctggagtgcaatggcgggatctcagctcactgcaacgtccgccttctggattcaagggattctgctgcctcagcctcctgagtagctgggactacaggcatgtgccaccatgcctggctaattttgtatttttagtggagatggggtttcaccatgttggccaggctggtcttgaactccctgacctctagtgatctgcccacctcggcctcccaaagtgctgggatacaggcatgagccaccgtgcctggcctctcatttcttgtaactgactacattatattccagtgtctgggtgtactataacatatttaacctgtcttcattaatggactttttgattggttctaatattttggtgttactaacaatattgcagcgaatattcttgtatatccttctttgtgttcttgtacaaatgtctacgtaggaaaaatttctagagatggaattatgggttaaagcttatattcaatttaaattttaaataaatattatcaaattgcctttcgtagctgctgtgtcaatttgtactcctaacaataatgtttgagaacgcttatttctgtatactctggaccatacaggtgaaaactgacatctcgttgttttagtttgtatttttatcatttgaattagattgcttatattatatttaaatattaggcattcgagaaaaacttgtttttaacctttttattatagaatataatacccaaatacaaaatagaaatgtgcacaaaagaagaagttgtatcataaaatgaatatctgtgtaactaccacccaggttaagaagtagaatgtttatattacccggaagcctttcttcttcctataccaaccactactccccttcctcctccaaagggaaaaaacatcattacctttcttttatgataatcacttcttgcttttctttatagtttcacccccagagcatgcatgcttatacaacacactgttggatctgtctgttctttactttatataaatgggctttatatatccttttgtttctggatcctttcatttcatataagatttgtgagatacatttttgttatttcgtgtagcagtaatttgctcattttcattgttttatagtgttccattctatgattatatcacagtttgcccattccgctgttgacagacatttccagtttgggactaatatgaataatgcattcttgtatacttggtgtgcaagtgcctgcacctttgttgggtaaattcttagaagtagaatttctggatgataggatgtggtatttttatctatattagataatgtcaagctgttacacaaattcttctaatttacacttccactagcagagtatgagagttcctgttgtcatatactttctcccattatttatattatcagtctttatagtttaaacattctggtggatatgaagtgacatctcataatttttattttcagttccttaaatattaatgaagttaagcacattttgatgtttattggccatatggaaatcctcttttatgaatccgtttttggttccatttttctattcaatttcttgtcttcttttattgatttgtaggcgttttaatacattctgggtacagaccagtttgtagtcttagtttggattccaacaaaagtagagccttttgatgaggactagggtactgatagctttttgggagataatctgaggaagtagaagtgagggaatagtgaggtttggaagaaggaaaaagcctccttcttattaaggtcacactataggcaatgggaactggattcttttagaacctctgagaagggcacagaaagccttcctgaaggaggagagtctgaagcacttactcaatgctgattaagagtttcttctagtggtgtttactcccccatctcccaaggtgagcttgtgctgggctaaacatatttccgtgggcttcagagaaggtcatgaagcagaaggtggcagaatgttcagtgattgcttgagatgagatactagcaaggccagtctgcgcttgcatgggactgtccattgcagctctggctaaaatcagaactggtccagggaactcctaagtagcagcaccaatggcatcttttctattttgtagataccttttttccacactaaaagatgccttttactctcttatggtgtcttttgacgaacagaagtgcttaatattatttatgtaatcaaataaaatttatctacttttcccgttttgggtaatgctttcaatattttgtttaaaaaatcttttcttaccctgaattcatgaggacattcttaagctacttttttaggtagtgtattttttttgagaaggtgatgaaagatatgggtaatttctccagaaacatacaaatcattttatataactttaaggtgttcatggaacctttgaaggccttccatagaacccctagtactttattgatcgcaggttcggaatctctagtcattgttttacctttttaatttagacccatagactacctggaactgatctttgcattgtatgatatgagatagagagcaagttttattttgttttttcatatagatgtctaaaacatatacctgcttagtttttattcctttttctgtgctctctagtctgttccaaaggaatgtttttctcctcttgtgccagttactctgtattaattactgttgctttatagtttatcttgatatctgatagatcaagtctattctttgtgctcaagattttcttgtcttttcttagatgtttggattttcatatgaatttcaaaatgaacttactatattaggcacacacacacagacacacgcacaccacacacacacacacacacacagactgttggaattcagattggaattgcactgaatctccagattaatttggggagattgacttctttataattttgagtcttccaatccatgacatagtgtagctgtccacttgctgggccttaacttattctcaaaaatgttacatagtttattgcaatgaggccttgcatatctttcattacaagtcttacctaggtatttgatatttgtgatagttttatataaatgatatttataaatttcattttgcctgggattatatgtagaaaagcaatatatagtttttgtacaatgctcttgcataaaacaaaattgccaagcccatttgttaatagtaattcttcatctgtaggttcttttgaattttctttctatataatcatatcatctacaaattctgacaatttgatttcttcttttaaatttttatattttgcatgtatttttcttgtctaattgtactgtctaatacttccaatgcaatgttgaaaatagaagtagtgggcatctttgttgcattctgtatctcaaagaaaatgctgttgacattttattaataagaatcatggtatgatgtttgcttaaaaatactgttttttgtgcacttgttgcagttgttgggtgtaccattataaatatgtcaattaggtcaaatttgttgatgatattaattaagtcttttatatttttctgcctttaaaagtctacttattttatcatttatccagagaatattttaaaatttttactttcagttatggacttctcttatacttctggcaagcttagctaaatattttgagaatatggcattaagtttatataaagttagaactgttatatcttattgatgaattgactttttaatcattactattactgttactattatctttatctctaataatactctttgcctttaacccttttttgtctgatattatagttttcttttggttagtgcttgcaccaaaactaaaatctatttaactcagaactttctaaacttatatgaacatagaattttatcaaggcatagtatatattaatatctcaggaaacaagtggtatatagaacacactttgcaaaatagtgatctaaaatatatatatgattattaaaggagtatacctagggggtcatagataagagagctatttagatatctccagttggggagtctattaaagcagggttaagcaaactatatcaaaggagcccaatctggcacactacctgttcttgtaaataaaattttattggaatacagctatgcccacttatatatgtaatttctataattgcttttgctctatgatggcagagttgagtagagagaccatatggctatcaaagcttaaattgtttactatctggctttttacagaaaatttggcaattattttcctgctaataattgccaaaaattattgaacacttattactttgtgggctcaatatgttgctagatattttatgtagataatctcattttattatcctaaaaatcttttaaggtaggtgagatgagattgtgtttattttacaaatgaggaaactaaggtgcagagaaattaaataattgcccatggttacatatctagcaaatgtcagaaccagggtttgaagctagatctgcctcctagccttcactttctcagtatactagactgccttctggttcctgttgttttggtagagtgtgaagtaatggaacaaaaagttaagaaagttaaaaaactcatactttgccattgttactctaagaggttagctatgttaagtatacctgttaagtgccagggtactgtactaattgctttacatgttatctcattcaattttagcaatgaatctgtgttgcattttatagataaggaaattgaagttatttatcaaggaaaaagtagttaatctatctcagaccatactttcagaggaatattgctgatttaaagatagttagataactctattgactatgtctattatataatacagtagatacataccataaatgtttcctcatgctgttgtctaggattccaaataaaagttttaataaccacatcatgacataatattatgcctagtgagtgggctgtattttaaactttcccttatttttggatgtaggatatagaactcacattattaattagaagatttacttgcatgttaatgacaatttagaaaatactctgaatgttgctgaagattgtgacctttgcaagtgtgaactctgtataaaatagtagaactgcatacttttttttgcttaatttattttttccaatttcaaatgttcagcattaaggaaatttagaaaaatgtgaaaaatggaaagtgtttacctattgtcccatgcccaatggcagcctttgttaacagcttattcctctcagtccttttcctaagaacatagtcttttattattttttaaaaagtgtgtgaatataatttttatcccccctttttggctttacatcatgtacctagtgatggaaaactctgacttaaaatgaaagctctgtcagcaacttgtcatgtggtcctaagtgagttgtatgtctgtttccttgcctgtaaacttgggcacatttcactgtgctatccctgatatttttacttagaatgtgaggcaacctctgaggctaggccagatcttgtctggactttaaagtggaatcttcaaattgttatgaagaagatacagtaaaatgataagcaggatctctccacgtgatcctctttgtttctttgtttttgagagtgagcaaaagacctaaggtaaggttgagaaggactaacctgtagtgtgcaactaagctcctagtgggtctacagtgtttatttgttaggtgtgataatgtggtagcattactaaagtcacaactgtagggtcttgtacccttaaggcattcctctttaaaaagtggatgactatactagccaccacatcacctaagatgtgacttgagctcatttcatctgagtcttagggaaaaagcaaaaagggaaatacatttatggaaggcataccccatctaggaagcattttcatatatcaaatccccacaaaaactttgggaggtaaatgttaacatcctcatctttaaaagtatttttttttattttagaaagtgagattatatagttttacaatctgctttcttctctttacacatttcatgcaaagctgtaattatttgtcttctttactaggctgtgaactccttgaagtcaccaactctactgcattcatttttgttttctcagggcttaacacagtgcctggcacagagtaaacatccagtaagtgatgagtaaggatgatttactctaggaattgggactcttagataattagcccatagttatcaaatctttatttttcttttgtttcagcatctctcttccttttaatttctaccgtgaatttagaaatgcttgaaaaatgtaaagtgccacatacatgcaagttgagactatgttgactctctgtattcccataagttgttctggtctgtatccagttgataatgcagttgttatttttatagtagtctaagtacatatttgcacaacaggcggtgtcaactcatctaagttacttgctgttatttgcctgatacttttaaattacagagctccattactgaagtcattatttgtggttaagagggagtggtactgagagtggtaacaagaagacttttaaaaaatgaggattaaaattgaccatctttagctgcctttaaatttatcttgatttaattatctagaacaagtacaaataatggccctgccttagttttttctatacgtctgctctatacaaaatacgctgattaaaaagaggtatggacttaaaaattagaatttatttgcaagattttgttaaatgattgctttttaaatctctgccactctactgttactccattttgtgagcagaactcaggaagagaaaactcagcaaggataggaatcctctcctctttctggatatgatagtgcactgcaaatgcaagactcttctaactatggcatctatcttacaatgaatccaaatggtcattcctggaggtctgggattatgctttgttgtcctatatccctagaaattcctattcatgccattcatcctgtgggctctcagaaatattaattgaattgctgaagacttgcttgtatctttatctcagatttttaaaaaaagcaccctgcaataactaagacttaattttttagctaaattccatgtctagtttctaatacctccttatattttaaaaaatcattattttattgttaaaaaacagaaactccaaaatcattgagaatcttttctgtaaaataagacattttacagagttacaaaattttcatttttccatacaagtttttgtgagcatgcccacatttagcacagttactctttagcccgggagtttttgaattttagtgtgctaggaattacctgaggacaatgcttaaaattagattcatgggccaattctcagtatcatagaattgattggtttgtgtggagctctaataatctttaaaattattttctttttttaaatttttattttattattattatactttaagttttagggtacatgtgcacatttaattttgagatggagtctcgctctgtcacccaggccagagtgcagtggcgcaatcttggttcactgctgcctctgcctcccaggttcaagtgattcttctgcctcagcctcctgagtagccgggactatcatgctcggccaatctttgtatttttagtagagatggggtttcaccatgttggccaggctggtctcaaacttctgacctcaagtgattcgcccaccttggcctcccaaggtgttgggattacaggcgtgagccaccgcacccagccacaatttttttattttaataagcactctaggcatttctaatataggtagtctgtggattatgttttgataatgactttttttctccagtcctactcatacaggaccctctttgcctttttaaaaactattattaagttgttatctctgaaatcagacaggctataagaaaaaaaagatcttaaaaaagacaataataggtgttatttcaaagaagtgtattttgataagaaaagcaaggggcatgaaggaataaaggagaacaagattatgaagtgaaaagttacaaaatatattcttttttacccactgccaaatttttatttgattttggtcannnnnnnnnnnnnnnnnnnnnnnnnnnnnnnnnnnnnnnnnnnnnnnnnnnnnnnnnnnnnnnnnnnnnnnnnnnnnnnnnnnnnnnnnnnnnnnnnnnnnnnnnnnnnnnnnnnnnnnnnnnnnnnnnnnnnnnnnnnnnnnnnnnnnnnnnnnnnnnnnnnnnnnnnnnnnnnnnnnnnnnnnnnnnnnnnnnnnnnnnnnnnnnnnnnnnnnnnnnnnnnnnnnnnnnnnnnnnnnnnnnnnnnnnnnnnnnnnnnnnnnnnnnnnnnnnnnnnnnnnnnnnnnnnnnnnnnnnnnnnnnnnnnnnnnnnnnnnnnnnnnnnnnnnnnnnnnnnnnnnnnnnnnnnnnnnnnnnnnnnnnnnnnnnnnnnnnnnnnnnnnnnnnnnnnnnnnnnnnnnnnnnnnnnnnnnnnnnnnnnnnnnnnnnnnnnnnnnnnnnnnnnnnnnnnnnnnnnnnnnnnnnnnnnnnnnnnnnnnnnnnnnnnnnnnnnnnnnnnnnnnnnnnnnnnnnnnnnnnnnnnnnnnnnnnnnnnnnnnnnnnnnnnnnnnnnnnnnnnnnnnnnnnnnnnnnnnnnnnnnnnnnnnnnnnnnnnnnnnnnnnnnnnnnnnnnnnnnnnnnnnnnnnnnnnnnnnnnnnnnnnnnnnnnnnnnnnnnnnnnnnnnnnnnnncaacctctgcctccagggttcaagcgattcttctgcctcagcctcccgagtagctgggattatagccacgtgccaccatgcccagcttattttttgtatctttagtagagacagggtttcaccatgttggccaggctggtctcaaactcctgacctcatgacttgcccaccctggcctcccaaagtgctgggattacaggtgtaagccactgcacctggcagcctggctaatttttaaatttcttttgtagagacgggggtctcactttgttgtccaggccggttttgaactcctcaccttaaacgaccctcccactttggcatcccaaagtggtgggataacaggtgtgaatcactgcacctggccctcattttttttgttttgttttgtgtagacactatttttatgctgaccacctttgttcatagatagctcttattgaattattctttcaggagagcagtaaagtgttggcagttgtaaaaatgtgtcaaatttatgcaatcctatctctgatttacaattcagttacacatgttggcagaggtgaactggtgggcctaaggaaatgccacaataattcctcctctcttgacccagaaatgtcttgatcctgaccatataatttattaaagtaggcttagggtatgttacatgaaagtgtaaaggtattcttcctagtgggtgtgaatagtatacattttaaaaaaatgtaaactcctggtccactcaaggagattttggtttaggaggtctagagtggggcccagaaatttgaactttataaaagctttttaggtgattgtataatcagctaagttttggtacaacgttcaactctataagaattctttccacaacattcttggtaaagagtcatgcagtctcaactttgacaacttctatttgatgatgcaacttatttcattgctttaaaagatttatcttggactgaactaggcacggttctgggtgggagtctggggagcgcagcagccatggccagccacttcgtgctcagcaacggtgccaggatgtccatcctggggctgggcacctggaagccccctccacgccaggtgactgaggctgtgaaggtggccattgatgtcaggtactgccatctcgactgtgcccatgtgtaccagaatgagaatgaggtggaggtggccattcaggagaagctcagggagcaggtggtgaagtgcgaggagctcttcattgtcagtaagctgtggtgcatgtaccatgagaagggcctggttaaaggagcctgccagaagatgcttagtgacatgaagctggactacctggatccttaccttattcactggccaactggctttaagcctgggagggaattttccccattggatgagtcgggcaatgtggttcccagtgacaccaacattctggacacatgggcagccatggaggagctggtggatgaagggctggtgaaagctattggcatctccaacttcaaccatttccaggtggagaggatcttaaataaacctggcttaaaggataagcctgcagttaaccagattgagtgtcacctgtacctcattcaggagaagttaagtccaaaggcattgtggtgactgcctacagccccctcggctctcccgacaggccctgggccaagcccgaggaccttgcctcctggaggatcccaggatcaaggtgatcacagccaagcacaataaaactacagcccaggtcctgatctggctccccatgcagaggaacttggtggtgatccccaagtctgtgacaccagaatgcatttgctgagaacgttaaggtctttaactttgaactgagcagccaggatatgaccacctcactcaactacaacaggaactggagggtctgtgccttggtgagctgtgcctcccacaaggattaccccttccatgaagagttttgaagctgtggttgcctgcttgtccctaagtgacctatacctgtgtttcctgcctcatttttttcattgcaaatgtagtatagcctgtgtcactcagcagtgggacagcaaactgtagagtggccagcgagggtgtgtccagcttgatgttggatctgaggagccctgtcagtagaatagaggtctcttccagtttgctttgcccttctttttgccctgctggggaaagtacaacctgaatacccttttctgaccaaagggaagcaaaatctaccaggttaaagtagtgccactaacagttgagttttaactgcttggaactgtaatcctttcagcaagacttctctttgcctcaaataaaaagtgcttttgtgaacttgaaaaaaaaaagatttatcttggactgaactaaaacctaccactttgtaatttccacccacaagtattgttctttctttgggaaggaggaaagagaaactaattttaatcagcatttactatattatacttgctgtgctaggtataattgcctcttatttgtatgcttgaaaaaactaaggtaatttccttggctgcaaaatggagtatcagagtagatcagtggttatcaaaatgtggtctgtggacactggagatccctgagaccctttcacagggtgtgttgtcaaaactattttcatcgtaatgggaaattgctagttgcttttttcactgtattgacatttgcattgaggatgcatagcaattttgggttaaaactgctggtgccttagcacacattaagacagtggcaccaaatgatattagtagtcattgaattctttattattaccactcacgaaacaaacaaacaaacaaacaaaaaggcagtttcacttaaaagcattgtagatgaaacagtaaaaattttaattttattaactcttgacccttctttaatactctgtgtgctgaaatgtgaagtatgtataaggcacttacactacatactcaagtatgatggttatcttgaggaaaatcacttataattgagttgaactaactacttttttcaaagaacaccattttttacttgaaagaacaactaacaaacacacaatggttatttagacttaaaaacttggcagacatattctcaaaaatgaacaaagtgagcctgcctattttgtagaaaacaagtgacacttttttgtcaataaaatttgagcttccaagagcaaattagtagtttgcaaagcttttacccaccaccacaatcatgatcgcttcccagtacttaaaaatgtttctgataagatagggtggtggatattaagaaacgtggttttaacaatattgcataataaaatatgtcaatgttttaaactcagtgagccaatgtttcttaaatgaactaatgtatgatgttacaaagtcatgcatggctaaaagatccatttaaaggcgatttgattttagggtaatggaatacaaaaagtttattgatattcaatttttagattccatattgcaattaacttttgagaaatgattacttgtcaaattttgatataatataaaagaatagccacaattatttgaaaaggctattaaaacattctgcctctttctaactacctatctgtgtgaaaatggatacttttcacatacttccaccaaaccaacatatcacaacagattgaatgcagtagcacctatgataatctagctgtctttttctaaaccagacatttgagagatttgcaaagatgtaaagcaatgttagttttctctctcttttttttattttggaaaatatgcttgtatttcataaaatactttataatactatgtaataggtttattattgttatttaaaataactctttaaaaactttaaagttttagtttctaatatagtaagtattgataaatgtaacaatagctctttgtgaccctcaataatttttaggactgtaagggagtcctgagaccaaagagtctgagaaccactggactcaatgatctccaagttcattccaaccaccatcattgaacatgcaaccatgctattgtaacatggtttccataaagtttcctagccattctcctctgaatgctttgtcaatgtcccttctaagtgtggccctcaataccaaaataatattgaagagatataggttgagcagcatggaatacatgaataggctattatgaggtagcttcaataataactacctttggagatctttaagaataggagaaattcctatttctttgaggaaggaagttcttccagaacagcagagtggtggactaggtagcatcttaagttgtcttccttgatacctcacaaatactctaaccttttgcattagaagacataattttctattcagtactgtgatgttttaaattattaacaactgcatttaaaaaaaatactggacattagcttaatgtcagtcctactgaaagtcaaatttcacattttattatttatagttaattcaaattctgcataatttaatatgattattaaggaaaaagaaaactaagcattatggagttcaataaacatgggtttaatctagtaaagctgcaagcaaaaaaagtgataataacagtgaagaattgaaatttttaaattgatggagctttggaggaaatagcaatagttttaatgcaacaatcacatctcctgcaaaacccacttgaatttgcatacaggatatttttaatgtgtaatttttattctgatatataaaagaccaggcatcgatattttcctaaaagttagttgagaagataaatgcgttgaagacagttgttttaattcagtggctcactatgtataatattagtaaaatcaatgcatcaataaattttaaaaagttatttaattcttgacttcagttttaatcatgcagtgctatgatttaatgtaaaagtggacaaaatttgttacaggtgttttggaagcactttagttctttaaataataccttagaatcattgagtctcagggctgtaaggtcatttaatccaaccacccatttgatacttgaactttcttgctaactcacataataaaaagaaggtggggggtggttactaaaaacagaaatgggtgtggcttaaagacagacttttaagcaggatttaaaaatgtagcttgaaagcttttaaagtctaattatacagggaggtggcaatgtttttatttgctatttacctttgatctattacctatttttggtagagtgggacatgcttttgtgaaaatgtttatggtttcttcatttgatgttaagatactcatttgaagttgccctgtaattttgagggttttttaaactaatattaatatttggcttttgctcccagactaatagcaagttatcctagatctgggtcatttcttttgaatgtctaagtgatatactgaattttagaaatatcttcctcattttggcatacattagacatgctaagtataaaaaaatctaaataatatcaaaccataagggtaataaagtaaaaagaacctatggcaccctgcccaatgttaacatttttgttaaattatattttgtgaaacttatacatgcatatatatttgattttcacataagtatttgatattctataaattgatgggcttttattatacacatattttttattcaacaatatattgtggccatcttttttgtcaataaatatagatttatataatgatttttaataattacagagtagtgttatatgtatgtagcacaatttacttattcaatcaataggttattcctaattttggctattataaaaaactgtagtgaacatacatattaaatgtatcttttatcatatttataatgagctctttaagataatttttgaaagtagcgttgaaatctcaaaggatatagacagtaaaagttttaaaacttattgtaaaagtgccattcagaaaagtcatacatttataatcccatcaatagtatatgaaagtgcttatttttccacactctcaccaataccagtttttgtccagtttataaaacgttttgccaatattatgagtgaaaacattttatttacatttctttggctatttgggaggttcctaatttttaatgtatacatttttatattattggacatttgcatttcttcatttgtacatttcttctttgtatcccttgttcttttttttttttttttaagacagagtctcactccgttgcccgggttggagtgcagtaacgcaatcttggctcactgtaacctccgcctcccaggttcaagtgattctcatgtctcagcctcctgagtagctgggattacaggtgtgcaccaccacacccggctgatttttgtattcttagtagaaatagggtttcgccatgttggccaggctggtatcaaactcctggcctcaagtgatccgcctgcctcagcctcccaaagtgttgggattacaggcatgagccacccctcttggccccttgtgcattgttatattgaagtatttgtagcaatgcattttttatttagtacattaagaatatatcaaagacttgatgactaaatattatggaacaaattaccaccatggtcagatgtgtaatagactgtgacccaggttggattattgattgtttgaaatccttgatgggaaaggccattattttttttaatttaaatttttgtgttcttactgtccagtgtgatctttaacccatggtcactcttcgctgaatgtataaatgagcaaatagagaactggaacaatccatgggtgattaggcgttctgaggattcattttaccaaacagattgagattttccagaacacgtaatgatttgctctggcatttccttctctatcttttcacatttgtcctgccatcaggaccatagtgactgcttttgtttttggaaatgtctttttaagactaaacttttctagttcttaaaaaggtacctatttcaagttgtgtatatattaattcttaactctttgcccctcataaaatgttgcttgtttagccttcagttaactgcatgcagaactatgcattaaagtcatttttaaaattatataatgatgaactctttgaccataggaacttattattttttaattctttgctgtaaatttcaccaatagtgcaaatccattgataatgagattcacagttgcttttaacatatgtagcacgactggactgatatgatgaataagatttattgactttgtattggtgtatgtgaaaatattatttgttctaaatgtctggaatctgacttgttccaaaattaaaaatatttctagagttagagatcttaattcaagatagttcattgattaaaaaattaaatctatgctaaccacaatattttctggtcacattttcttttagctccccattctttatgtggaagtgaaggaataggatgtatcatgtatcttgcataattccaattaatgcttttaaaaaagtagttgccagaaaaacaaggtgtggtattttaaaatgtataagtactaaaaactctttcggattcttctagaatttagacttttggatatacagcattttgctataaaatttattttgtgggtaacttctttataaggaaattataatttataactcagcgggggatagcatgtgaggatggtttgaatcagaaccagtactctttgatggttttggataatacacacagtgtgtccaggtaggcttgtctggtgtcccagataaaattactctcccagatccctaaacagcagaggcaatgaggaagaaaagggtataataccaacaattaatgacagagctagccagactgtcctgtacttcttgcactgtggaagtaggcgttagagttgctggaaactggtgaaactggagaagccctgaggcaccatttcctacaaggacaagaaggtctagtgaagaagtctaatgggtatgttagctgttgatgcttaaagctgtccaaatgcccacacctttatcatctatcaatctttaaaaagatttaaaaaaaaactttttttagagattttttagagatgttgcctaggctggtcttgaactcctggactcaagcaatccactcgcctcagcctcccaaactgttgggattacaggcgtgagccactgcacctggctctattatctataaatcttgactagaaaatagaataaattacctggatcatttaggtaaaagcatattttaggggttgaagagggctgagttagatatttatttcatattcatcttaatttcagatgcctatacctaatctattaaggtcatttgtgctataattgcaagttgggtgcagtggttcctacaaatgatgttgatcaagatccattgtttttcagaaggattttatttaaatctagttagctgtaactaacctagatatttgctggctatatttaaaaactgcagattgaatcaagccagtccccagagcctaggaaagtttctgacctaatttaggaacccaagctctattattatttttagttgactactactcacagccatgctcacatttttgaaagaatacagcctctgtaacaaagtttctttgttttaatggaactaaaaatatgctgtatttagaccaaacaataaaaataaactaccaaaccaccttaatgcatgggggtcctggatagagaaaatcataggcatgtagaggcataaaatgactctttgtatgttaaaaatttgtataaggctagctctgtgtgtttgagttgcatctgttacctcttcagccagaactaaagtatatgtgagcaaaacaattttggattgaattatggcttatacagaatgcattgtatatagcctaagcatcttatgggttccacgccttaggtagaacaaacactgcattctttcttattaattctacctacaaggtattcctgtcaggcacatttaagatattctctgtgaagctaattcatttcaacttgcagacataaattaaatgtttttcaaatataaattataagcctgtttctttctttctcttaaaaattttttcccttttgttcttacttatttgtatttttatcacctactttattaccgatttttttaaaagagcaatattggatggaaatgtggcattcttagatgtagaaccatgaaataattgtttcttttggcattatcattttggaaaaagttgttaaagtagatggggacaactgcatgagttaaaaattgtatgatttgtagccagaaagtatacttctttaataaagcatataaatgcaatttacttatccttttttatttcattttctattaaattttcaggtcactttcatgaattcaaaggcaatttaccagtgatttctgggtgctggggctgatattttttgtgcatatttgtaagtattggtttatctttacttttctcattgtgtaatgaaacagttacagtttgtaaacaagttcttaactcctagtgcgtgtgaatttttattagtttttttgcaattgttttgtaattattattttttgataagtgttttcttaggaggagcatagagaaaagtaccagctggtaaagaagcctcaatttgttgtaatttccagtgaaataacacaatgcagggcccattataataagtttaaagaataactatcttactctttgagaatagggctcaattgtaggaatgagttatcttaaagagtctagtctatatacacgtgaataatttacactgataacttctgatagtcttctggttgtctgtacttgaaaagtgctatgtgcctatgcccatagagaagatgtgagacaatgtagaattcaaagagctgtcagcacatgaggagataatgtacaggcatacctcgttttattgcactttgttttattgtgctttgcagatttttttttaagcaaattagaggtttatggcaaccctgcattgggcaagtctatcggcaccatttttccaacagcatgtgctcacttcatgtctctctgttacattttcataattctcacaatatttcaaactgtctcattattattatgtctgttatgacgatctataattagtgatcttgatgttactattgtaattattatggggccgcaccaaacaagcccaaataaggtggcaaacttgtgtgtattgtgtgtattctgattgttccaccaactggctgttcttccatccctctccctctccttgagccaccctgttctctgaggcacaacaatattgaaattgggccaattaataaccctacaatgacttctaagtgttcaaatgaaaggaagagcagcacataaaagtctcacattaaatcaacagctacgaatgacaactttgtgagaaaggcatgttgaaagctgagacaggtcaaaagctaggcctcttgtaccagttagccaagttgtgaatgcaaagggaaagttcttgagggaaatgcaaagtgctactccagttaattatgaatgataagaaagcaaaatagccttattgctgatatggagaaagtttgagcagtctggatagaagaccaaatgagccacaacattcccttaagccaaagcataatccggagcaaggccctaactctcttcaatttttgtgaaggctgagagaagggaggaagctgcagaagaaagtttgaagctagcagagattggttcacaaggtttaaggaaaatagcagtctccttaacataaaagtgaaggtgacacagccagtgctgatggagaagctgcagcaagttatccagaagatctaggtaagaccattgatgaaggtgactacatcaaaccacagactttcagtgtagatgaaacagccttatatgggaagaagatgctatctaggactttgatagccagagaggaaaagtcagcgcctggcttcaaaggacaagtggactcttttgttagaggctaatgctgctggtgaatttaagtcgaagccaatgcttatttactattctgaaaatcttagggcctttaggaattaactctgcctgtgctctacaaatggaataaggaagcctgagtgacagcacacttgtttatagcatggtttactgagtattttaagcccactgttgagacatactactcagaaaaaaagattcccttagagatgttatttctcattgataatgcacctagccatcaagagctcagatggagatgtacatggagattattgttgtcttcatgcttgctaacagagcatccattctgtaggccatggatcaaggagtaatttcaactttcaagtcttattatttcagaagtacattttgtaaggctgtagttgccatacatagtaattctgctaattgatctgggcaacgtaaattgaaaactttctaggaaggagtcaccattctagataccattaagaatgtttgtgattcatgggggtaagtaaaaatagcaatattaagaggaatttgaaagaaatttatttcaaccctcatggatgactttgaagggatcaagacttcattggaggaggtaactgcagatgtagtagaaatagcaagagaagtggaattagaagtagaagtggagcctaaagatgtgactgaattgctgcagtctcatgatacaacttgagaagatgaggaattgcttcttcaaaatgaacaaagaaagtactttcttgagttggaaactaccctggtgaaagatgctgtaaacattgtttaaatgacaacaaaggatttagaatattacataaatgtagttgataaagcagcagcagagtttgagaggattgacccaactttgaatgatgttctgctgtgggtaaaatgctatcaaacagcattgtatgtaacagaaaaatattttgtaaagaaagagtcaatgaggcaaannnnnnnnnnnnnnnnnnnncttgaacccaggaggcggaggttgcagtgagccaagatcatgccactgcactccaacctgggcgacagagcaagattccatctcaaaaaaaaaaaaaaaggaattgtcacagcccacagccactccaaccttcagcaactaccaccctgaccagtcagcagccatcaacatcaaaacaagagcctccacccatcaaaaagattatcttgctgaaggctcaaatgatcattatgattttttagcaataaagtatttttaattaaggtatatacattgtttcttagacttcatgccattgtacacttaccagagtacagtatagtgtcaacataacttatatgcactgggaaaccaaaacgtttgcgtgatttgctttatcgcaacatttgctttattgcagtggtctggaccaaacctgcaatatcttcaaggcacgcctatactaaggcatactatactcttccccatctgcaaaacaccattatattttaaataatattttggagaacaaaggtactttttataaataaagaaggcaaatttcaagaaaaaaattgaatgaactttaaaaacctattaaagtacttgaaattaatcaatatatattatatagaagtgctatagagtatgtagcaggtattaaaaatgtctctgtggatgtaaacctacatttaagtaacttgcatttaaaatatatgtgtatgtatacattgttgtaaactgttggtatttaaggggcttttttacatttgataacagcaaagacacaggaaactttttctttgttagtgtactgctataaaggaattttaaagaatatacttctaggaaattatttgaaataagtaatgttataaattagagtttaagtgattctctatttaagcagagctattgaaaatttatttaataccagctttacctttcttttaataatagtattgattaggataggcattttgaaccagcttaaaaaaatagatgttcatgtttaatatagtttaatacattttatgtatttttaatgttttaataataaattgttattttatgaaactctatcaatttacattttattatttttagatgtaagtcttatgtaaagcacaaaattatataaactgtggggtcatttggattaaacataagcctttaatttatgcaaggtattgtggtgaggattaggaagcaaagaagatggagaaagaaatataaagtatctttgaagggctctttgtgaaaacaggattctaaggaaccgaacttattctactggaaatctgagtgaagggaaataattctgagctgtccaaatcttatcttagttgctttgtctcttttttacctcctttctctcttctttcatattatttagtcattcgctttagtaagttttcaggatgagtaaagtttttaatgtgacaaatataattaccagcatttcaaaccaagatggccttcattaaaatatagtttacatttcttatcacccaaaggatctttttcctgaattcttcactttattccctccatcaagacacatttagactaactttgaatggtggtgatccaagtagctgatcactttcttttgacttaacaaagggaaaggctaaaattagaaggggcactgttgatgtcgtttctgtatggttatttctggagttccacttcaaacaaacaaacaaaaaaccaaacatcttttagtcagattttgtctggccacttaggcacatgtcatgctagtcatacaggcttaaagcaattattttctggtcttgagaatttacatatgcttgtttagggcatgggctttggtgttcctttggtcagtgatctcaggttttgctagggctgtctcctgactgcagaaccttttggttaaagaaatatagccggatactatgactaagataagtcagatgaaattaacatggcatccaaaattcctgagtttctagttctctcatttgttgtggaaattgttcaaccacttagactgaaagatgaggcttctaaaacgatagaaatatttgtctagtcaggcctaagaacaggcaaatgggttcagtgacaattacttcttttatgaaccttaatttccatgtcctacaactgcttatttgctacatgatctaaggcagaaagttatacctcatggccatgggaagatttcttagtaaggtgtgcaagtctgtgagataaggaaggtgggatattgttttgcacatccataatgaatgggctacaccaaaagtgtgtgagaactgactggaatcttagctactcaaatcaactacctaggccggaagaggaaaacactgtgaaggaaaatggctgtctcttcagaagctgcatcttattctagtgttttttttctcttaaaaaagtaaaacttcctttttttcttttcctaaagtaagcattgtggaagattgccttattttgcatgttcttatctcacatttgattttttcttatctctaatgaaaaataattatgtaattctgaccgtttaattttaccagagcagtaaatgattggttaaaaaaaaaacaaaaaaaaaatcggacatagtttattagctaccctgctttttcaggttacccaagtctttttagtaatttgataatgaattcctttaaaaaattctatcttgactcatggtctctaatagcaatctttttcctgatgtttctgacaaggattttattgtgtggtacaaaaagtgattattgcctaactctaggcttgaggcaataataataccaacagaatattaagatagtataacacttgattctgcagacatttaattggctgaatttcatgaaaactctgtggaatgagtaggaattatctttatttttgcagagtagcaggattcaaaccttgaattcatggtataaatttagtgctcctttcacaacaccgtgctttcctctttcagagagaatttcagctctcttttgtttttgatcactatctcagtcttcacttggttgctgtataaatatttttgaaattttgagatagactaagtcggggaggagattgtagagacgcttctaccactgacttcatttcctcaggttcctggaccatttggtcctccctgatattttcctactcctctattccaaaattgccacatgtcatgcttcagctgaaattttttgaattacatagatttttagggaagcaaacaaacaaaaatcacaaaatcatgtctttgtggcattttaaaatggaaagaaatctgtttaaaactgagcatagcccagaccaaagatccctcagtgagaatatctgtgattttaaggacaagtaggtctaagtgcgttatctttaaaaaatattattccaggctaatcttgacatagagcaggtaaataaaaaagatgagctgtgaaaatccacaaatagggcttgaatgccattttccatgacaacgggagctgccccatgaaagcattaatgctgggaatgtaaggaatttaaaattgtgccttctcagttttacagttgtgtgctcatgttaattagagatatactgacatttgaagtatctacattaatacacacagctactatacatttgtgaaatgtggccagaaatctactttaattgaaaggagtttgctaatctgaatgtgtatacccattacattttaagcttttaaattttatatactaggtcccttagatacttgttctttttgccctctctactttctgtttctaatttatacctgaaaggacagcctggcctatttttaatctcttagtggtgttttggagctgtattgatggaattttgagaaaaaaatatttttaatagtgctttttatttgctgtagttttgaatctttttttccctctctgactttctgaattactgttttttcttgcaaacctttaaaatggcctgccaccaaaataaggtaggatttaggtgtatgaaatttgcttcactgactgtatttaaggacaaaaatgctactctttattgtcatactatggttttagtcagaaaagcccattgttggagaccttaatggaataaacagtgaagaggaattctggtttttccagtatagctgagttttatctttcagtcttcatgttaagccatgtgtcttaatttttgatttgcaaataggttcacaatagcttgatgactttttgaggtcatctttaaccctagaatttttgctttgtctgtcttaacatttaaagtaagaccttacatctcttttttgcaagcttgtatttcttaagaatctgtcagagtttttaacctaattgttttgtgcttgttgtctaatgaaactcctgcacttactttttggaccagtccctgaatattgcacaaggccagttagaaagaggcttcgtttttgtagcaccagaacaaactgctctaaaaagtttgttaatactctggacttgtttcattaaaccattttactggcactattaaaccactgagacctgggaccattaaaatttactcagttactattattattattatggcctattttacactttattacttttttttttttcgctgtaccaagttcctctgttctttattcttccatgttgcttactacatattgtgccaccacagcacatttggtaatttcaagttaattgctcaattatcagtgatagtcatgaagcatttgaaacatgcgcggtggaacattttcaaaatttcaaaataagttggtgtgtcataatcttaaatgtgaaacatgccaatatctgcaggcataaaaatacacagcctgagctaggcatttcaggaaggcaaaaacctactcttaaaatcagggcttttgtctggcactgaagtgtttcatcttcgctaatttcaaacaacatgtctaaatttgatcttggtttacttttcaactctaaaaatttggttgtagtttataaaggaaaatggaagtaaaactgtattgattctgtctgaatgttttaccatgacctcataatcctgtattcactataatgtggaattggtgtgaggtggatccatgttgggtgccgatcaaagaagctgacttattaaagaagcagaactcataaggcaatcttctaatcagaggacagtgttacagtgaagatcgtatattgatgatttattgatactgaaaaacaaacccacaagaacaatgacactttgaggacttactctgaatcctacacactagtattttcagatgcctgcaaaacaacttacacattatagcaaaataattattgtaactcttttggcaactaggcaaactatcattaaatttttgcattagtattcagtttagggttttctccaaagtaatatagtgcaaacagctcttttttttaagatgctgttatagttctttcacatttttatagtactgtagttaaagttgaatttactggatacatttgaaggtggagtagagttgcacaagagtcaacattaaagtgattcagtgcccgatggagaaaacttctttttaacttgagattggaaacaatgtggtggttgggggcaattttctaagagctgctaataaatttgaatatttccctaaaaagctgctttctgaacttgtttctaaccaagaagataagcttaatcatcttccagtattattacatagctttcattaatattgaaaggaactaagtgcatgtagagaaggggaaataaagccattatttaagcttagtggtggtctcacatataaagaagtgaagaagtgtcaataaatacactaattgggcatagctggcttttttnnnnnnnnnnnnnnnnnnnntgtctttttgtttgtttgtttgtttgtttttaacttttaagttcaggggtacatgtgcagggtttattacataggtaaacttgtgtcatgagggtttgttgtacagattatttcatcctccaggtattaacccaagtaccatcagctagtttttctgatcctcttccttctcccaccttctgccctctgataagccccagtgtgtgttgttcccctctatgtgtccatgtgttctcatcacttagctctcacttttaagtaagaatatgtggtatttggttttctgtttctgcattagtttgccaacgataatggcctccagctccatccatgtcctgcaaaggacatgatctcattctttttatggctgcatagtattccatagtgtgtatgtaccacattttatttattcagtctatcgttgatagtcatttaggttgatttcttgtccttgctattgtgaatagtgctgcaattaacatatgcatgcatgtgtctttataatagaatgacctatattcctttgggtacatacccagtaatgggattgctgggttgcatggtatttctgtctttaggtatttgaggaatcgtcacactgtcttccacaatggttaaactaatttacactccccaaacggtgtataagcattcctttttctccacaaagttaccagcatctgttattttttgactttttaataatagccattcttactgatataagatggtatcctattgttttgatttgcgtttctctaatgatcagtgatgttgaacttttttttcatatgattgttggccacatgtacgttttcttttgagatgtgtctgttcatgtcctttgcccactttttcatgggagttgtatttttttttttttttttttttgagacggagtctcgctctgtcgcccaggctggagtgcagtggcgggatctcggctcactgcaagctccgcctcccgggttcacgccattctcctgcctcagcctcccaagtagctgggactacaggcgcccgccactacgcccggctaatttttttgtatttttagtagagacggggtttcaccgttttagccgggatggtctcgatctcctgacctcgtgatccgcctgcctcggcctcccaaagtgctgggattacaggcgtgagccaccgcgcccggccggagttgtttgtttttttttttcttgtaattttgtttaagttcctaatagatggtggatattaaacctttatcagatgtatagttttcaaaaatcttcccccattctgtagattgtctgtttactctgtcgatagtttcttttgttgcacagaagctctttaattagatcacatttgtcaatttttgcttttattttataacagtgatctataagatgtgaaatacagtctgtctataattcaggaaaaagtgaagtcattgattactcaggtttttagatagaaatattttagtaactattcagcttataaagattaataagtgaaatgtgtcactctcagcatatagttttatctcaagttcatattttatgttattttgtaatattggtaaaaatgattataatttcaccaaatttttgctagctccaaagcataaaaatgtgagttaaagattgccaataaaggtaaagcattttgtgtattctctctctgagtatgacttacatatttattgctggaggtattcaaagacatgaggcaatgacagtataaaaagaataatttccaaaacatcaccttttatagataactggcaaaagagaatattcttaatgtttaattattcaaaaaagtttgttcatgtgatgtaatgcttgttattattattatttgcttagcactataggcttggcacagtgcttacaaaagaagaagagatggtctctaccccaaggacttaaaacttgttatgttactagagagtttatgtgggtggagttttctttggatacaaactgtactggagttagctctttctctttcttttcagctcacacagtttgatataaacttaagtgaatgaattcattaataaaagcagattttctatttttatttcacctctgggctattttatacctttggagcacacaagcacaacaaaaggtatgttttacagttaattgtttttcccttttttatcctgacatcgtagataattaagcaacagcattaatggaacccaagtctccactcctataaatgcctgtgttgggcagaatatagattctttctttccttaaaactaaggcaggctggtgacaagcctatcacttagttttaattacagccactagtattctgatgtttcactgaacaaaatgaagaaatccagatgtatttttttccattattatatatatatagtagaatcattaatcagaatggattgttttaaaggtgagattgatctcacatattttgatatctgacatagtagtaagtgtatgctcattggacagctggcagttttaagggattaaaacattctgagatttgtcctggcagaggcagtatgtggaagccactgtttatgttgactttgtgactagttagagtttttccctggaattgtagtcacaggacagataactaaatggcaatatctgggagaaggctgagaaagtcagacatgaaaagtgtgggtataaacaagagagttgagtgtcagaaaactttgagggccttggagtttttgagacaatgtggttgaacaaatggaggaaatacctgttcctcctacttcattgcagtaattaagaagaggagaaaaaggcagagagataagttaaacagtaaatgattgaaataagagatttttgtagaatcacaaaatggatttgaggacttttttaagatgtggaaatacttgttcggatcagacaataccaatgtaaaaggagttctacagtttttcccccctgatttatgtaaagtttatttatttcaactcagtgccttctaagtacaactttaggaattttaggaaatgtgtgcctacttggtaaaaaccaatgagaacaattttgctttctctcggtaaagattaatatagatgtgtatgaaaataatcatctatgtattacactctgatattgtatattggagacctttagaaagttctcattcattgtaactatgaccaagaagcatctttatatctgatagatcaaataatcaggtgaattaggtttctaatgtggtatatgatgtttttagttttgggggttgggaaactctttggaatcatttttctgacaagtgacttacagtgtaatgaatattctttctcctttttcccttccccttccttttcctttctcccctcccttctgtccttccttttttttttcatttagaaagagattgtttctaattagtctgtatgctatgtgctgagttgtgtgatagtacccaagacatgtatcttaaattgtatgcagggtcacctttttgattaagaactgaagagtactgattgggtttcttatataaactaaaggcactctagtccactttgggcaatcaaagaaactaaggaactgttggaattagttttactattttgggggtgatgaagataggataattagaaagaaattatagtctttattgggccagcagtttactaaacttgaattgggatttgtgaaattttaaggcttactgaatatttgctctctaagaacaggatagagaaataatcttgatcttaaaaggagaattttaaattttttagaaagatctcttacagtgagatatcctgtataaccataaagttataaccatcagggatgtccctagttgtgtttctctggcatttcttccacacagaatgagttcatctcaattgttgatgttggtcatttgttgagtgtaatttaacttagggataaaagggataaatatccaactgaaccaaaaaggtaaagtttataaattatctcaaggatactacacaaaagataaaactcaaatatgcctgaaagaaggttgtggattggttgaagttatgattatatataagactgttagaatggccagctgtgaagcaatttgaaatatctagagggaacagcctgcacctctcccacaatagtacctaacagtgctccaacacttccaagtttctgtggtggggaaagaatgggagagaatagacagtcgagggtctatacttggcatagagaagttaaccaaaaaacagttgctgcttgtgttaagaacctgtatgtgctagacattgtgctaagcacttacatgttgtttttaatcctttcaactctattgtaagatagcttcctcccctgcaatacccagttggtttctctaaattctgatttcttttttgccttcttagcacttaaaatgattggtatttatcacatatttgtatatttatttaatgtgtagtctctacactagtctaaaagctctgtcagggaagagaccatgactgttttgttcaaacttgtatatggagtttctagcacagtgcctgatgtatagtatgttcccaataaatgtttgttgaaagaatgagtaaatgaacaaaaaatatataaagacaaggaaggaatgaatgaaaggaagaaaaaggcagaactgggatttaaacagttgatctgagtttggaaccaatttgttcccattccggtacaccagcagggttttatttcatttagaatattctcaattacaaatttatctgataaaattttcacaggttgagctgtttcagagcacctcaaatatttggccctagaagtgttatatcttagtctgaggctgaatgccatgaaaaaggcctgcctagtccttttctcatcctattggaatattgcaaccatcttatggtgatagttctctctagaaatacagattccagggtcttgatttttaggtttctgtttctcctactcaaagagagtgcacttctctccctctttctctgcaactgacccttaatctggtccttgggctgctaagttgactttcagtaatggacagagtgattgttgcctgccctgctgagtttttttcctggaggagaagtgtgtcactgtgggaggagttgggctcaaccaaaggagcacttagcctggcaggtgccaggcacaggggcttggtttggtcttttagcagtgaccccagttgtgctgattaatttttttcattgttattaataaatacaattgagaggaattgttttgtttttgcataatgcttttgaccattttcatgtctttttattccttatgccatctttaaaaaaactttactctgcctttccgttctgctttccaggaaaggaggaaacgtaagcatgatgagagtaaacactttgtggatgtgattaggtcaaacaggaagtagctgtctcccagatatattgaatagatacttatttaaatcttgacaacttaaagtgtcctatataaactcccaagacagtaccagaaacagatgtgaagcaataactatctttacctgaaccaaattgcaatattgaagcttcaggcatatggtagtttattgtttgaagcaggctggcctgcttgcaagttaatagcatagtgagaagtgttctgacactattaggatcttcattctggatggtataaccagtggttaatctaattttcatcttcatctctgaaagctatttaaagatgtggttatctgttttcccagttaagacaaatccttttttggtagcaaatgttttcttccaagaataatgctttgtacctgttggaaactaattcagctccacaagtatatactaattactgacttttttcaaagcacagcattagatgctgcattggaaacaaacgcaaatgtattatacaaagtccctgccctcaagaaccttagagtctagacataattattaaactctcttattccttttatttgtgtcgctagtgtctaagtgaaccaatgcatggctcaaagaaggaaaatgctaattaaattgcatttgttattgcagaggagatacacagaagagaggagatggaatttcctatgcagaatgttaaatgccttaatagagttaaaaatactactctaggaggttcaaaaaatttaagatatatatccctttaagaggaagtacattaagaaatgactttttgatgttctctgagagttgggtgggattttgtcagtggaataggagatgaagaaaggagcatcctgctagtaaggggactagcacaagtgtggggaatatgggctagacgaatggaagcacatagtatgggataggaaacaataagttcaggtggatttaggtataggtatgtataggctagaaaatttagtgtgatcatatcatcgtgatccataaggctaagctaaggcattcggtagatcataggggaccatcacaaccaaatagtccaggagcatgccaagagcttcgcttttgaaaaattaattcagtgaatagttagtagagtggattagagggttaaaaaaaagagaagctacagaagcaacttgtgaggactactgcaaaatttcaggtaaaaggtaaaagatttaaacaagtgatgaataagactggtaagggtatatgttatgggaagcaaaagggaaaggagtcaaaatgactcctattgctttcttcttgttcatcacagtattgaatttttgaaaagtcagagggaaatgattgtactaaatatctcttgtcagtgtgcaaatccatttccatctcataaattagatcctcactgaaaattaacagttttttttcttcccacggaagactgggaaaaagacacagttttaaaggaatgaggatatccttgaaaatataattgccttgaggaattagaggcataacataaatacaaaagatattaaggctaggacctaaagtgtgtaggcagggccttgatgatttcagagacataaggtaaaacttagctaccatgagtatgagaaaattgaagatactagagattatggctttttcatcaggtggctctcacatagggattagtacatggcatctgtgaagaatagaacaggtgcacatggagtttggttacttttaaaactctctcagataaagtgatgactatgactccctggttatattgccacattctgtccttgtccacatgagatatagttgcagcaaatattatacttaagatgcaggctctcttctacttgtccttttcaagatgaggaaatagtgcaggagaacatagtcataagtgagaaaagacttattgaaataaaaattaaaaaatagacttaaaaaaacagaataaagtcaaagtgaccttgttggggatccttgtcattcatattaccttatcattcatactaacactaacattcattcgttccttcacactataagaatatgaactcagagatcttctggacatgaggtgggattcaaaatagaaaaggaagaattagtctggaggagtttataatcagtttgtgagtggagataaaatatatgtacatgaaaaagaggagcaaaaggctactgatacaaaacctagtcatttgtccttgggaaactcattttatatttctgaaaaaattttattccactaagtatagtaatttcagatgggctttttggttgtccaatattttaaatatactgattgatttatagtcttttagtttgcattattttcaaaaatcagtctgctgtaattcttatatatgtttctttatatgtaatatgccattttcctctggctgcttttttcccccccttatcactgtttttaagcaatttgattatcatgtgctttggtgtagttttcttaatgtttcttgagattgaggttatttgagatgcttggatctgtgggtttgtggttttcattgtatctggaaaattttcagccattatttcttaaaaatttttgttcgtgcccctccatattatacatgtatattatgcagcttcaagttgtcctacaactcactgcaactccctgattttcagttcattttcttcatctttttcaccccacattttgtttcattctagattgtttctatttataagtcttcaagttcacgtatttttgtcccgcagtgtctaatctgcttttaattctacccagtgaattcttcatctcagatagtctgttttcatctttataaattcaacttgaatctttaaaaatatattctatttctttgcttaatatattaagtctttcttttagctccatgaacaaatgaaatgcaagtataatagctgttttaatatccttgtccactagttttatcatctatgtcatttctggatcagtttcaattgattgattttccttcatgagttgtattttgtttgtgtggcttcttggtatggctggtaaatttttattagatgccagagagtgtaaatttcacgattttaagtgctcagtatttttgtatttctataaatatttttgaacttttttttctggtatgcagttaaagtggaaatagtttgattcttgcttttatgctctgtcatgctttcagtgcttgcttttaagctctgtcatttggaaccaggatggcctttagtacagggatcattctcttcactactgatgcaataccattctaatactctgatcagcgttccttgtattatgaagctttacacttttgatgatgggagaatgacctattcctggccttggatgagctctggggtttgttccttctgttccttttaagtgtatctttccctaaccttggttagtttcttcatatacatgtactaatcagtacttgcttaagtttttgtcagactctctgcatatctctggaactctatatgcaggtatctttttgccattgctctgctctacaaactgtagataccttggctcctctagactacaagctccatcttcttaactcactgaagttattagagttcacctctgtgcattgcagtcagtagtttctctctctatgcagtaagctgggacaattgtagggatgacttcatttgttttacctttctcaggaatcactatttttttgctgcttcctgttttcatgtattttgcccagttttttagtagtctaagccagcaggataaatctggtcgctgttagtccatcttggccagaggcagaagtcttcacaaatgtgaggaatgttacataatatatataaagtatgcattttaattaagagtgcttcacacatagaaagtattcgataaaagatggttactattgctgttcctcttcctgcttcctgttcatcagtgaagctttatcttatcaagcctcttatatgaagccttcctgaactacttatttcccaagtgattgcttattctttattctttgtacccatattacttttttgcatactttaaaaataaatttttaatttttgtgggtacaaagtaggtgaatatactatgggttagcatacttttattgcaacatttacaaatctatgttacaaatatttttctgtgtcttgtggcagattgtaagctcttagagaaatatctgccttgtctacccatccctagtttccaacatatagtaagtgcttaaatatttgttacataaaagaaaaactgagtgtcttatgccttttatgaaatcttcaggaatagaatttttgattgggaaggaaagagaggtggtttggaaatctaagaacatttgagtaaatgaaagcagagaggaaagtaaggttttggggcaccagagagcaacatgagagcaaaaggtggttggttgaggtgtgtagtatatataacatcattatatgatatatattatcatcatcgtcatcatcattatcatcaccatcaagttcctgtgaaggtgagagtatagtggaagagatatattgtgatgtgtcaatgaaacaattttgtgataccttcagcacaatgctgtaatatacatgataacattggtaacattacaaaatgcaattgtgtgagtcagtataacttcaaccattgctgtaagggcttttaaacaaactgctaaaactcaacatactttttggagtaggtggaccttggaagaaagcggtggggatggataaactaagaagcaaaaaagaattctaaataatagaaaatagcataaatgcaaacatggtgtaggctttaagtaagcatagtatagcagcaagaacaaatggaccttggagttgaatacactagggcttcacttgatgcaactctgatcaaattacgtggcctgagtcacaattccttcatctgttaaatgggtatggttgttgagaagattatatgatggatagagaaaatttattatatatttggtaatagtgggcccattaactattagtttcttttgttttagacattctctatcttctgatgaggaaaggaaaaatgcttcaagaaggactttgtgattccttatcactttgtgtaagagcctaagtataatatacatgagtgtaactgatgttcacatttatttcctatttccatggcaaattaggattgcattgcatttttatgatccagtactaaggaggcctacatcatttatacacctaagtttttcacatgttctaggtttaacttgtgtttaaacatattaggattattaagttttatgcacaaattaaactattttactaccacaattcaatatttttcaggaatgcttctatttataggcagcatatctattgaatgaaagattgaaaaacagagtatcagaaatcctagttttcacaagtcttgaacccttttgtattcatttattcattctgtgcataaaaatcagtttttatttcactttcccatcaagatagaatataaggtatgagtaaagtttaaaaacctttgattttcaaaaataattatactctaaattcccagtttataaaagactacttttaatgtgcacttacccacaaaactaatttggatatatgggaactttgaaggtggttctagcatagaaacaaggaaatcttttatttcttcactggaggaaaaattcaggactccttcggttaaataactatgtttggttaagagaactaaggaatttgcccagtcaatagaatacatcgataaaccattgtcattttggagccatttttcagcaccctttttggtcctcagatactgcattgacatacataactaatagattttgtacataatgctgttgatcctggcaaatgaacagccaccttaagtcatctgcctggtatctcgagtgacttggcaaggatctggcatgaggtgtcacctgacttcatctgctcctttcactacagactggttctttgcatttataaacctcagtctggcctcaatagtggtttccttggttgagagtcatcttattttcagctgaagacatgttacctccaggatgctggtaaacatgttgcaagactaagttctgatgaatctcacaagactcctctatagagaatgaactgaaaccgaggagctgacagtgttaataattcagcatttggcagcactgtggatattaatgcatttgtagttcaccttgacaaaccttggcccaatcactaaaacggactaaacccatcactaaaatgagtttagttatctcagtttagtctctagtgagaattttaatatatatattttaaacctatagatgaaataaaaaaatgttaatctcctctaagacatacaaggttcatagccccctggactatgtgttatgaaataaaatttgtgttacaataaatcgacatcttgatttagtgaaaataaggtttaagaatttttatatcacattatggctgatttggggtatttttagttgcccattcattaaaaagttcaggtgaagtacctattttgacatttcaggcaaacatgtaacttttttctttaagcaaccagtaatttatgtactctatgcaggtaaactatataaagaatttattagaaaaaataacacatgttaatagtaataaatacatataatagttaagtatattcagtacttaggacttaaagttattttataaaaattactttcatgggggaaataaatgtatcttcttgtattaaaatgccaatggaatgacacaattcctattaaattattaatagctccaggacacacctcataatttgggggtgcctaaaaataatgtggcaatggctggagtggaaagatcctgctccttaaaatttgatttgttgagctgtctgaataatctgtgtccttctgatacataccaaaaacattttacaattgcaaaggagttattttcaagctttctctagcccagcccctttcgggttgatatgaccactttgctgtcagattttctgcgttgaagagtagaaatgaagaatttaaactattatataaagaaaaagtaattttatataaagaaaaagtatttatataaagtaaaagtccttgaagtattcaaattcatatttctacttacaaatcctaattattcaagtcgaactacaaggggttaggtttatacttttaaaatatttaaaaaaattttttgtggtgataaactgtggtttacattatgtggtgaaagacacagacaataaaactgaaaggaagtaaagaaatcaaattgagactattttgttttggctctttataaagctgatttaaatttttaataaatttcagtagtcagagacttatatttaagtattatatttttattaacataaatcttcaagtgggaaattatgtccacatgataaatatgtggggttaatgaaggtaatttgccacctgtgtcatgaagcatctccttttgacccgtaagtaaaaatttctaagttttcttgctaagtctttagagtctaagagatcagaattaaagggaaaaaagtttagcactataaaaatctcagtctgccaagaaatcatgcataaggtctataaataagtagaaaggaattagaagtatgttttaaatagcagattggatcaattaaaataatttgtaggtgtgtcttccttatgctatggtagtaataaatggcattgtgctataatggaatagatcttcaaccataaactagtttggttactttggctcaatttctttccacttctgttttccttgcaaaggagaatgcactacatttctgttagcaatgtaaatttctcttgccctggaaaagtcataaagtccaactcgccttttgacacagtctatctaagctgcttggattaggtaaagctgatcttaaaagagaaaaatcgggtactcagcaaaccctagcagatattttgacacactcttagagcttgcaagagtcatcataaacttaaacattacctttcctagtacagaaaccacaataataaatatggcttgaatattttatgaatgactgagcaccctgctttgctaataagtcttctggaaagttatgacttttttgggatggctttattttggaagaaggagtgttcaagagaagctactgatgaggtgtcatataattttacaagttgcataactgcttttaactgctaactatctctgattaaaataacaattgagcttgtaatttttttctgaacagctgctgctacaggggtcattaccttggagagctaaaaaataattgtactcctggtacgtgagttatgtagtcttgtgttttacagcaaagcacaaagtttaaaacctatagaagaatgttatttgaaagctgtcaaaccatgttaaaaaagactgcatcatcaaaaggccctagtggccacgattctgcatgtagccttgtcttattcattataaaatgcatgtttataaagttccacagagcatccaattcccaattcacttatatcagcaagacttaacttgctcattaatctaaattcttttgcaactttaatctacatgtttaattaatcataaaatgaggcggtaagtaatttcagcaatgtgtggcttgttatcagatgcatttaatcactcttctgtgagctcatttggaaacacctgaagatgtcgagtgcagtttgaataagcataaattattctttgtcagtgtacttcactcaactaataagacattaatttaaaaggcactgtttgtcatttttagatctttaccaatatttttagcttagcaatataactctaattgtatatatgattcacaactagtgcccgacataggaaagggtaagagtttaattcatttttcttatttacatgtaattatgtcatgtaatcttagtttttaatgaggattaaccatcttgtaagtattcatatgcttttggaataacgtactaatgaattatagtaggaaaaattatttgttggtacaaaggtttgtgattccttgtttcctgcctaggttagaactgaaaggaggtgagttttggaagagggcatagatttgaggatatgggtactacacaggggttataagatgcagatgttaaccttaaaaaaatccaagtaagatagtgatattcacctgtctcacataataacatatatagcctttatatgggactaggtagcctaaaataataacagtcccattttccccctagtttcttaacagtattgtacagttgatgatggtattttagaaaaaggcaaaaatagccaagaacaatagtaacaaaaacccactcatagcttcagaggaaaaaaaagtcgtgagagctgaatgattatacaccttgatatcaggagtatgggaataaaaattgcgttttataggatgtcatcacctgtcctgtttatgccatgagagcagtgacacacgtaagaataattatctcagtggaaacaaatttatttacctgctgtggagcatccctgttcatcttactcatgaactcatctccctcattcgttatctatggattgtcagcagtgagccagaggggatgattcctaaaaagggaatattggtttgagttgaaatatagccatattctccatttttatttgatgtgcacatctcctgggcttcttccctttcttcagggatcctttacactgagctaacagttatttatatgtccatttttttgccctgtgcctcatgactatgtaaaatttttttcctcttttcttttctaagggaaagcaaagtcccaggaaatctcatttttacagttcaactcatacaggccatagcagcacattgaaatgaaatgccatttacctttatttcacttaaagcactacagatttttttgttttagaactactgaagaaaacttcaaacagtggaggcttcctcaaaatcaagcttaaaaaacatttcatttgaacttaactttcctgataagaatattcttctcattcttgtatagtctttgtgaataaattcatatagtttaatatgaagacttactgttagtttttttgaacatgaatcctcaagctttcttaactcccctttccttggaaaacctaaaataatttttccaaatatgtttattttctaatttcttgctgtgggtgcaaagaaagaacaaaggctgcctcccctaagcccaactcatatgtgagaggctgccctgttgtcctattaagtcccttcacacagacatggatttatttgataaaataccacatgttaactgtagctttttgttctgtgacatacttcaagaggaaaatgataaatttagttccatgcagcaatatgtatttatgcagatatatcccactacaactttatccagctgtactcaacacacacatactttgcctcatcacaaacaaggccatatcacttaaacgtgctttttaaaattttattttatttatttatttatttatttatttatttttagatagggtcttgctctgtcacccaaactggagtgcagtggcatgaccatggcttgagtagctgagactccaggtgcataccaccatgtctggctaattaaaaaaatttttttttgaggtggggtttcactatgttgccaggtctggtccgaactcctgggctcaagcaatcctttctcctcggcctcccaaagtgttgggaggcatcagccagcgcacctgaccttaaacatgcttctttaatggactacttcacagttgattaggatgcacaatacccagaatgatggactgcttcagcaggtgcagctgaatgaataggccttccatccccagctgcactgacaggatggttagtagggctcttattttaatgcacaacttatatggctgaaggacagcatgctggtaaagaaagatattactaacggcaaagggagtggctgaagaatgagtaagtaacatgtacacattactccataatgtggctggataatactatgtggtgtttactagcatgtgctctgggggaaggcttttggaagtccttagcagacatccaatcttcagttgctgtgggacttcaggctcattagacgaatgagaatgtcagggtgcagttagttacagacaaccctctgacttcatgagtcttgatcccgtatattaaaaatgggagaataattatatattcagttataatatatgctacctcagagaaagttctcccctcaaaattattattttttggagacaggatcttgctctgttgtccaggctggagtgcaatggtgtgatctcggctcactgcaacctctgcatccctggctcaaatgatcctcctgcctcagcctcccaagcagctgggactacaggcatgtgccaccatacctggctaatttttttatttttttgtagagacagtgtttcgccatgttgcccacgctggtcaactgctaggttcaagcaatccacctgccttagcctcccaaagtgctagggttacaggtatgagccactgcacccagtgcccctcaaatcattaaacaagtaaattttgttctaatttttactgaaaagtccatgtgttcttttctacaaacattctcataatttatttccatgcatctttgctttggatcctagctttattggtgaacatttatgcctttctatagcaatctgggttttcttagccaattgaaatgggcatttattagatcatttaagcatcatatcaatatagtatatttggcgactttatgataagttcttatgatagatgttcaaaactctgctcaggtgacatttttatggatccacatagtttttgtcatatatgaaaagaaagcattgagttgtgcagatggttaaatgtgcattgagttatttctctggaatttgcatgagaatggaccgacttgtagttgtattaacttttctagtgcccaggttagaaagtttgatctgtgtagtttttaaaggcagcatccaaatcacttatattcagaagaaaatggtaacagatttagaagctgtctatattttccccattatccataatacatattattggcaatatggttttcactctttgttgttaacgtatcaacaatgtgcaatagccactaataatcatttgttaatgcatgcttccaagttctgtatttgaaaatctcagacttcatatatggtaagtgatggagtaatttataacttttatgttgaattcttgctactttaaaaaattgtgcttctccttttttaaagcatatgacttacttaacagctgatagtcagttacctggatttttagtatttttttacatcacaaaaagatttctctgaagtttgcgcaggggtctatttgtaggcagtttccaacttactaataagtaaggttctgaaagttataagttagctgtctggaatagatagtctcatagaaaccaggttgtagatggtgatttggttccttgggcaacctactgaaacccatttactatataatgtggctgaataatattattgatagtgctatagtatttagcaactgtctgtcaagtgattttgaactctcattttgaaatctaactttcatagcattattctgatgaatttttggtagtgcgatttgactttttctacctccattctaccagttcacagtgcattctagcagtggaaatcaaaaaacctattgagatggaatttgggaggaaaggaggacttactgatatccctagctgtagaaagaaagtaactgggtatcctgtctgaaagaggaaggatgtgatgatcttcatggctctgttgtggagatgtatgtctgcttatacatggcaggcaaccaattggaggtttatatattttaaaaataaagaaggggcggccgggcgccgtggctcacgcctgtaatcccaacactttgggaggccgaggcgagcagatcacggggtcaggagatcgagaccatcctggctaacacggtgaaacactgtctccactaaaaatacaaaaaattagccgggcttggtagcgggcgcctgtaatcccagctactcaggaggcggaggcaggagaatggcgcgaacccgggaggcggagcttgcagtgagccgagatggctccactgcactccagcctgggcgacacagcgagactccgtctcaaaaaaaaaaaaaaaaaaaaaaaaaaaaaaaagaaggagcattttataattttacactgattagccaaaggatggagaaacccaatacttctgctcgttcaccatgcctcacagtatattccaagtattttcattgtatatcttctacttactctaccaccctatgccccacaatttggactcttggtttttaaatggtagtacaggtaagagtagttaagtttctaataccagaatagttttgaaatatattattgttattatcatcatcatgtagagacagcatctcattctgtcacgtgggctgaagtgcagtggtgtaatcatagcttgcactgcagccttgaactcctaggctcaagggtttcttaagccttagtcttaatatacagctttataagtgtgcattactgttcacagctaactttaaaattgttttttgtaaagacaggatcttactatgttgatcagactggccttgaacccctgggttcaagggatcctcctgccttggtctcccagaatgcagggattacaggcataagccactgtacttgccctgtaatatattatttaataggtcttgtatgagatagggtgatacattcgtataggaagtagctgaggttgaccacaaattaaatattcttaaatataggacaattcacttaaatgaaggatagtaattactgtttaattacattatatctattaagagtatcagaagaaagtcatatgaaagtgtaagtaggtgatggaaaagttatctggtcatatcattttgaaactcagcaattttgaatcatattcacttctttcacttgaaatctggaaaattgcactttttttattgccaagggggaaagttgaataaaaggagggtaatggggaaaaaaaaatgagagtagtgatattgaaaaggctctaaagattagtcagtttcaagataacagtttgatgagttatgagtaaaatagaaagaatttagtttcccaaggaaacacatgagctcaaagtgtaggggaaaggtgcttggcaatacaaatcatgtatttttattaacctggagcatttgaaaaaatatgcagaaacatttggcaaactgaaaactcagctgacttcatgcccaccaaccaagtgaaaaatctgattcttcttcctctaagcacatagctgggttcctcataaacagagttatccagtgtataggttgcagtgacaagaagccaacagtgaagtcaaactcataagcatcctatagaaaatccctcaaattacatctgtgctgttgccagctgtactgccagggaacaagaactgtacagatttctgtgcaatgactgggttacttaacacaacttgattagctctgtttctgccctgtctttggctgacagctgaccgccatactgatttggtggatgtaagactgaagtgaatacaaccacttatatgcaccttcttcttgtatgctatcactgtcttgtacagtagtcatgctgattgactccaaaaattcattttgtcactcattcaacacacagtttgaaaactattgcattaaagtaagcaaatttttttccctgttttgatcttcatattatttagtctgccattgttttcaaagaactaagtctcctccacaggaccttaattttattgcttgtttgaataaaatcattaggaagataaattttgtactctactagtagtgtataatctattaataacagtatgtatcaagtgattaactgtgccagttctgtctatctctctctctttctgtttctctctctatatatactgaagtgaatacaacagagagagagagagacaaagaaagaaagaaagaaagagagagagagagagaaatagaaggagagagagaaataattttctcacttaatcctcataattaccctgtaaggtaaaaactattactgtacccatttttataattggggctcagagtggtagcacaaacttttctgatagcacagtaaatgatagagccagaattcatattcaagattggtttattcaatgactgtgctcttttcctaaatcctaataacttcctaattttagcttaaaaattacttaattttttaaagtaatttttaattttttgtgaagagttgtattgcaaagcaaataaaaacagacttttaatgatgattgttgcatatttttaataaagttgaaacttcttgataaaataattttttccctgcacagaagaaaagaaaaagaagggaagaaagggaggaagggagggtgggagagagggaggaagaaaggataggaagaaaaggaaagagaggaggaaagtaaagaaagaaacagaaagaaagaaagaaggaaagaaggaaagaaagaaacaaagaaaggaaggaaggaaaacagaccctccagaatgctggatagaaaaacttactattcttttaatatcttaaataattaaaccttgtatgtcttctttttaagtaaaaaagaaatagataaatatggaattacatcttatgctacaggccagtatattttagcaagtcagaggaactcaaacatgaatgaagagtggaattttcctttcattttctataataactatgtttattgaagagaaaatggaggaaaaaatgaccatcacgcctggttttgaagaaaaacttgtttatgtgcgtaatacattggagaaattgtttgggatcactttaactctgcagaaatatgaccactaaaattcctaaccaaggtgtggggctatcagatccatgaagctaattaaataaaatgagtatttgtgaaggtaattcgcttacctcatttttccagtccctttctgtaaaatagaaaatattttaaaaagaaaataacgggtgcagttggcttttatgatctctttttccctctctccaaaccctgccacatttctaaatttaatagtaggctatttctatctttgtctctcctactttctgtctctttctttttccttctttctctcctctcctttctttcctctctttttcttctctcctccatcttgtcatctcttttgccccttcattttgcattcttacatgcaacccttataataatctccattgtaatcttcattcttttattagaaagatgattcttgaatcatctaggtaaggtaggtgctactggaccttgttttggctcattaaaaagataatctagaaaaataacgtctattctgcctttttgcatctctgtctttctcccatatcccaaacacacactttcagaaaggaatctattgtcctatttctggaaaatgttgaaatgttgccctctactttgttaccttctcaggagtaagattggtctgtagatattgtatgaccattagagaaaaaccaaagattccaaactaaaatttggcattaatccaggtacttctgccacattaactataaataaacctttgtgggcatacttttatacaaggagatagacttgttcaatatgtaatagctatgtgatgctaccccagaggagaattgaaaacaggcaagtatactagatctaagcttcaatgaactcagggtcaggattctaaaaccagcctcctcaagggtactcacacaaggtggaataggatgaccttggattaaaagtattgcacaaaaatatgctttgaggaccagaggaaggtaaggagttctttcagtgatgatacagtgcagtaagaacatgatcagtaataggtaaatgagatatattgagatgtttcccaatagctctgtgggtacacagatttggtttatgaataaggatataaaaatgcccacagatacatggctgcaaccatgttggacgaatatgcaaatcatggggcaatttaaagtgtgttggtaggtagagtgagttgcagaacaagaaattaaagcattagtatattcagatgagaccggagatgaaggagaacagtaattgttatttgttgggaaataatttgcaaagttggtggattatgtaaatgacagtttcctgacttattgagtctatagtaatgggtctattgttactctagtgttaccatgtttatgtattttaatgtgaatctctatgtagaatgcaagcccatgcatttttagaaaagtattctattcttgattcaggattcttctgggtcttagaatcatataatgctatcaaggtattacttccctataacaccttaggttcactagttattaaggtgacaaattaatttttatgatggggcaagtacagaaaaaaattgagcatgatttctatgtggaagttaactttgttttgttacatgactttgagttttacatctaaccatgacctttttggtcacaagtaactggctgagcgaaagtgagcacatttccagcaatctgtaacccacttaggcagacctcatcctcactcttcgtcactcttaatttcactattaaatttttaaatccattcaactatttctaacaaagatacacattttgcttctctctttaacctcttattaaatagtctcatcaaatatctgcagagtggagccaattgtgcacactatgtcagaatgattctataataacaacttgctttaggacacattttcttagtttatgtgttttcagggtaagagggagggaaggggactaacttgttttgacttacatacattatgttatctcatttaattcttataagaattctgtgaacaaaattgccacagattcttatgtaaaggttaacattttaagaagatgccaacttatccttgccattatagtgggctaaattagtgagaaacaagtaagaggtaaagatataagtgagaaaatgtgaaagataagacatgagccattaccatttgccttactgccacagcgaattatgggaaataatggacctaagggagataataatactgtaattactattactttattccatgctatctcagaaaagacaaagattcattcttctgccaatgtaggtaagagagtgttggcagaaccacagacataaaccattttttaacacattcgtataatttgacttctgacaaatggatcttttgatggcaaagggattttgacagaaaaaatgatatactaaaacaacttacttttttttttataacagtttttgcttcttgttttcttattccaaatctcattaggtaataattactaatttttaaacaaaatacaaaatacttaaaaaaaggtcggggcaatttttttttttttttttttttgagacagagtctcgctctgttgccaggctggagtgcagtggcacgatctcggctcactgcaacctccacctcccgggttcaagcgattctcctgcctcagcctcctgagtagctgggactacaggtgcccactaccgcgccaagctaatttttgtatttttagtagagatggggttccatcatgttggccaggatggtcttgatctcttgacctcatgatctgcctgcctcggccttccaaagtgttaggattacaggcatgatccaccgtgcccagtccagggcaaatgtttttaaaaatatagacactacatattgggcactatgctcactatcagggtagcaagatcatttgtacatcaaaccccagcaatatgcaatttacccatgtggaaaacctgcacatgtaccccagaacctaaaataaaagttagaataaaatatttttaaaagaattttttaaaaaagaaaaaaatagaggctttctttttaaacttaaaaacaatttgtggagattttgtcaaggacctagcactgtggttggtttacaacaggtgctaaataaatattattaaatcaaaatgcagagataaagatgtgcatgttcattcattcattctttcaatccacagacatttatggagagcctgaaatgttccatatagacatgtttgagatgtaaatgtgaatagcatactaaagttagttttaagttaacttaaaactctaatgtagagacaagtaaaggagaaatcatagcagattagtcttagaattgagatatgaatgaaaaaatatatgtagaaatgtgtaatttgtccggaagaactggggggaagcttcattgagtaggttaacacttgagctaccttttatagggaattatctggagaggacatggagataaaatagtctaatatgggggtataatatttgtaaatgcaccagacattaaaagggactagtatattttaggaattctaaaaagttcagtatgattgctgcatgtggggcagagggaatgggggaaaggattgggctgaaaaaaaattcttgtgattttggtggtgcacttgattatttcctgatatgaacctggaaaatatttaatttcaactaattaattttgataagatacgtatttttctagggaattacctgttttattataatctcctgacacatactttttagtgcctttcttacagtagatgagatgttaaactgttaaaatgatgaagttgtacggagtgtgatgtgatatgaaaggactttggaatgatgtattgcaaaaattgctagtcatttttccttaaaatggtcctttttgagttgctttttgaattttcttatactttgctagccaataatttgctaaagcaacttgtaggtcagtcagatgattccaaattctaagaagtaaaggcagtagatatgcacataaatataatttatttttgtttaataatttgtatttatatatttaagagaaaaagattaatatgcaaaatatgtgaatgcatgtcattttaatagcttcagggaaatgttagctgggcataactttggtttcttcatttctgtgttacttgtgatatatacttttaaggctttattccagaggcaggtttcattttcacataagcataaggtcaggctttacaatatttgttatttaatttttcttctttcagagaaacacctcagagtctccagacttcattttagagaaactataatttcttcaacttgaaattgcttgggtaggtcactaccagattatagagagcatgatgtgctttacaagttgaaaagttttccaccaagtaaatagcagcagtgaaaattgtcagagaaacaactaattaatctctgctcctttacagctgtttaatgcaatgcataactaaaagtcctgttaaattaattaatgatttcaattatgaacttttctccaaaatgttatgatttgtatcaggctgataatgcagtgacctgggagtgtgagatctgtgttatgaagagagttgccagttaattgattcacaaattatttaaagtttgttgcacccaagggagtgctcagtttcacgacagtcatttcttaaagtgtacaaactcctttttcaccttaagaatgtcttcagttattaaggatgataaaataccggcgtgtttctggagctgtgagtaatcttaacatttatgatttagaatttgtaggggactatgtggagattaaatctatgctggaaggaggaaaaagttatgtaagtttgttaatgacctcttttatggcagcttttttattgtttttgttttagtcattttaaatagttttctaaacatcactgtttacaattttcgaatatttgccatacattgaggatattttatgttaaaagatatgcattcttaagatatgcattcttaagaaattctgaatagtaaataatataaattgctttgataattggtatttgaagcatttggattgctgcagggaggtgtaacttgatgctagccttcaatgttggagaggtgctgacctctcaatacaaaagcatcaatatctacaggacaccttgagtgttttttgtagcatatagggaaaaattatatacttgcttctagtctggttattttacacataacttaaataacaaataaaagtgtacatatatgtgcactgagaaggaagggcatcaataatggcattaatattttataatacatttattagttttattaatgtttctgtgctgcacttgggctgatttcagagtagatggtatggccataagcaagaaccctttactgagtgtacatgtctaactgaggtggaaggaaaagaggtggtacctgaggagagattcttaagcaggaagagagggcagcaggaagtctctggatgtgacatgaggggtggctatagtattagtgggctgtagaatctcttctgttctacacacatttgggcttcatgaatagttaaaaatccagtgcttttagggtggctgaaccatacccttagtagtttcactccaatttgacaggcagtatgaaaaagtcatttttcatttaatatgaaaaacaaattttccattggagaaatttgtctctcagccctgaatgggtagatgtattttcaggatggagcaggaaacttgtattctggacagacactgtgtttgcagatttcacttatcctggtaactcttctgttttacttcttacatttttctttttaatccaagaaaattgcccaaagtgaagacaaatagagaaacagtattattaaaaataagtttatctttgttaaacttgctgcagggcaaaaagaaatggacttgaaagggaagtaaatttatactaatttttgcattgtaggaaatgtactattttagacactgactgactgcttctgttttctaaaattaaggagcctataatctcagcaccattaacaagtgctgtcattcagatacacagtgtctggctgatttaaataaaatgaaatgaagatagttgtttctggtcccttggcttcactcattgccataaacatatgctctgcgtcctgcttctttccatcttatttatgactttaatttgttgtgtgggctgcgctagaaattaaatttaatataattctccaagggaccctgtcatataataacatggtaatttctgtgtatccttttgaaaaatgaggaaattaattcttcctgacatgttctaattattccagtgtgaacggcaaatccgtttttcctagcccctgaagtgttataggcaaatggctggtgttcaaagctgaggtgctaatgctgaccagcagtgcgtttaatttgaaacatgagcagacacctttcaacacacctttgtaatattggagtactttacagaaattaattcactacttatttgacagcttagcctcgaggttatgtttttttattcatcaatgctatagtcatgttaacatgtttcctgtttccttcagtgcttggtgtctatatatggaacttaaagtgtgcaatagatagtttaaatgtatgaaagtggagaatctagacacttcagaaataccagttgtatgccaatctgtgtttacactttatagagaggtgtagtgaggtcttgaatgttaaacttaattatagtctatggttggcagctttaactgaaattacatagtgtaggaattattgggacaatcttgctgtggaaagacaactgtatactgtttccctgctgtaaatttcagttgtaaaaattcaatttcttacacagggaatgataccatgaaaagacagtttgtgaataaaattttatggaagaggaatctcaagatctgaactctgccaggaaggaagtggctatactttgagagataaaggattaaagccattttttggtgctgtagctgtgtaatttattattcattcagatcagttggaaggtctatatagtattctttagaggaattacaaaagaacttactttatccataatctttattgtgaaactagctattatatacatttctctaattaggtcaatcatttgtgtcagccctgatacaacttctttgttttagtgagcagttgataaatgccattacacattggctatttattgtggtataaaatgaatgcatgagattctacttaaaatagaagatagaaatacaattaaataaaagaaatagaattgtatttggagtgactgtaattaaggctctctgtttatctggttctgtatctctgcattacattccctttacgtttcaacttaaataggagaaatgtgaatagtagcataattattctgataaatagcattaatattgcccatagtttttctgttggccattcagcttttagatatttaatttcattttctctgccaatctactggaggctactgcgaaatttagattatgaagagtgaagaaaatgatgaaaactctctgtcttatctttctcttatacttgcctgatgaaaaaagttcttttggctagaaatttggaagaacataacaatatacttcttcctattcacctacatgctctcctgtacttcttgtcagaaggttattataaggttacttctgtggcatttaaagggtaggagctggaagaggtatcaggaggtaaggagcgagcaaggggatctctttttagacctagggactataaaggttgctcaagatttcctgatcatggacttctcctttgtgccctagggaaggaagggaaatctgctgcccctctggcccctatttttcttcttttttttttttcactgatattgtagaaagagtatcaccaaacgacagagataggtagatcagatcctgatcctattagaccagatcctcttcagagcctgatacactatttatatgggttctaagaaagacttgaagatttcctgtattcctaacattcttcaaaataaagaattcatagaaagttcttgactaggttagaacaagctgctcatatatccaattctgcatatacctagttccattctctttctaggaaagaaactacaaacatttttacatgcctccatctctggatgctgcaatcagtgtgtccagcaaaataaatgaaaagaggtaaatatcgcccaattttgaaattttttctcttaaaatattacttaggttcagtttttagtcattttaatttttaaaaatctcttattataatttcaagttgatgtataggaaatggttacacttatttctatatactctttacttgaatcaaagcaaattgacacatatgttaaattttatttaaaaataagttgcagtttattttgcatatatagtgtatatatatgtatacacacatatacacactcacacacacaaaaacatacatacttccaaaaggcctatacttgatttgtctttccttattaaactcattgataaccttctttttaaactagtaggtttgtttcatacatcaaatttactcattatacaggcttatccaatattgtttactgattgatggctatagttaagaaaaagatcttccctacactcacacatgcttatatttttacaataacaacttttattgagcatataccatataccagacactgtactaatcactttaaatgaattgtctcatgtgaaactataagcaactctttgaggtatttattatatctattttcccagttttatacatgaggaaactcagcacagacaagttaaataattttccccatattatgtagtttacaggtggaagaatgaacattttaacacatcaagtgctgagaagagtgcctggcacatagtaagctttcactgaatgttagttgcccctgtttttgtggtagaatgctatgggtcctgaattgcaagaatgattttaggagacttgctcaagagaaggtgatagagaaactaaactacttagtatttaaacttagcttatgaacctagttacttataagacctttaatcttaattcacataaacagatgttctttgagaacttgcaatatataaggttctcttttaggtactacaaggtatataaaacatctctgctgtcatggagctcacaatctagtggggttgggtatggggatatgggaaaatatatactgactgtaatactggatagaataagattaattttaaaatagttcaggagagagaatttctaaggcccttacctttttttttaaaaaaaaaaatagagacagggttttgctctgccccccaggccggagtgcagtggcacaatcatggctcccttcagccttgagctcttggggtcagtccacctcccagccacccaggacttaaaaattagctgaaactacaagcttgcaatgccatgctggctattttttttttttttttaatttcttgtaaagatggagtctcactatgttgaccaggctggtgtcaatctcctggccttgaacaatcctcccaccttggcctcccaaagtgctgggattacaggtttgagccaccacagttggccaggcccttacattcttaaatgtgcctacattttttggccagattttatgcttggttcacagagaaggctaggattccatgaaaagatgatagtttggggacagaacacagtggagtggctacatgcatattgaatttaagaggctacatatagcaatatgtggagatgtcagacagttaaaatgagagcgaagtgtcatttaccgaaaaattcttatgcaagaggcacaattattcactgctcagaatctattttctcatttaatccttccaacaacccagtaaagtagatattattattacaaaacctattttacagatgaggaaactgagacttagaaagattaactattttgcctgaagttgccgagttggtggatgacagagccaggacttaaaattaggtgtacatgattctgtgctcttaactacaaaattacattgtgtgtaagtatgagtagggaactcaaaaaagagttctgggctagagatagagatttgggagttacctgcaaaggagtgatagatgatatatggctgtagacagagagcgagggaagagggaggaaaggagagagggaaagagcgagagaggaaatgagagatagaacaccttaagattgaaatcctgggggaatgataaagggagaagggagaagagcaatgaaagaatagagaaaaataagtttttatgtcatggaagtcaaaagaggagagaatttcagtaagaaggaagtgaccaacagcaatcactatttttttaatttttattttaccttgagttccgggatacatgtgcagaaacatggtttgttacataggtaaacgtgtgccatggtggtttaacagcaatcattattgatttgatatatgagtatcaaattctgttgagaattttagaagaatgaggatttgtcaatcggagcttgttgctaaggccagggctagatggcaagggcctgcactgtgaggatgttgatgaggaaatagtggtagagggatagaacactttctaaaggagcctggtagctgaggtagcaagtgactggggcaatcccttaatggagagagaccactgagggaagggtctttttttggaatagggagaacataattatgtttataaacagtgggaaagcaaccaggaaagaaagagaagggagaaggaaaataaaaacaaaaagaagaaacaaaaagggagaagaaacttttttttttttcccaatttgaaatagttttgctgaaagacttttttggtaggtgtattaatttcctagggctgctgctgctgctgtaacaaagtaccatcaactggttggcttcaaacagaaatgtattgtctcacacttctggaggctagaagtctaaaatcaaggtgttggcagggccttgatccctttgaaacctgtagggaatcttttttttgcctcttcctagcttctggtggtttgctggcagtcactggctcttttagatctaaaattctatgattctgtgactaatagacggtattattacagagttcatattcttaaagggaaacttacatacaagttttatgctttggctattagcctgcaagttggtgttttatatttatatcattatgtgaagacaatttaaagataattcggaatttgcaaaagatatagaaccaattaaaaatataaaatatgttctaaggctaacttttcagtttttaaaatcacaagcctcttcagaagaaattaaatttgattacatttaaaatcatgtgatttaacacagaaataaatatacatatgcaaatttttgtaccctgaaaaattattggtattcatatgcctttatttttaatcaatagttattttctttgctattgcaatcagactcggaagaattaatacctgcaatttcattggcagtgcagatgagctctaaataataactttaagtttcaactgtggtgaatactattatttaacttaaatattgaactatgaggctgcgtaatagttgtatacttatgtcagctggttaaatatttaagttagactgttattattgaatattttatataacatctaatataaacttgatcattaaaaaggaccaaggcaataattaaatatatctttaaatatttatgactgccacttttttgtggctgattttataaattgtagcatattttctctcaagtatttttaatgtttagtttatatggcatctcagacaaatatttggtctagttttctattcactttcaaaacttttattgagcacttacttatgaacaacgtattctgctaagggctaaggatacaaatcaaatagaaaagggccttttatgtcaaagaattttgtaggctggagaggaagatgagacagatacataaacaattatagtacaatatgatatactgcactaaacgtctatataaagtgctatgagagaatagaagaagaaattaagaagacatgtaaagggaattatcatcaaagcagtgactttgagtcaggtattagtagaagagtaggagctcaaagaaagagcaagccccataatggcagcatctttatcttgcacactagtctgtctcttgtgcctgtaacaatgccaggaactttagtaactatttttttttgaattttgacaatcttggtcgacaagggtaaaaaaggacattccagaagcagaaaaacatgagcaaaagtatggagacatcaaaggtcatggcatatgttcgtttatcatggctggaatgaggggtatgaggaagatgactgagagtgtgtactttggagtcagtcagagcagagttgacttcattttatgctacctttatgattgtgggtaaaatgctgagcctgttttcctactttaaaatataattaatatttataatgttgctaaacaaattgcctggatgtagtgcctggtaaatggaaagcattaaattattaagcaattattacttttttttgagaaagtgatgtggcctaagactagaagggtacatatggttaaaatcctgaaggcctttgtgtcttattaaggagtttgaactaccttgtagatgattgagagctgttaaattttagtttgctactgaatattagctacaacatatatacaaggcactctgaagcggagatttaatagtttataaactgtatgttatccttttcataatattctgttacataagttcagcattcctcatcctgctcatattgcttaattatttgatgctcagtccaagtagggaatagtcagcattaatttattaactagtttaagcaaactgaccttcttcaagtctcctgagtttgagggatgggttaaatagcacataacaaaaaccccaaaatttgaaaaagaagaataaaataattaaattggaagctgttatttataggactgatatattaataaccaaaatataactataagtggcaagtggatgatccattggttgataattgaaagctgattgcatttttataggtcatattccaaatctagctgacctaataaggtcttttaatagaccacatgttctagagttcatctgcctaccaaaaccttcttgcacaacgtcttacatatcatatactcacaattgtatttgttactaaatgctatatttcatatttctgttgataaagtcagtgttcactctgtttttaaaaatctctggaagggcttcgtcatttttttcttcaaaagggagaagagaatggaaaaataacgaatggatgtgttttgttatgagaaaactatttgctattgttaacattttcagggtagaaaaggacaagaatattacctctctttataatttcaggtgaaattaatactgcgaacctaaagtttttggttagtctatctttggcagttcagtctggttcgagaggtttctatagggagagaatgattatttttaaaggccttgatatgtcattttgaatcccaaagcagaaatcatgtagccctataaaccttaaatattagaagattactggctgtacagcaagcccccacagaatgcccattgaataaatggttttaatattcgagtcatggatgtaagatgaaatgtactaggagctgaaactcatgggagaagaatagtttgttaagaattggtaggaaatgggctactactaccaatgctttctagatcagcatttctccttctatgatgtgagcacactaactggattaactaactgaataactggattttggtgtttgtttaaaaggcagattcttgatccttcaccccaactttttgaattagaatctctagatgcccaggaatcttcatttaaatgacttccacagatgattctaatcaccacaaagattgagacccactgtctagaaaaataacgtagtaaaaagctgagatttaaaaaaataagacaaatgtaaaactgggtttctgattacggcagtttgtatcattggatacatctaaaataattcgtattgaaaaataacctttttaatttattttgttttatatttaaaactcttaagagtgacagcatgtggacagctaattaatacattatttcagtatcattcataaattgcttttgaatcctttgacttaaagagagatagttacacttttgactgtaattaacttggcatatgcctttgaattaagaactggagttctgaactttcttaaagagcttttaaaatggtgctgatgtcttttcattgttcctacttcactcagtggggcgcagatatttgtcataagtgaattggtgctaattaaagacagtattgctatccatctctatcaatgaaggtaactatatttttgagttagtaggagtagaaggatgggaagtgaaagaggtgatctgagatgctgcgaaatgaatgccagttgaatatgtagagaaattataattggtaggacttagtggtgattggtttgctaagggaacttttagggaaaatccccaaacaataccatatctttgtttctaaatataattcagttttatttcccttcctttttatgatctcacatcttatttactatggagaatttaatgattaccggaatgtgggaaatgtgtggcaatgtctaactgaatgttagtgtgtttaatggtaaaaatgtcaacatgataataatgccttgtataattcaatagaatataagaaattgggaaagttatctatgacaaatacttgatatgaaatctgagccacagtgggacaagtaaaaccctaggaagtttagtaaattcaagttaccaataacaattaacattaatatgcttcatagttgttaaaaggtacattgttttttcttttataatctgtggttccattttattctttctcatgtttttatttttcctcatctagtttataaattggaatattttaatttgtttttgtttttgtttcaccatgtatcgtcttaattatagtttggccagaaattcccagagagcattgggatgttgcctagctattatgagatgaccagaacttcaaaaattttgttcagctgtataaattgtttattttggaaatttgtctagtttgttgtatggaagttatcatcttagatgtagagtcaactatgtgctgggtactgtttgagagaatggggagatagtgaacaaagcaaaatacctgctctcattaagtttatattctagtggtagtggtaggagagatattaaaaaacaacaaataagcaagtaaaatatattaaaaggtgatgagtgatatgaagcatggcaaaggtggtagggagtgctgaggtgaggagtttgctattttataaagtacaagatcatctcaacagataaggtgatatttaagttgacaccagaaagaagtggagaagcaaaccaagcagatatctggtggaagaccattctagaaagagagaaccagtatcctgacatagaggagtgaacttgatgaacttgaagaatagtaacagtaaggaggccacaatagctgtgtgatgtgatcaatgaggacaggcataatttaaaccattgtaaaggctttggcttttaccctgaggaagataggaaacctgaagaagatgggttctcagcagaaaggtgacatgagttctcagcagaaaagtgacatggtctgacttccgtgttaaaaggtttgctctggcaactgtgttgagtatagactatagcagggagactagttaggaggtgtctcagtcaacttgggctgctgaagcaaaatgccataaactgggtggcttataaacaacagaaatttatttttcacagttctggaggctgggaagttcaaaattaaggcactggctgatctgttgtctggtgagcgcccacttcctcacagatagccaatttctcactctgacctcacaaggaggaaagggcaaggggtgtctcttgggagtttttatgagagcactaatcccattcaagagggctctgcctccatgatctaatcaactttgagaggtcccaccttctaatacaatcactttgaggatgaggatttcaacatatgaattttggggagacataatattcagactatagaaagaggcttttgcagtaatccagataaaagatgatggggtcttggatgaatgaatgagaaaatgaatgaatgaacaaccaaataaacatggattatatctgtctttctaaacaaatataataagaattgacctagttaggtaagtcttccctgaggaagtagggattgaaacgagatctgaaagaagagtaggcaatgacaaagtaaaagggctggggtcggggtaagcaatatgtaaaatgttttaggcaaaggaaagaatatatgcaaatttcctatggtggaaggaacatgtgttccaggaactggaagattgatagtgaggccaaagctcagagagccaacatttatgtgctaattatatcatgtgttttatttatttctcacaatagtctgaggtagtttctattgtttctattttatagttgagcaaattgaaaacataccgaagtgaagtgacttgcccaaggtcagattactaagacatagcagagcttgtttgtttattatagctaccttctaccctcaccagagtgcgggtagttcaatgaaggtggagaccttatttatttatttatttttaacttttacattcaagtgtacatgtttgttacatacgtaagcttgtgtcataggggttcattgtacagattattttattacccaggtattaagcctagtacttataagttatttttcctgatcctctcccttcttctaccctccaccctctgataggccccagtgtgtgttgttcccctctatgtgtccatgtgttttcatcatttagctcccacttacaagtgataacatgtggtatttggttttctgctcctgctttagtttgctaaggataatagtcttcagctttatccatgtccctgtgaagggtatgatctcattcttttttaaatgtctgcatagtattccatggtgtatatgtaccacatttcttttatccagtctatcattgatggcatttagggtgaatccttgtctttgctattgagaatagtgctgcaatgaacatacacttgcatgtgtctttataatagaacaatttatattcctctggatatgtactcagtaatgggattgctgggtcgaatggtatttctgtctttaggtctttgaggaattgtcacactgtcctccacaatggttgaactaatttacactctcacctacagtgtataagcattccgttttctccacaacttcgccaatatctgtaattttttgactttttaataatagtgattctgactggcctgagatggtatctcattgtggtttagatttgcatttctctaaagatcagtgacgttgaactttttttatatgattgttggctgcatttatgtcttacttttgaaaagtgcctgttcaaggagaaccactgctcaatgaaataaaagaggatacaaacaaatggaagaacattccatgctcatgtgtaggaagaattaatatcgtgaaaatggccatgccgcccaaggtaatttatagattcaatgccatccccatcaagctaccaatgactttcttcatagaattggaaaaaactacattaaagctcatatggaaccaaaaaagagcctgcatttccaagtcaatcctaagccaaaagaacaaagctggaggcatcacactacctgacttcaaactatactacaaggctacagtaaccaaaacagcatggtactggtaccaaaacagggatatagatcaatggaacagagcagagccctcagaaataatgccacatatctacaactatctgatctatgacaaacctgacaaaaacaagaaatggggaaaggattccctatttaataaatggtgctgggaaaactggctagccatatatagaaagctgaaactggatcccttccttacaccttatataaaaattaattcaagatggattaaagacttaaatgttagacctaaaaccataaaaaccctagaagaaaacctaggcaatacattcaggacataggcatgggcaagaacttcgtgtctaaaacaccaaaagcaatggcaacaaaagccaaaattgacaaatgggatctagttaaactaaagagcttctgcacagcaaaagaaactaccatcagagtgaacaggcaacctacagaatgggagaaaatttttgcaacctactcatctgacaaagggctaatatccagaatctacaatgaactcaaacaaatttacaagaaaaaaacaaccccatcaaaaagtgggcgaaggatataaacagacacttctcaaaagaagacatttatgcagccaaaagacacatgtaaaaatgctcatcatcactggccgtcagagaaatgcatatcaaaaccacaatgagataccatctcacaccagttagaatggtgagcattaaaaagtcaggaaacaacaggtgctggagaggatgtggagaaataggaacacttttacactgttggtgggactgtaaactagttcaaccattgtggaagtcagtgtggcgattcctcagggatctagaactagaaataccatttgacctagccatcccattactgggtatatacccaaaggattataaatcatgctgctataaagacacatgcacacatatgtttattgcggcactattcacaatagcaaagtcttggaaccaactcaaatgtccaacaatgatagaatggattaagaaaatgtggcacatatacaccatggaatactatgcagccataaaaaatgatgagttcatgtcctttgtagggacatgtatgaagctggaaaccatcattctcagcaaactattgcaaggacaaaaaaccaaacacctcatgttctcactcataggtgggaattgaacaatgagaacacatggacacaggaaggggaacatcacacattgggcctgttgtggggtggggggagtggggagggatagcattaggagatatacctaatgttaaatgacgagttaatgggtgcggcacaccaacagggcacatgtatacatatgtaacaaacctgcacattgtgcacatgtaccctaaaacttaaagtataattaaaaaaaaaaaaagaaaagtgcatggtcatgtccgttgcacactttttagtggggttgtttgttttttcttgtaaatttaagctccttatggatgctggatattagatctttgttggatgtatagtttccaaaaattttttcccattctttaggttgcttctttgctttgttgatagcttcttttactgtgcagaagctttttagtttaattagatcccatttgtcaatttttgcttttgttgcaattgcttctggtgtcttagtcatgaaatctttgcctatgcttatgtcctgaatggtattgcctaggttgtcttccaggatttctataattttgggttttacctttaagtctttaatctgtcttgaattaatttttgtatatggtgtaaagaagggatccagtttttttttttttttttttttttgagacggagtctcgctctgtcgcccaggctggagtgcagtggcgggatctcggctcactgcaagctccgcctcccgggttcacgccattctcctgcctcagcctcccaagtagctgggactacaggcgcccgccactacgcccggctaattttttgtatttttagtagagacggggtttcaccgttttagccgggatggtctcgatctcctgacctcgtgatccgcccgcctcggcctcccaaaatgctgggattacaggcgtgagccaccgcgcccggccagaagggatccagttttaatcttctgcgtatggctagccagttatgccagcaccatttattgaatacggaatcctttccccattgcttgtttttgtcacgtttgtcaatgatcagatagttgtaggtgtgtggtcttatttctagtttctctattttgttccattggtctatgtgtctgtttttgtgccagtaccatgctgttttggttaccgtagccctgtagtatagtttgaagatgggtagcatgatactttcagctttattctttttgcttaggattgctctggctattcaggcacttttttttttattccatatgaattttaaaatagtggtttttttttttttttttttttttttttttgagatggagtctcactctgtccctcaggctggagtgcagtggcgcaatctcagctcactgcaagctctgcctcccgggttcacaccattatcctgcctcagcctcccgagcagctgggattacaggcgcccaccaccacgcctggctaattttttgtatttttagtagagacggggtttcaccatgttagccaggatgttttccatctcctgacctcgtgatccacccatctcggcctcccaaagtgctgggattacaggtgagagccactgcgcccagccttaaaatagtttttttttttctagttctgtaaaaaatctcaatggtagtttactaggaatagcattgaatctataaattgctttggacagtatagccatttcagtaatattcattcttcctatccatgatcatggaatgtttttccatttatatgtgtcatctctgatttctgtgagcagtggtttgtagttctccttgtagagatctttcaccttcctagttagctgttttcctgttctattgtttttgtggcaattgtgaataggagtttgttcctgatttggatctcggcttgactgttgttggtgtataagaatgctagtgttttttgcacatggattttgtatcctaagactttgctgaagttgtttatcagcctaagaagcttttgggctaagacaatgggtttttttctagatgtaggatcatgttgtctgtaaacagggatagtttgacttcctctcttcctatttggatgaccttgatttctttttcttgcctgattgccctggccaggacttccaatactacgctgaataggagtggtaagagaaggcatccttgcagagaccttattttgtttgaagctgtatcctcagcaactagaacagtgcctagcacatgttagatgttcactaaatatttgctgaatgaataaatgagagaatgaattggaatcaaggtgtatttacctccagagtccatgttcttaaccacatcttgcataaccagatgcaaattagagctgtcagactgtttcttagaaaatgctttgataaggggccaaagcattgggccagtccaaagggaatgaagaaaaagaaatgctaaaggggaactagcattcagaaagaataagtggctcaatataaatttgctataaactagaaaagataagaagggaggaggaaaagaagcctctggttctaaagttgagtggctaacttccatagtagctttcactagaacctgggcctggaagttttttttctttgctatcccacagctgcccgttgttttgacttagccactttgtttcctgggaaggagaacagtcaatgtatctttctgatgtcctttaattcattcactcaccaactccccttcctcaaatatttttcttattgggcactttcagataatttgtccccagagccatatggcttgtgggacacacaaaatatctcttgagttactggttcagagttggtagttcaggtgtgtaactttatgcctatctatagatatttctctttgaaatggaactttgtgtatctcacatctaggaattccatccatagtcttttctgtttcttcacctcacattgcttcatgttcttttgccacttaaaactatcttttctcttttttctcagaggaagaaatgttccatctctgttcagaaggtgacatcaccacttgtgcctttttacttccattccctctacagaggattccctctcttagtttgcatggtgttggagattcaggatccattttctattttgccactttctggctttgggaagtagaacgagttacttgccttttttgagtctcagtttgttatcttaaaataccatttgtcttgctaaccttgcaagtttgtagagagtcagttacaatagtgtatatgaatccactttgtaagctagaaaacaccatttaatgcaagatgctattattacaacctatgtgcacaaataattcagatttcttcttaaaatagttttcctcgactttggtaacccttgaaatatccttatttccttcttccttttaccgtcaaacctcttgaaagaatagtctttattttctatctgtatctccttattcctctgtctattggcatctggcttctatttcattctgggtaactgtattgaatgtgctgccttccagattactagagattgcctaattccatatttaatgtctttttctcaggcctcactcttctcactttctgtagtaattaatacggttgactaaaatggctcatcacagcacttaacacatagtaggtattcaacaagtttttagcacataaatgttcctttttagcctttttagattaatctacttttttctgcttataaaacaaatgtgtgcatctctaagtttagttctttctatgctgttttcactctgtactttctaggaggtctgatttattctattgccttttaactctacatggatggatctcatgtctacttttccaggtctgtcctcagccttagttctgcctgtttaactctatatttttacctggatgtctcattgtcacttcaaattcagcaagtttaccatttctttcccctaagtcaatctccttttcagccttttttatttttgacagggatgcaagcagttagtcaccagacttgagactttagaaaggtgttgactcctttttctttatgtattattgcagtggtcactcatttgttcatcagatgtttattcagtatttgttacacataaagcactattctagatggtaggaatattgaagtgaaacaaaacagacaaaaataacgtcacaaggatcttattttctcatcatttgcatttattaatccatttattcaataaatatttattgagagtgatggcggtacaatttttttatagggttgtcagagaaggcttctctgatacagaaagatttgaagagacacctgaacaaagtgagagagcaggtcatgcaaagtactggaagaagagctcccaggcaaagggaaaaatgtatagaaaggccttgaagagtgaggagcttgtctgttcaaagaaaagctggcaccaatagagtgatgagagtcaaatgggtgaataaaagggaatttggagataacattagaaagatagctggtagccaggttaggtagttcctcaaaagaatgatgaagactctgggttttctctaagtgagataggaagccactggaggattggagaagcaaactgatataatttacatttaaaaataatctgatattagaagaatagactatagaagagcagttgttgaagcagaaacaccagttaggagactaatataaaggtgtttatatgagagatgatgatggcttggactagagtcgtagcagcagaaaatggtacatactatgaatacataaattagaaaaaaaataaaggttttttgagtagatgtcacttcctctattagcatggctttgtgagttggcaaaatttttccttggaggtgccttttccttagatgtttacagccctgtgcagggtgcatgatttagtgagcagtgctggctaggtttgcagcctacttgctccttcagctgggcacccttgtgcagtgaataaagtgtataatggtacacaaccatttggatagaggtgaagggagtgcgaattaactcttaaaaaatgtttttattcccattattctcaaaaggcccttatcacttcccatatatttaatctctccaggtagactataaggccactgaggaccagaactgtgtcttattctttgcttcagtagtacctgacatggtgtcctatctgtagtctgaggtttgttgatggtgaataatgaaactattttatgtcaatcctttgcacagatcattttactaaagttcctgaggtctaaaatagttctgcatgttaataaaatataattatagcagcttatatccattgttaagagacataaactgtcaaatgtaaaggccattagtgtgacttatataaaagtggatgtctttttttcctgtcatgtagtattagttgccatctgaaagactatttcaatgtacccaggcttattttaatagctcataccaactgcaaggaaagtgataaaatattttatttttttcgtatgtccttatttcagtaatgcagcagtatcttgaaatgacatggtatggatgaagcacgcctagggactgctgccaagtcctacatagcagcagcatggaagtagttgagtcagtttcaccaaaagtttgaaatctattgtgttagaggcatgtgcaaaagctgtgttaattgctagcttattttccaaatggttctgttttaatgaagcatatttaatgcagatggttggaaagtaagttgggcaatggctaaactgactctaacagtaaactgattcttacagtgctttcactccaatacttaacagtgcctttgtaaagttccttcattcacagtttttacttgaaatgtgacctaagataactaaaaactattctttctttaaactcaatctctgaaaagaacaagaacagtcatagttcctaattgaagtcaaaacaaatcaagtcaaagatagtgcagcttgttttcttttgtacaatatcattgaattctcttcatcattactacggctatttctgaagatgtttaattgagataatgggcattataaagggttacatacaggaactgaaatgactttaccaaatgctgaagttggctttgttcacacgacaataattttacctcttcaggggtatgaaatagaacagtctagaatattaatatttcttatttgcacattttctatattttatgcattaaaatcggacttactagatgttaacattaagttagaaatgaaatcaaggataaattgtccagcaatactgtaaaatctttttatttcattttttctatgagactcaaatatcaatatatagtcattgtgtttgtcttcaatcttttgagagttcagatatgttatcttgcttaacaatgatgtgctgatttcttctaagtattttattttggtgtattttggtgtacttataaatatgtacaattgtcttcatatttgctcgagaataaggatactgtccctgttagactccaggttgagttctgagaggaaaaagggaaacatggttcaaagggtttgtatcaattttgccattttttttctcacattgtcactaaagtattctcttcgttatctgaataagacatctgctaactagtttggccctttttacctgattgtttaagaagtcttagctaaatgttaggccttggaggcccaggaatctgctaaatgctgctgagcttgaaagacataatgtccttggtctgttttgtctcttccactcttggatatctttgataaataaccccgatgtaaatgtgggataaatcaagcaatggtgtattctaagcagtgactggcccaaaggatgagttacatcttaataagcaatagacttttctcatattcaaaagaggttgaagaatacaatacaaaaattaagttttcacccaacttagttatataaatatggggagtcctaacactgaagaaaaaaatacgttttaaaaaactagtttgtgagaaatcttctagaataacaatcctactttttatctctctctagtagtctttccctagaggaggttaacgttagatcagaaagttctctgcccagatgtatttggggagttgtattgaacatatccctttgccacagaaactagtcatctttaaatgtcagcttcaatgttgaaattttatgagaatggaaaggaatacacatttttacttattttagacctccctttggaaaatgtagtcggctgctgttgtctcaagttggaagggtttacaatgttttcttcaaatattcatctcaaatactcatggaaagcaaatgcaatccagaattagacaagaagaataaatgtaccttccctttaaaaaacttattaattgtagcacatcagtcttagtcatttttttgacctttctctcaatttatatttaccctggatacttttcttttgtcttgtttattttaagcatggcttaatttttcactggagcaagagcttaaaaacgtcagagtaagaagagaacaattacatttgtgacaattatcaattacttgaacattattcaagatagaatatattttccaattaatgttaaaaacagaattgtagaattacttttgagtttgattcactttgagaaatctaagaaaaaatttaaaaatccattctgtcaccttttcccccgtcatgtagggatgttcttaaagtcaaagagagttgctgtttggaatactctctgactttgaagcctgtggaaaaccacttatgaggtacagggagccttatgttgagttaggcagctggagatgaactattgccatggtgctaatagtaagtatgggagggactctgaaaatgaggtttaaaatatcaggttgccccgagtaacagtttatggataggaaaaatccggctatattattcatcattattatctatatgtcattgtaatctagatgtcatgtatttttcatcattattatctagaagtcaggtatttgggagggtgtttctctgtaagaaattgcaaaaacaatgtttttattttagagaaaataagatattttgcattttttttttatttttaaaatttctcactatggttttcaggtctaatccttgaactgtatctcttttggtcttgattttgttttcaaagaaatagcagagctaagcttttcatttaattgtaataaaatactgccctaaaggagaaagaaatatgatttttttactagtttatatggaaaagcatataactgtaataatattttaactatagtttgtatagaccatactcatttaaactctatgcaaatctttgttactttagggcaaagaagctacaaaaccataatgtgtggtgtagtgagcacacaccataaatttgataatcatacttgtgaattcatcatattttatacaggagatcgttgtagcattatgaacagtaatgtgcaaatggcatgaaaaaaatgttgccacactcttaaatctgtgccaagttgcattgattgataagtgaagatattaaaatagcagaaattttgcattgactttaatgcatggagtttccataattcccaatgaatctggaatgttaatataaatactctttttgtgaggcggcaggaaacatgctgcccagactacacatgttacccagctaggactgcctctactgttcagagaaataggagtgggaggctgtcttaagtgaaagtgaaaaaaggcatttgtttagctgcatggcaacacaaatatttcgcttagtgagactgacaatgcatctcattatgtgaacgggtgccagcttgtaaaaaatttctgtttaactttccatattagttaaaggtgcccatgcttaactgtttgaagcctgccaatcaggttccctccctctccctggcccccctcccactccctgttgttgcccccaactttttgtctaccactgttttttcccacagtaatagatgagagagctaaggatagctggtccattgaatgctgttaggaatatgtggggaactctgccagattgaagtcggcctcgagctagacatttgttacttcttcccatttctcttattccagatgcactttttttaaggctaattgttatattctgccttgacagtagaaacattcaatggtattgtttcaagttgacagttccctgtagtactaccattgtctgagtaccagtcccatgttctcaggataaaaaatccttgatcttaaattctccaatctcttgcaatgcatttggatcctaggctgttttcctttttatagtgatagaaagcagaagaaaatgaactaatgatgattaccatatcacttttaaaaaattagttattttacgaatttcaaaataccttgtacttcaggagtactttagatcaaggtctctatgtttgaattgccatgattcctgcattgtatgcaatttcagtagttttatcaggatatagtactgtaaggtgaaggcaaaacacatttttaaatgtctgtgattataatatacaactgaaagattcttaccattcataatgcatagaatgatgtacaaggacccacctagatgagtagtcgaggaaacgtacatttttaaataatttcatcatattttttaaaagctgtagcatcaggaatattagcgtttgtttaaatatttcaaaatggcttacccagtgagagagtgttggttacagaatgaactcagagaaataatttatagtagacaaagcactttaaaattatataaacaaagagttaaaactaggcatcactttgcatgaagaaattgaaaacaaattcaaatagtaattgttttgcaccaatatctgcataaggtttaagcaattgtgttccatggttatatgtatatttgttttataaaaatagttggggcattcaacttttaaaaaataagatgtatattcaggtatgagaattagaagcctattctcaaactgatttttttttccaaattaagttgctggaatattgcagtaaaatattttccttttcttacttcccactgccgcattctggttcttatcctattgcatctctgtctatttttagatggatgttggtcctcttggaaaagagaatcctcctaaatccagaagactatggcatcatctgtcaggcagaagcctgaactggctgaggggttgtaaatgcctgccctgccaaggatctttctgacttctttagcaccttattaccccaatcacagtcgtgaatttttgctgaattagtggcattctggccctgtgtctgagcctttcaaagagaaaacacaatatgctgtccattgataggatgggccaggggtatggatggttaggaggcaatgcagttacagtctggatggaacccaaagtaaatgtgttgccattagcattcttgttaattagatactcatggtaagcctcaaagtgccaatatatgaatttttaaaaaaagcacatttggattttcctgtgctgtgtattattgcttagttcttcctcaacaaaagcaactcatttcctctcttcaagcaggacaatacttccactttctcaccaaggctggctggttagtgtagctaaattcgtccagtatgaaaggacatcaaatttacatggggagttctgactccatttcacgcttcagtgtgaaaggtagaaggaaggtattgttctatggaatacttctgtctccatgtcttccatcttgcccatccaattactagttgacatttaaagtatttggtagtggctttatgggacactattgtgatattctgtcaagatttcatagtccccaaagtggaaaaatacctctggtttcttgtcaattacagttcctagcagatagtaagcacctaataaatatttgttgaatgaataattgagtgaatttgtgaaagtataggaaatgttaagaagagaagaatataaagttcttgaaaaatgctgctgagaatgatttagtgtcgtggatgcttaaagtccaaattctgagattagctggcaacctgttgaaatgaagactccttaatttaaataatttggggcagattttcagactttactttttagctggtacaaattagccattatttgtttccaagaattgtcaggtagtattcagttttccaaatctggtattttagaaggtagtggaatcctctaaaatgtcatacttggaagactgcctacaattcagaataaataatttttatagttccagagagactagagacttcttggaaaattctgtgcctatctgttgttttatattttccttgctaaagaataatgctggaagcatgatgctcaccagtaggaaaaattggcatttcagtctacagggagcttggcaaaagtctttttctgaacatgcttttctttctattaaagtttgattgtgaatcatgtgggtctaaatgtgaaggtgtatttttccagctgaccatggtacatgtgacaagcagactgtctctagtgctctattagcctactgtggtgctaatgccttacgaggtgagcaccatgatcatgttcattgtacggagaggtaggcaacagagtaagtgtatactctttaaagagctacatattgggaccaatcccttgtgaagtcatgtgtgctaaactttatgctgaatatttaaaatcaaaggactatctagaatcccaaatcccaccagtgttcctcataactttactcttttaatctaggaatcgatacactcaggaggcatttttttcttcaagattctctttactgttattttcctcaatgacatgccatttagattgccagataatctagaagtttgctagtatccctcgtgattgatcatttattctgcctgtgtattccatggtgttctttgtgcatataatttttaattaagacataataattgtacatatttatggggtacagagtgatatttcaatatcggtatacaatatgtaatgatcaaatcagggtaattagcatatccatcacctcaaatatttatcatttttgttttgagaacattcaaaatcatgctgtcttctagctacttgaaaatactcagtaaattgttaactatagtcaccttcaatgctgtagaaaactagattctcctatgtagtattctatagaaattcctcctatctagctgtaattttgtatcttttaaccaacttctccctgtttttctccctgttacctttcctatcctctagtagttactattctactctactgctatgaaatcagctttttttttttaagcatccatataagaatgagaatatgtagtatttatctttctgtgcctggcttatttcactaaacaaatagttatattttatttttggtaacaaaagtctttgtaggggcctagatatttttatttacatgccaaattaagcaggtaatttacatgtctaggctgtcaaacattcaaacgtacttcccattacatgtgggaggcttacttcatattttcttactcatttgcaaaataaaaatattgaaaaaagaacatgtatcttgggtaccttctgcatataatgcccaatacagatgtatttgaagagttccattattcatacattgtgaatataatgactagcaaagtattctagcatacattatttatagctctcagaatcttctaatattgaataacaatgcattaaaatatagaatattacaaaatagcttatatttatattatcctctcatccaaaattctatagatattttggaactgactgacatagaagcagtttgtattttcttgatatatttcatgtagtttcttgtacctggaatacttctgttaaacatatttacttgtaggaatttcatccatctttcaaggcctagctacttgtagtcttctgtgatctcgcctctgtgatctgaactcccatagcattttgtctctctctttttgttcttgtcacaatttatctttttagtaatttttgtgaacagtccttttattaatactagtttctgatggaaagttttgtgtttttttttaaacttgcaggggtattaagtataatccatcttactacatgaccatatataatgcccattattcagtaggcactcagtttataattactgagggaattaattaaaaattctgcaaatttccatattcccaattcttttcataatttaccaaatttgcattgcttttcttacatttagcttttcttatatgtgctgccagcttttactattttcatgttatcctgagagttaggtaaaaagtagtttcttgaatttgcagatgagttaaatgaaacgtttctgaagaatatgaagtgtattatttatcctgcgacctgaacaaaatctggagcttttggtgggggaaaacaaaaagaaggaattggcacatcactctcattatcactgctcatgcttcttctctcccactgccagttatgattttggaggagtggggactatgacatgtttctttgtatcatctctagcacaatagtttgctcattgtcagtgctctaaatgtatgcataaaatgaatgtgtgaatgaatttgacataaatgaatattgtttttggtacctcagccattctttcctttaatcgctttccagtttccccaggcttcttttgcatttatgttctccttccagtccctcatataaaaccctcctttcaggaaagaattgggtgagcatactcaacccaagatattaatggccaaaaaatgttagacttttgtggtatacgcatttaaaagtgtagaactcggccgggcgcggtggctcatgcctgtaatcccatcactttggaggctgaggtgggcggatcacctgaggtcaggagtttgagaccagcctggagaacatggtgaaaccccgtctccactaaaaatacaaaaatttgctggacatggtggcaggtgcctgtaatcccagctacttgggaggctgaggctggagaatcgcttgaacccaggatgcagaggttgcagtgagccgagatcacgccactgcactccagcctgggcgacaagagtgaaactccatctaaaaaaaaaaaaaaaaaaaaaaaaaagtagaagtcttttcagatacaaattaaactaaatgaattaagttatatgggatcctcattccctcattcatgtttatagtggcctttaagcagtttttatattacttgaggatccatcaaaataaatttttagagatgggtagctagggctctgtaaatctttgcaagagttctaagaatttagacttaaaggggatgatggaatgattacttggggtagctgtctctgaagtaagagaagggacaaaagttatcgaatgaagaatacttttattctcatttgtcttaagaattgctagattcgtgttttttgtcccccttttgggactactagaaacaatgcaaagaagtttttgctgtgcaactgctattaaatgaagtttgcaattgtttttatatttttcctctgaagttacctcactgtaataattactgtcaaaagaaactcttttgctgtttactgttttcactatgcagcatttgttctggttttcttttggggaacaacccttctttcacttttggtacctgtggttgaggtggaactgcctttttcctcccacgtcatagggagtgggcatttcatactcctggcaacagtgattggttcagaaataaacatgctatccaagccaggccagtgagactcaatcctgggatatttcctggaattactgggaaggaaacactgtctttctactgaggtttctaaccttgagcttctgatagtcatctttgccactgaaaggggagagcctgcctgagagagagaaggagaaaaaccaatttcctaattataccatttaagtactgagtccaggtgtgttagaaggcaggacttttcaattaagtgaaccaataaattattttttgtttgcctgttggtttacttttttatttgttagagatgggggtctcatagtattgcccaggctgatctcaagtcatccaggcttaagtgaccctcctgccttagcctcctgagtagctgggactgcaggtgcctgccatagtgcccaaccgacaaattatttttttaataaaaaaagctactttgagttggttttttatcacttacccaactgagtgttgtaatgcatacagccaaagttgcataactgcacaactgttatggtggatgcatatatggatatatctgatttggagaaatattttaatgtccattgtctcacctaatatttgcgatttattctagtttacttttcatgagcataaaggagtatgggttttatgatgaaatgtgttacagtttaaacaaatatagttttagctgaaataatgttattagcattgtcaaagaataaaatgcaaatgagatgatataaatagataaaatccagacttttagtttatattattttgaaaatagaataaatttatagaatttctatatctagctttctgtgtgtagttttcctttttcataaatgaaagaagttgaaatttgcttatatttttgatattcacttatttatagcaatttgatacttttattagatacacaagttcaacaggaattggacagagtactttatctgcttatgtctgaagaaatattctctgcttgtgacattttcatatgttaatccttttcattaatgtataattgttaatagatttgcttcaaattaaagctctcactagtttagaaaacaaaacaaaaatgaatattgtagtacaaattttgcattcacctagaaaacataatctggatttgaaagaaaatttattctccaaatatagctatgcaaattctgcttgactttggtaagtcactgttaaagaagtaatgtttttaatttatatttcttgctcttttaggaggtctgcattttgtttgtgtttttatattgaaatatgcatgtaaagactaggttgatagtttaatcatctctcttaagcacaggctggaccattttgtagtaaatgtacttaaaaatcccaacattaaaataatatcctgttttttttaatccatgaaattaaaagatgtgtattctcaataaaatttggtcttttttacctggcaaaccttaagtgccaaggtcttaagttggcagttttttccctagcccttatagatatgtctcacatttataagagcctcagatttaagtcccttgggtgttgatactttcattaggaaaagattggggtgctaactagtttatgagagtaagggcctcattagaacaattttaaaatcaagccaaaactgaaaaagccaattaacctttgaaagtcctcgcagacaacagcacatttggaatagcatgcacacttagttatacaggtggagtttctcagaggtagtagattttacagttttactatcagtcattatgtagaatttcccctttcttcagatgaccccaaatttgcaaccaagaccaaatacaatttaaaatggataaaattcctcctaggaagagccttctctgacactacgcctttcctgttcctttaacccttctatgtgtgatttttctttttctttttttttttttcagtcactcactatctcccctaccctaagttgttcataggatagtatcacatagtagtcatatgcacccttattattatttttggttaaaagttatgttaaaacaataagaaaaaagataaaacctctcatacacttccacagtatatcatctgttttcatttttacctgcttatttccagtccttgttcatacttgttcatatcttttttttttttttttttttggagaccggttcttgctctgttgcccaggctagagtgcagtggcatgatcatgactcactgcagtctcgacctcccaggcccaagtgattctccaatctcagctccctcaagtagctgggattagaggcgcacaccaccatgcctggctaattttgtttgttttttgtagagatgaggtttcacttcattacacaggctagtgtcgaactcctgggctcaagcaatcttcccaccttggtctcccaaagtgctggtgttataggcgtgagccatcatgcctggccccttgctcatatcttttaaaaacgaatttaatgtaactgcaattagatcatagatgtcattgcgtgttctttgtttcttacttaatgttaaataataaatatttcccaccacaaagagcctgtcatgacctacacaaacacttagggaagccctggtgtgtcttatgtcttttgggtcagaactgctatttggacattactttattttattattttatttttaaaaactcatttaagatttagaaacttttaaaatttctttatttagtttttgggtaaattataattatatgtatttatgggatacactgggatatgatatatgtatgcatgtgaaatgtatacatgtggaatggtagaatcaaactaacatatccatcaccttaaatacttaccatgtgttcctcctgcctaattgcaactttgtaccctttaaccaacatctccctattcctccccatccccacccaacctctggtaaccacctactgctctccgcttctattgagttcagttgttttagattccacatataagggagaacatgtggtttttggttttctatatatttgggccttattttagatagtcttcctcttggccttgagttattctattgaaaattagcctgaagctttttttttttaaaccgaggaaagacattgtttctgtctgtgatggcaatgcatcctaaattttaccaataactatatagtttttggtaggttttgtcttctatccattgcatctgttgggatgcttatagagttattcttctttaatctgtgaatatggtattattggtagattttctgaaccatttaggataaccgtgacaaaacttatttgttctcagtggattttcatttacactatagaattagttaaaatttaaaggatatttgtaactgtgttcatgattagtcagtgattttctcttcttctagtgtgtctattttattttggaatcaaggatagatattctagccttataaaatgcattcagagtcatatatatcttagtgtggaaggaactcatgatattacctctcctagaggcatttgcaatcaatttatgttaaagctgttaactgggaggaaaaatatttttatctttaaagaattttgaaacataaacccaacatagctgttttcccccaatcctctgcctgttttttttttttttttggaggggggttaggggactgcaagaggaaagttagggatagagaaaatgttggtaaagaatggaggttgtcgccataaggctctgtcatagcaatgaaattattttggtgattatctttcactactttttggcaggcctatggtttaatccattggaattcagaagatagcaggttgatggcattggttagggaagatattgatcatcagagaaggtgttaaatgaacagagaaaaagcctcttgcaccaaagttgaaggtgatctgaggtctaaatactttagtctgtttatgtaccacatgtcctttataaaggcaaaagggtagaacttctccttcaggtcccacaattaccccattggttacattgagccatttatgacatcattcttcttgtgagtctttccttggggttagttttagtcatatttttatctctataaaacatcaggctgggaggtggtgtgtgcctgtagtctcaactgctagggagcctgaggcaggaagactccttgagcacaggagttcaaggccagcctgtgcaacatagtgagaccctatcactctggaaaaaaaaaaaaaatctgcggaggtaggtgtggcttcacatgtaatttgacccatgtttcatctcatttcatcctgtaaaaaatagtttaaaacaaatgttagaaactcctaacttggggcttcctaaatatctgatgtgactggtgatgtaatttaagagagtatgcttacttttttctgtccttgtctgttcttctaattgtatgataattttaatcaacacagcttttaagcacatactatgtaccagatgagatatatgtatgcatgtgaaatatatatgtgtgaaatgatagaatcaggtgaatggatatgtagagacaatgttcttaaggagttcgagctttccttttccgtctttgttctttatggtcctttccttttctgatatgcaagcacttttgtttctctttgcctctctgtcaaagcaaagagagttttaaaagaaattttgagttgaacgtaagctgcttcctttcagaagagttagtacagctctctgaacatggacttagtgtttgtttagaatgcagtattaacgagggcacaagccttgatttttctatggacctattagctttgctcttttccatgaccttgaatcactgctgtaataattgatacttgctaaagaccaggtgagaggagttggttgatcaaaacactagaaaaataggacaaattgcattcttgcctgttattcttatttataaaaggcaaaccatcactcagggctttactttaaaacaaaattattattaaaataagttgtaaaggaatgtggaaaaaatgaaaagggaataaaaatgattttattatgttatttatttttttcctttctgtattagttaggtaattcttaagaatgtcttctccatgtcatttagtttcctttttaatatctttggatgcaagattgagctttgctggcctttatttcttgttcctcgggtgttagtgctagctttggcaacctcattgtcagggctggctcaaatgaaggaatgggtgaaggctccttttggagacccacttcactggttattttaattgctcagagggataattgttgagtggtgctataggatagtatttcccttgccacaagggttaggaattctgcccggtaatcactcctattcctgctggatgtgtgtctgtgagtggaaagactggtaactggcttgagatatatccctaaagctacatgtagggactctgttagattaactttgggaaactgatgcaatcatcgtggatactttcctcattcatcttttgtagaaacagaatatttgcaaagcttaaaattagcttcttaataatcttattctagggcactttctcatgtagtgtcctcagaccaattttctttgtatgtttttcgcagacaaagctcttggaggaagcatagagatgtgatagggattggacttcaaaagaatttttagttttaaacactgctattgtggctatatctgctgttgtaaaggggtgtgaaatactgttttctggtattctgtggaataaaactgtctgtactttctaagatatagtaatgaacaaaattctgagtctagtagccattagatagctcctcaaacttagctgcttctgtcagtggaagggaagcatctgagacaaaaaagtttgtagttttgaaaccttattaaggtataactgattcacaataattcagtacacaaaaatgtgaacttgtataggtcacattttaggatcagcttaatagctgtaatttttaaattggaagtcaatggagataaggtgtgatggggttgttaattatctttttaagaatttttctcacttattaaaataaaatgacatcaattttgagtggctatgtagacagcattagttaaaatggaacaaaacagaagcttctgctgatgaactttgggagtcatcaaatgaccttgacctctttgctaagactgaatactttaaagaacccagttcttctttatccttccttctatttatgacctttgccataaaacttttcagtgcccttccaatattgatagggcatttgtcctcacgactagactctgagatcagtcatttagcttacgttggccaatgggatgttagcttatgtgacacaggtagaggcttgtaaaagtacttgtacatttctgttcacactcttgctgttttctgtcactatagaagaacaatcctggactagcctgttggaggatgagacatatggagcagagttgaattataccagttgtcccagccaaggccaaccacaagatatgttagtaaactcaactaaaaccagagaaatgtccagctgacctacagatgcataagctaaatacatgcttattgttttaagccactaagttttggggtggttaaacctgtagcattcttgtggctgtatatagttgatacaacctcaaataatcctccttttcaaacaagtccacaggacagatggcactgatgatcctcagtgatttcttgttccaatgacaatatttcctgttggtttcaagaaatttctagagcaagctactcaggagtatttgtgtgagacttaaagtggattatgtttcctctgtgcggaattctagagatattttctatctagtccatatattaacctaaagtatagtagtagccttatggggcacagaacgatttagtccataaagaaagataaagcagaaaatacctacaagtaggcaagtaattgaggtaagttcatacagtaggaaatgcaaaggacaatataccctttgtcgagagcaattttgactaaggagaagtagcagtgggtggagtcagtaaacagaaggcaaaaacaacatttagaaaaaggaaactcgatttacgtttgagctggttaaagacaacatggtgtaaaaatcagtgctatgaacaaagactgagctttcaaaccttaactccatttatactctgcaagctcaacttattaaagaggcagaggggagagggataggatggggaaggttggatgaaaagaggcaaagagttggttttgttggggcatggttctttaattcattgtgctttgcagtcaaatgactgttgccttttctaacttcagactgtatatagtattgctatttcatttactctcttttgtaatagaattctgccttttagtggttatataaaaagtagctggctgagagtgttctggacagaagtagggccttactgaacacatccaaacagtcacgtccctccattcatctgaagctgtattcggagaaggggtgttagatgggggacctgtacttggttaattcatcatattacttggaaaggtccttattattgtgcacagcagtgtggtcacctggcggtaggtcattagcatttagtcttcttttcctcaccacaatgtacaacatgctaattaggatattctgaaagctaagtaacctgttttaaaaatcagacattttaatttgcagctttaatggctgtttttataataactggctttattgggggtaaaagcacttctcatgttccactagcaaggcagagtataacagaagctgacaaaattaaaaacctcataatgcgacctttgcctgggataaaaggctgtttcataacaatttccttttgttctttgtttaagccattactctaaaaggagcctccgattaatctaagtaaatgcatcattacagtactaatccgtgtccttctgtcagtgtctgttttaattaaataagaaatgctagcagaaagatatcacgcacaaagctgtgattggagaaagaagcactggttgatcaaggaaaagattaaaaagagctttagtgttttgtccatttgcataattctagatgccacagagtttcaggttgaaaagaaaacttacaaaagagtttaaaacatttcattcttacagatttaaaataacgggatttaccaatgaaattctaatcatcccatttatcacattaaacattccacagcaaggagcagaacggcttggggtgtgtcttttaaaccttttatgcaatattgtcttgtatctctgaaaacatacctgtcaaattttcatgtgtttcttcttattttaggtaaagttgatggtgaaacctggttgtgggcatacaatgtgatttatttttcctttttaaagtatcttgcaacttttagtttagttttgcttttttaaaaaatggctttctattgataacatgttaagaatttaggtgcttaattggttgttaacaataaaagtatatttaataaatgcttatgaaatgaatattgttacattgatacacagaaactcttcttagcagtagtgttgcagaattcccgtggtgagggctttcttaatataccggccattatttgatgtaatgaaaagagaaagtgtgcaacagtgagattgttaattaatttagcctaacaagatgaagataaatgaagcaaagcacagtttgaatgaagcaagaggtcttatttacaatttaatacatttttatataatgcagatttcacttggtaaaaaacaaacagaccctcaccccaaatacccactaacagcaaaagtacgtcccttccccacaattcaacactaaaatcttggtttgactttacagaaaacatgtactgtggccccatatggaagacacttttacagtgtgtaaacagtgcttttctacagctaagaatcctacactagttaacctttaacttcagtattttgttattctcaatatagactggggatgaccataagaataattatctagaaacctttgggtttcttgttctccaggttatcctgagacatcttgctttagttatttaataataattttattttaattcttttttttttaaccaaagaagttcaaaagtgggaaaggaaaaaacaagctgtgtgcctttttacatgtgcttgaatctttagcaattgtacagaattcttaaattagcattattttttaaagtctccctttcagtgattaatgagctttatccagtatttgaccttttatcattcttgttttctgctcagaagtacttccttccttcctactgtagttagaaaagactgtctcttatcttatgttactgtaggcagtggtaacagggctctctacaaatggtgttattatggtcactatgtttttatctcaggggtcacgaacaaatccatgcaactgcttctaaggatttcaataaataggactttttatccagacaatcgccttttatgttacttttaaacaaaactactagtccatcaagagtttcaaaagaaaacaattctacagagtgccggtatggccgcacagaccaatcatcatggcacccattctccagtcctttatttttcaagtccacaacaataggttgttgattcaatggacaagaccagaacaattaagttctctgtttagcagcagtgcagcattttaatgcccttctctaataatggtctcattattgttattctaagactgggcctcaggaggaggaatatttgctggaggtacgtcattattttgcaaatttcgattagctcatcatgttgtctgtagtgtgaaaatcgtagctaattagggcagccagttagactaccagcttttgagcttatgagttaaaaggtagcatacttgataggccagtgatgtgaaaaaggtggtaaaaaggaggattagagcagttgccttagtaactccaacttccatctgtgagggaacaatggacttgtgtttctcccccaccttggtgtaaaaattggttttgttttgaaaggacagggttctttttatgacaatctggaattcagcccaactgagtgtagttttagttgttaggagagaccattggggataggaaagatgaaaggtcatggtgagcttcaaggacatgaaaggttgttgtctcatgtaacaatagtagattgttttttttcctaatatttctagccagcccctaagtcaggtgatggaacaaatacctacagtttagtcaggtgaaacaggagtgggtggaggaaggaaagaagaaaaatggggtaagagagtttgtattttgttaaaaaaaatgaaagggtaacttcagtctgctttcattaaacaaagcgatatttctttgtcaccatctctgagattccagtgtgctttgggtggtttgcttctgtgggccatcaaatctctgggaagctctctaatgtgttaggaaatgtgatttaagccttcttcctgaactcccagaaggaccaatgatgtgatacttaacaataaatttagttgttttagctttctcacgttattggtgttcttaaaaggttttccttcaaatgcacactgaataaaatgaatgataaatatgaaagaaatttgtttcaccactctacgggattttatcataaattctatgagttccatcactgaaagtttacaggaaactgtttagatgttgctgcaatagtgacacaaatttttctccatgtacataagaaaatgtcacaaatttaagagctactgtgggtttgtatacagaggaggcaatagaaaaagagtgaatacagtgttttttttgttttgtttttgttttgttttccctcaaaaccaaatcaccctttctgggtttaaaatactttatttcagcaaaatgagtgacttgtattttccttccatatcaatattaaaacatttagggttgttgttggtggtgatgtgtgtatgtatgctttaagaactagagagtatataggaacaagtgtactttttcttttttaagcaaaaacatcatctcttgatgatttgagaaaccttcatatttattcttctctatagtcccaaacaacctttatgtgactgaagctggacttggtccagggggttggggagattttcaaattctcttttaatccttggtctttgttttcttgttctagccaaccaccctattgctgtatcctttattcttttgagaagccgtgttcctttgatttattatagatacctcatagacttaaagtaatataatgaaactttagagcttaatgacttttgagttctcctagtccaaatcttatatttgaaaaatttaaaaagcgagactggaaagttgaaatgacttgcccaagacaacttgactaattagaggtagaccactgccatttgctacatggtttaaatataaatactgaaatcaaaagaagactggaaaagcattataaaaaaacatgtctaacttgtttactggtcattttagtgattgaggagagatggaataaagctaacacctggtagtcgtggtagggtctgggattcacataagattttttttggtaactattaacgctccattttaaataaatggagatttttttccctgtcaaaaacaaacaacaaacagcagcaacaacaacaaactccagcagaactgggaaggtactagcataggatccagaatctgcaaacctttcttggtccaggcactgtgtgagatactttcatatgcgttgttataatttacaatttaaacactatttctagtgtagtaagttagttaactgttctttttcctagtttttgtatttgtagaaagggatccaatgttattcaatttcattaggtgttatgagacataaaaattggtatataattgaaaaatgcaatacacatttggcagaatattgtaagactgcaaatttgtgctttatgcaaacacagatatcacaaaacaaatatggactataatgtttagatcaatataaaggccatggtttgtttttggcaccattcagaaagtatttagaaatttgggactatgtttaatcataaaggaggaaataaaataacttataattttaccttattatttcataatgaaatttacttcctagtaatattctggtatatttcatacaagtcttttatctacgtatgtatgagaagaaagaacatgtctagcttgtttactgccctctctctggggcccagaatagtgcctggctcatagaaggtactcaaaaaatagttgttgagcaaatgaaaaaaattttctgcaagattggatcatattatgtatacatttttgtatctaaaaactcactttattgatttttttatgttaatagtcttggagaacatttttaatcactacatcatataccatcatatggatgtaccacaatttgttttaccattacatcagtgacttatagcttttcgctattatagtacaaaagtatatttataagaatatcttgtttattattaaagtggtaaaaatgttaacatgggtgaaaaataactcccatgattgtagtataaggatctcaccaaacttcatcacctccttcaagtttttgcttaaatgtcttcttagtgagatctaccttgaacatcctgtttaaaattgcaacctgctaaacattcctgttctctctaatgctgttctatttgtttccagaaactttttcaatattgaacatactatataatttgtatatcttttaaatgtattggctttctttccaactggaatataaggtctatgatggcaggtaatttttgactgtttttgttcctcatattcgccagtgtcttgaacaatgcctagaccattaaacatgttcaacaatatttattgaatggtttattgaaactttaaaaaatggaactttttaaaaattcgacattcttcagtttcaatggaactgaaactgtctttttttaagttaagaatccttttttcttcacgtgggcaactctcatcaaccaatttttgcactggctaaaacttccattttctccctttgaacatgtacatgttagccagttaaatcaaatcatggcacttgattgaatcttagggcaatgttggataaagtcaaatgtcatgtaacaaataccccaagcttttacttcttcaagtcagtctgaactctgtctttaggtagatggttttggatgagaaatgtcaccagtatcactccttatccctttcctcatctggaagtccttctgttaagaaccttaaggcttaagtatgaactgggcaaactcaggttaatctgattatttatctatactttgggatgattttgccttagtcttcccccaactaatattggtcatgttcttaaaatttccttaggaaagacattttacaaacttccatttactttttcactgtatatggcttatattttcctttaaaaataatgtagtactcaggaggctgaggtgagaggatcacttgagtttaggcgttcaaggttgcaaatgagctatgatagtgccactgcactccaacttggtcaatagagtgagacccagtttcttaaaataaaataaaataaaataaaataaaaataatataaaacaataaaaatattactgctttaagttatctatggatgttaattataatcttttatacagtagcaatttatatagctacagtaatcccttatgtttatatggtatttatagtttcaaagctttttaataaacatgatcctgtttaattataaaaataaccctatgagacacacagacctggtttattatattcattttacagatgaggaactgaagcacagaaaagttaagagatttagtctagatcgtaaatctaggaagtggtagagaggccaagaaaaatctgttttctgagttctactagttcagtaatgtcttttctttgttttagtcactttaaccttctctcataatcatcttttgaatcatcatctttttgttgacctttcttaaaagattctatgaaaataaaaataaatgattagaatttcaatttaaaaaaaatattattttacttggtctactagtcattccagttctcaagggttttcctttaggtttttatggttttttttttccatagcctttatcttttccttaattctggttatgaacatggccttttgtagcaatttgtgaaaccactggctgccatgtctgccttttgaccttatagaagaaatacataaaacaggatattaaagagtttcataaagcagagaaaggaaaaaaaaatctagggtaagtggtacttagaggcataggcagctagacctcaataagacccatagacaacaagtggagttaaagaacagattctagttttttttctataatggagtatagttattgatgtcaattgtccaaccgtttagctaatacattgtgtctgctatgttaactttctcccaagactgttcctatcctagtagacccttactactctgccccacacccggtacgatgaataggacttgcttattcacatccaggaatatgaaatgtataactagctaaaaggccagggaatggttatggttttagatggactactgcactcagctacagaaaaacaaggtggaatcttagctattggaatgaagacaaaaggtcaaggtcaaactcgcaataaggtacatacttttattctgaattctaagggattgcgttggagtccttcttaggtaagcttaagctgatcctagagcagtggctctctaacttttaaggtatgtaagaatcacttgggtggttaggacttgtcaagtggggcccaggtgtctatattttttgcaagcatcccagattattctgatgcaagtgtttatagattgcatttgcagaaaattgccatgaagcctgggatgacatttattgtaggataagggaccatgtcactacaactgttgagagaggagacatttggaatttgaaagtcagacctttttactaagagaaaaatgtatgtcttgtgctcagagctgagttttgtttatctgcatataagaaagcaataaacatgggctggtatgcactggactggtgtgctgtaagcctgttaggtttttctcttcatgtatcttgtatcttgtgttttagcacctgaatgcttttgtaatatctaacaaagatttataccttttagtgtaaggctgattattcttttgggcctaatttaaactgtacctcgtttttactttccttttgatatctgcctgattaaatttcccctgttccttctaccttcataaattgattagcatgagttgggcagactgctgtaatgctaagggttaaccagaagagaattacaaatgaactatctagaaagttgattattaatccagctagagaagaaatatgcttttacttagcaagaatgagtatccaaagagctgataatattgttaaggcagcggggtggaatggcagagcttggtaagtaaaagaaaacttggaattaatcttttctgtccactttttaaaatgattagaatgttgatatatttaaacaattaagtctaagatgaatttacaagctgctggaacaaatctaaaaagttctaaatctgtttgttaatgagatccctatacatgctattggtagacagtaactaaaaagtatttacataagtagataaatatatttaattttgaatatttataaaaatacatgattagatttgtgattaagaacaaggaaatgggcatggagaaatgattactaaaacgaactaagtccaaacctcaaggaatataaactgaagaatcttcagtgacaaactctcttgtttttttcacaagaggaagttctgggttcttaggtattaaaatataatttaaagtaaaatattcacgtaaagattcagtgaggtgttttccagatgtctagttaacaaaaactgttataggttctgatatttttggggtcccagtacttatttcatcatgatgtttaataaggacttttctaaagacagcttttatggtatttgtgaattgcaaggaaagagaaatgagaggctctgtgctatttgtacaaagaaaattaagtgaaaagatatgattttaataatgttcttccactaaagactgctcctcctgttatagaagaaattttgatgtcaatattcaattctataagattgagattttgcataaattacttcatattacaaaaatgaacctttcaagcataatgtggaccatacattactgaatattattgaaactctatgtaatcagaagccatttcaatatactattgttgtacttaggagaagttaggaaacatattaaacttgccttacattgcaattccacacaaacaaatgcacattttctttcagtttacatcttgagtgggaataaaaacaattcaaattagcattttgtcatttaatgcttaaatgagcacagaaaaaaatctttttcaaaaactaaaaattcagtgtcggaaatctacattatatgtgtgcatgtgtttgtgtgtgtgtatttgtgaaaatacacagtatacatgcattcaaaatgccagagcactatttagtcctatatactcagcttttgttagttctaatgttctggcctatatttaagactgggaagagtagattattgtaagtgaaataataaaaatagttaacatttattgagctctgtgtgctaaatgctttgtttttaatctcatttaatcctcatattaactctgtacttgttggaaagctgtaaggattatagtgtatgctaaaacaaaagataagctaattaaagaacccctaacatctgatgctaaaagtctagcgaataaaggctcaggaaacaaaacgtataagaggggagatctctaaattctatgtgcttgaatttctcaaaattgaaagatttgatatgagcctgagaaagaagagggaagggaaataaatcagtgaattcttagcattcattaattctttaaacaatttttattatgaaaatttcactcatataaaaatgtctaaagaatggtataaatacctgtgtttataagaaataaaatattaccaatatagttgaagccttttctagttttatatctccctgtcgtcatgctagtgataatgactcatgcattttgtgtctttcattcccatgcttcttaaaataatatatgcttaaattccatattccttgtatggtagggaaaaccccacctaccattctttgggatccaagaaatactttttcttagcttcctattatactttaattaaacaaacaaaaatattcttagcataaaagaccctggccccacagaatctgacccctctattgccagcctcagctcttgtctttctcccaaatcattctttctgatccagctgctgtactggtctagtgacagtttcttggaccctctaaattcttttttacaccaagatattcacataatgctgtgttctcacctggaatgcacctgtttccactcttcatcagagtgattcctattcattcttcaggtccctgtttaaatgtcatttcttcagagaaaccctccttgctccttccaatgcaaaccttgtctccctgcaaggatcttgtttctcatcctttattttatagcagatattgcaatttgaaattatgtatctgtgtggtttttgtttagtgtctgtccttcactccggactggcccattttgttcttggatgttttacttagcatgtagcacacacggtcttgcacattataagcattcagtaaatatttgttgttgttatcaggaagaggaatgtagtgaatgagaaagtgaaaaaagggagattgacagaaagcaaagtacataaaaatagagtctgttggttggtttggatacactgtttagagaaaattatgcaacttgatgctctaagattggggtgcggatggcggtagaaatgtttttgtttcttaatatctagctataaaacatttaacagcttttcttcatttttgtttcttgtttttcagtgtagtctgtcactttgtgtcctcgctttggggaatctgtattcctggacacaggaactgaactttcaaattataaactcatggagcagccccagtggctataatcttttgtggaaatgctataatgggctctaaaaatctggaaaaatttaggacacagttgagaaaaaaatacctagtatttttgcaaagaaaagccatgagaccacatggaagggttttaaggtagataacaataactaaaatattcatagtgttgccagttgctaaaatattggtagacgcttttgtttttcttcaggaggatatagaaaaggttataaaaacatgaaaaagaaaatgaagtcagtctgagaggatggctgggttttatgaaatgtcagaatatacttatattgtattctatgtaaatctttgctggcatttgtaattaagtccaaggctaaaagattatgctggaacttttttttgttggtgatgagggaaaaggagataaaaaagaggatttaattaaaatgttttggtgttaaaaggaggggatttatagaatgtctcacttgaggtcatagaaagtgccattattaataacattgcaccttatgtttttattacatggtatactttcaagtgaactttttcatgtattatcttatacatttttttacttatctgcattttattttagagcagtaaatgactatggaattctgatggtgcctttttccatcttcttcaatgatatgcatagtaaaaatacaattaaaagtttcaatctcacaatatttggaaagatgaaaagtcagtagattcctttgaggccttatagtaatcctgtgaaatggttaaagtagagctattattatctttgtttcacagctaggaaaactgggacagaaatcagaaaaaagccaggactgaaaccttgtttttcctttttaaatgcataggtgtaactttctagataagatgaatattcacctcacccctgcactcccaataagattaagattgtaagttaggttcttctaaggaccaggatgaattaggtggatgtccttcgtaagttgtctagatttgaaagtttcattttttccaattttctaaagatgcaaagtagttaacaatttccagcatatggaactgagatggttaaaggcatgtaattagcagagacacattactaagcctaattataggttaaggtttattggatgaagtttagtggttaattccttgcctgatatcttagggttccaaaaataagaagacacaggtgtgggcttaaaagaatgaaatagcataatttttagtaaatgagctgtggctcaaatgaagccatgtgataaggcagaagatagtagcctcttgggtagacagccaagtcacatgagctgaagatgggttagtgcccatttaaaagatattttaaaagagaaagtgaagagcaatgtgtatgtcacttatatatatatgtgcaggtaggtagagggatattttttttgaaaacaaatgccaggaagtatttttaatgattacccaaggaggctgttgcttcattaaggtaaaagccaaatcttgttgctttttttccaactgaacaaatagcctagttgcagggaaattcagtttcttactctttcctgggctcattggcgaaagcttcccttaggttaaaagaatgaagcatgtttattctgaaaaacagaaatcttaggagaattcagtaggtgtcctgagatggctagagtgctgtcatagggaaaagagtgaaactgtggagcgctagactcaagttagtagttgaaagtctcagggaaccagagtcacgggcaggcagaaaaaataattttgtagcagttatggttgactaaaaatggaatgggctttttgttgtgatgatgaagttcttgtcattagaaagaattagggacttgacaggttaaaatgttgagttattccaaattatttcaatattaaagtttatgagaagatgtcctctgtgagtcacttggctaagacagggaagtgagtcaacttaagggacaaacatatattcctctattatgtgaagccaataatgaagttcatgaaggccagatgtactttctgggttgctcaagcatatgaataataaaaaaaggtgtgtttttatctgtagacagccaattgatatctggaattaccccaagtaagaactttagacttcaccatgtatccccaaacctcataagaattggtgtgagtggaactgtactataaagggaaacaagaggaatcattttgtttctccacagggtccagatctggaaaataagaattttaatctgcatttggaagaacaggttttaaaagtagtaataaattaatttacttatctttaaaaagcttctgatcttctggcacattaaaaagataatagatcacatgtttaagcactttagagattttctgttattttagtttctcttactgaggtaatactttcatttaaaacattaagtatattttaaatttagacaagtaagacacaaatacattcttattgtagaacagtgcctggcatatagtggactatcattaagcatttgttgaattaataattattgaaaaaaagatgagcaaaatttttcttaatgtgttttctcaccctaaagactgtttcttttcccaagtgtaactactattttcaattttctttgtatcctttcagacttcttgtacaatcacatacaaatatataccattacatagaaacatgcggctttatttcgtgtcagggtaacagtgtccccttttacacatattgctttatactttacatgcttttttcatttaaaattatggcttggagctctatgtcattttatatagctttatctcatttccttctacataatattttgtactatatatgtaccattgttgtattgctagacatctgagttatttccaatttaaatattctcaactgaaattttaggtatttaaatattgaggatggcaaaacctggtgtcttttaaaatatataaaatcagtatagaaaatttctacttggtagagttataaaaattaaatagaaagataaaggcacctagcactcagtggacctttaataattagtcctctcccttcctttcatcttctcttaaatcatttgcatgagggtaggattgaaagaataaggaaatatgatctttcacatactcattttcatcttcacttatatgttatttgtattgcttactgaatgtttaattcccaatctgaaggctgttgaaggtgttgactgacttagtgcctctttcacccattgttctttaatgactggctgaggaggaacatgtttactaataatgaattaattcattcactgactaaacatcaatttgtacctactatatgccaggcacaaagaggataaaatgaaaaagatatgattcttgcaagaatcttacaaatttgtcagcaagacagacacataaactaatgaataatgtgacaagagcttgggtaaatcagggatgggaacaactagatgagtagtcagggaaggttttcttttttttattaacatactttaagttctgggttacatgtgcaaaaggtacagttttgttacataggtatacacgtgccatggtggtttgctgcaaccatcaacctgtcacctacattaggtatttctcataatgttatccctcccctagccagtgtgtgatgttccccagtgtgtgatgttcccctccccatgtccatgtgttcttattgttcaactctcacttatgagtgagaacatgtggtgtttagttttctgatcttgtgatagtttgctgagaatgacggtttccagcttcatccatgtccctacaaaggacatgaattcatccttttttatggctgcatagtattccatggtgtatatgtgccacattttcttaatccagtgtatcattgatggacgtttgggttggttccaagtctttgctattgtgaatagtgccacaataaacatacatgtgcatgtgtctttattgtagaatgatttataatcctttgggtatatgcccagtaatgggattgctgtgtcaaatggtatttctggttctagatccttgaggcatcgccacattttcttccacaatggttgaactaatttacactcccaccaacagtgtaaaagcgttcctatttttccacaacctctccagcatctgttgtttccagtcagggaaggttttcatggagtaggtgacagttgagatcaaacattaaaggcttactaacatttcattgaacagatcaaaggaaaggacagtggaggcaaaggaatagaatgtgtaaaggcatgaaggagtgaaaaagcatggtatcatttaatatgtctttaaggcaatacaagaaatctttattatcagagagtagttggtagtgagaaagggccacttaatccactgaaaattgagtgagggtaacaactatggactctggacaaaacacaactatctgaaggcactgaagagcaacttgaaacagactaaatcttgagaggagaatgagctttggaagaatgcagggaaagaaactgggtaagtttgtcattttcaagctttctagtatgagggccggctgcaaaaaaagcagcatttttttctgacctggagaatcaaggcaacagactttgggcaaccacaactgctaagaggtgaggaggtaatcttgggaaggaaaaagccacagaaagggaaccccaacttctatattacaaatctctgactgatccccaaaccatccacgaacaggattgatctcaagtagcccaagtaaggttaaaagagctaaatagatgtttgagctactgcttactgcaggtaagacaaaatatgcagttcgagtctcagcaagtaagcttctttttttttttttttttttttttttttaagacggagtcttgccctgtcgcccaggctagactgcagtggcgccatctcggctcactgcaagctccacctcctgggttcacgccattctcctgcctcagcctcccgaacagctgggactacaggcacctgccaccatgcctggctaattttttctgtatttttagtagagacggggtttcaccgtgttagccgggatggtctcgatcccctgacttcgtgatccgcccacctcggcctcccaaagtgctgggattacaggcgtgagccaccgcacccggccgtaagcttcttaaactgcaatactatttagaatactataaatgaatctagagtctccacagcatagtggtcacaatgtctaagatataatccaaaattgctcaacatatgaagaaccaggaaaatttgaaaaaaaaataagacatctcagtagagagagataaattattaaaaagagccaaagggaacttaaaaaaacgatatctgaaataagaaaatcacttgagaggacaatcagcagaatagagatgacagtgaaactgaagatagatcaatagaattatacaatttaaagaacagagaggccaggcatggtggctcaagcctacaatgtcacctctcctttgggaggcttaggcaggaggactgcttgagactagtaagtttgagaccaacctgggcaatgtagcaagaccctgtctctacaaaataataaaactagctgagggtggtgacacgaacctatagtcctagctacttgagaggctgaggtaggaggatcacttgagtccaggagttcaagtctgcagtgaactaagatggtgccactgcactcttgcctggttgtcagagtgagaccctgtctcttaaaaacaaaaacaaaaaaccacaaaacaacagagaaaaaattggaaaagaaaagaagatgaatatagcattagggatatatgacaatattaaaaggtctaacatacatgagtcccagaaaataaaagagaatgatgttggggcagggaaaaaaattgaagaaataatgccatcaatttcccaaatttggcaaaagatataaatgtacagtcgtaagaagttcagcaaactccaagcaagataaatgcaaagaaaagtacatctaggcacctcatagtcaaattgctggaaacaagaaaaatgtacaggcaaaaattgtttttcttttgtaaagaccaagaaaaaaagaaacacaacttaccaatatcaggaatgaaagaggaattatcactataaatcttacaggtattaaacagacaataagaaaatattatgaatatctgtatgccaaaaagttatacaactaagatgaaacaaacaaatttcttagaaaaaaacttactaaaactgacacaagataagaaactgaatttgttcattaagaaaataaaaatttctataaaggaaactccaggcccaaatgatttcacttgtggattctatcaaatatttaagaaataacatcactcttacataaactctttcaaaaaatagaacaatttctacctcattttatgaggccagcataaccctaacaccaaacctgaaaaaattataagaaagaaaaattatagaccaatatccttcatggtcatagatgcaaaaatctttaacaaaacaacagcaaatccagcaatgtaggaaaaggatgaaatatcacgaccaagtagggtttagtccagaaatacaagattggtttaacatttggaaaatgtcactgtattaacagagtaaatgagaaatcatatgatcatttcaatagatgcagaaaaaacagttgaccacacccattaataattaaaaaactcccagcaatctaggaatataataaaactatttttatctgaaaaggatggctaggaaaaacctacaactaacatcatatttgatggtgaaatagtgaatgctttcttcccaagataggaaacaagatactgtccatgctcattcatcctacttgacattgtatttaaggtccaaccattagaatgaggcaagacaagaaagcaaatagtataataatataagaggtaaaaagtaggattgtatctttgccaaagtcatgtgatacaaggatgatttcttttgtattttaatatattaagtaggtggggatcaaaattgcatagtaaacaatgggaaaaatgatttcattttgagtcaacttttacaaattaaaattaaaattagtaaaaataagtttatatattggcagcattcatttataattctaactgtgcattaattcttagaagagtgatcattttttaagagtaatttttcaggtcaaatattatgaaagcaaaatcaattttcacactctagtaccatctgtcataacaaaggccatttttgtaaagaaaattttctaaggactttgcttaatctttttatattcaaataattcttttatgaataatctaccatattgactatcatgcttgccactatctggttcttcagcttttatcttattctaactgtaaattgttgatttttcaatggtttgagctgttcactgacactatatttctttgcttcatgaaatcttgcatcttttgcaagatttgtgattttgctttgcagtcaccttacatttttattttgaatagtggtttcaatgccacaatgcaatatctggtaattgactagcctgatgctcaaacttgactgaaaaaaaaattacaggtatatggcattttaaaaagtattcttttgcttaggttacacttcaatcagttaaatcagtcttttgaagtgggacccaggcatcaatagtttttacaggtctccatgtgacttcaatgtgctgacaagtttgaaaccactgagcaatgatgatcaaagatacgaggacattaacccacatgtgtgagatacatgttaagttaatctgtgagggatgtttacgtgaagactaattttacaaatggtaagtttattaatgaatgccttttaccttttgtataattttagtgactcacataatgaatatttggataatgagagaatctcctaaatccattgagtaccaagtatatatgggccaggaatacagtggtgaactaaaatgtatgtcgtacctttctctagtttacactccaaataagaggaaggcattaaataaatatttaattgtaggataataaatactatgaaggaaaagggagacctaattcggtttgggatcaaggatggtgactatacattagtggtattaaagctgagacataaattataagtaggatatagtttggtgaagaggagacagaagagggaacagtatttatgagggccataaatagaaaagaagcttgcaagctctaagaacagatatcagggaagatgatttagagaacattcaacagagaacagttagagaagatcaggtcttatgttgctaagtgtgtgtatatgtgtcaggaaataggaatagaaagataatgtggaatcagcttattaatgagtgttgtatctatatgcaggaatctgtatcttgtaggttatggggaaataatgaagggttttaagtaggatattgacatgattagattttatgtttcagggccatgactcagttacttcaccccccacctgccccccgcaaaaaaggtttttccaatgtgatattctcaacttagaatcaggaaagtaaacttttctttgttttgtgtttcctgcattaaggtaaaattattgaagttgaatagatttctccttcaattctcattattatcccactttccaagctaaatgcaaaaccacatgtataagaacgacaacaaaaaacaacaactctgctaatattcctcaagggccatatgcataccaatacaagcagagtctccctatgagcattacattttgccaaagacagctttgaaataaggctgggggagcttgagagccatactcaaggggctggccccagagaacaatatggctccagataccacagacctctgaacatgttaatgtggcccaaggcaattcaacagcaacaaacatgaaactatcctcttagtttgaatgactattagctagtgggaaaggaactgtgagagaaaaaaaatgcaaaattttaattaaataatgttttacatatttttctcctttggactcaattcagtcacaaatgatgtggcagttgcctgggatttccacagcattaattaattcaaaagagcaaaatatgaatcagaaccaaaaacatatttattatgcccttctttccttttaagcatcatgaaaagcttagcgtctcttgtgatcacaggagtttgcatttctaagacttgggtgtatccaatttaaaatggattaaaatatgctcccaacataataataaagaaaagattttttaaaattttttcttttctgtttactgaaaagtttttcttttaagtgatggaaataagacatgaaaataatgacactactgagattaagcatacctcaagagcatttttgtttatttcccaaggataaaatgcacttcaataaacattttacaggcatgatttaaacttaccctctttttattataaaatatagatgcctctgatattaaaaatgttatatgttgcttttaacccactgacaatcagaatccaagaaaagaaatgaaatagtcacagctgagtcagctaaagtgacaattagacctggaaatgtcaacttttgggggaaattatagaaaaggtgaactgaatattaattgggatcagggaagcacataatctgaattctagttatgattctgccacagattaactgtgtgactgtttcatttagttcatctcaaatctgtactagccctgtactattacttctgataataataacaacagtacttgaagtaattgagagtttacaatgtcctagttagtactttgtgcctttttattctgcttttcactcttttaaaattggagctctgattaatgaagaaacaggaaaatgatttctatttctggaaagatgccctttttccagatgaaaaagtcctctaggatctgctgtatagctctctggcattttctctattaattgtacatggtcttcagtgggacaattccaaagagagatagatactacaggtcagaaagaaataaaaagcagtatgttcttttctgatatttaatttgctttctatgctgccattctttttttcccgttgttcaatgtcagtgattacatggtaatagctaaatttgccaaaagcatttttatttctattttagaatgtaaaaaggtgcatttcccttatgactatgctttttgaaatttctcaattttatcagttcatttctatgttttcctagagttgtttaaacatttttttttactctaaaattgagggtgtgtcagaattgttgcaagcaaagacagaggtaatcatatgtggtttttgttataagctttgtgttgatactgactgctatttaaaatagtatctttaagatgaatctacttttagcattttttctttttcacgtgagtttattgtgcaacaactaatcaaatttttctcttatgttatattattttaatacctttattcttctaggatgtcatggaggtgatttgaacagggaactcagtatagaatgagttaatctattattgcacatttatgtatttcttaggtttctaaagacttcctccttaagtgccaacattatttttacattttaactatatattctgattcctaaacagtttcttgtttagaaaaaatagaaaggttaaagaagataattaaaataacctatatttcattttcagagatagttcctgttaatattttggtataatatatatgagggtgaggttatatcatagttttatcttctgatttttaaatttacttttttaacaacgtttctcaatggctcatctatcactacaaacatctgattcctgagctgttccctgagttgagtgtctgttaaggctatttatctctacattgagtggtctccaaattgctggggtttttttgagttcttgtgtctgcatttttggtttcctatctttgcctttttcagacttgaagttgtcatttctctgtaattagtgtttttgcctttagcaatatcagtcctcctcccatactcttttattagctgctacttctatttggctatgggctgttaaattagataagaaaagagggaaaactaacattttataggcttctcttttgttgtacagcactaatgtaggtgcttttacatgtgatgccatttaattctcaaaataactccttgaattgttattagttcatattttaagggtattaaagatccatttattgagcacttagtatatgctaggcactgtgctaagaacattacatgtatctattgggcttattcctgcaacactccagcaagttgaactattgtacagataaagatacctggactcagagaagttgagcaacttgcccaagattatattattggtaagtggtggaagcaggatttgaacctaggtgtgctcctcatataattaaaattatgctacagttatgcttaagtaagagtaaatagattctgagctgaggaattctcctttaagaaaactaaataagctttaatgtatttccttgagacatctgttttggattttgctgcctttctctttcttcttattgctctgttatagggatgttgctgtataaggaatctatggagcaatgtagtgacataagtgtggaagagtctaaggaactcaatatttatgctgaattaatcctaaaagaatgaactttaaacattttatgaaggaaagagcaattcttattattgttacagaagtctctatttcatgactcatggaatcgtgagtgcattctttgctaaatttcctatatcaaaagatacttacacagaagctaatacaccattgtatagctacatttctcaggaaaacaggatttaatctcaatgtatacttcaaattatccatgaaaagggagcaaaaagttttaattagttttttttttgtttgttttgtttttaatggtgcttaagagattaagttgcggttaagagcttggtctttagctagtctgcctaggttaaaatcctgactctgccattactagtacaactagtacaactaccctggagttgacaatgattccacattgaactctctaacttcattttaggtccatttcttagatctaagcacagaaacacctaaaattggagtattttattcagaatagacacaagcttcaagtgaggaattaaatatagcatctctttacctttagataattttcccccaagttgagagatttcctctgccttttgaaaatatgatactatattaggtaaaagcattacagtgcagttcttttcaacagctgaattgagtgttgaacttgcttggtatcctataatagagagcactccttattaatttgctattttattattgaaagtgcaaatagcaaattattctccctccctctgttgtgtgcatgtgcaagacaaagataaaagccatgtttccttcgtggaagggtgtggaggtagaggatgatttcaattagaaataatgacagcaatagacgcttccaatgaagatatcgtggccaccaaaggacaaaggcaagaagttaattcctgaagtcgaggtatttgattaaacatttaggctgttctttatgtgtacagatgccaagtatgttgttatttacaagctaagtgacaccgtatttgacaaaggtattttctgaatgttttgatgatggttgggagagaagcaaccctgtgatatccagagaacctttaataattaaagtaaaaataacattttgataagcaaaaactttgctttttaagacttttactcctcttttataatgattaaacgtaagaaatggcctattttaatggtggtttattattctggttaataacattcacttagaaaaattaccagactttgattagaacatctattgtatgtgtgtgttttttttccccactaccttaacaaattgttttagaaatagcttacaacttagtgtcaccctcaggtgtttttatgtctaaacatttatttttaaaactttggtattgtgttcattgtgcctctgcctgtgtgtgtatgtgtgtgtatgtttgggttttgggagggagtgggggaataagaagaaattttagatatggaagtcggtgaaagatgatgtgtgagactagaattttgtactgaaaaagaaaaggtttcaagcatgttttctcttttggagagaaaaagaatgaaactgactatattatgcatattttcatgaagaatgtatataaatataatctggaaaattataaaaacaaacttactttctagagatggaagaaaatatatgtgacttaaaaaattgcagcagaggtaaagaaaaaaaaattgaacatattttaagcatagtgtccaattgggataaagttttaacagaacaggctgagccatttatagattacaacacttttaattttctcagtgttacaaagtgtttattttgataaagaatttgttgatgctctatcagcttttccatgtgcagaagtgcaactgggtgattagttaggcttgaggctagcagccaaaatgtagaaatttggtccccagttctttttctggaataagaaaaagctactgagttttcctgagccttgataccctattgcagaaattcttcactatcaaggatgtcagctcttttctctcttctcatttttcttctttctttctaaaattctttttgtctcatggtattaccatcttcatctgtgtttaattaagtaagtactaattttggaggtattgtagggtttatgttagcttagtcatatggaaattctttacatttgtatcaattttttctataattataaagctaaagaatctattttttttactgtaagtttaaagacaaggaatctaaaacttggagagattatttggcttgctcaagatcatatgtttagaaatcagggccgggacttttggcaatgccacactgccaattaattgattcctgttcatttattttttgtcttgctatattgatgaccagtgtcagtatgttatttttatcatctgtttaattatttcacaattgtcttattttgctatatctacctatctattagtagatggacacatatagaggtgatttgcttgattgctttttatgtctcatttgcaacttgatatagttgacatgtaagtggtttcatcattaaattaaatttatgattggttggatagaatacaccaataagtttatgagatttgctttttttagaaaaactatcatacttatttgtgcctgttttggcagtaagaagttattatgttgttttttttgcatttagccataattatggacttgttaaacaattggttggtagaatggatttagataaaagagtaaatatggtctttcttattacttttttttctgattaaaaaaccaaactatggttattggaaaaagtcagaaaatatgaaaaagaaattataaaagctctgtgatgacatttagggatacctcagaatgtttatactgattatatccttgacgtttttctgtttagatacacatattttttaaaggaaagatgggatcttattgcacatgctgttttgcaagctactcttaaaaagttaacatgtgagcatttccctatggcatcagattctcttctcctacctaccttttctttttaaaatgaactttttgtttactataaaagtaacagatattatatagaagaaatttaggcaatacatataaaaataaagaaaaaaaccttttcactttatattaaggtatatacactttttgtattgaagattttatgtctgtgcctatctatctaatatgcatatatgtatatttaaacaaaaatgagatcatatggtatcaaatatttatattatattataatctactttttaatttaatggtatatcatttacagtttctatgataccacctgttgttttacattattaattttaatggttgcagactattctattgtggccatttcatagcttagctgatcatctataggtaaggttgtttttgattctccattattattaacaatattgcagtaaactcatctgtagctaaatctttgcacacatctgtaattatttctttagtttaaattcttaaaaatggattgttgggtaatccctttttaaaggaatttgattcctattgccaaaatgccccccaggaaagttgactagtttactcttgtcaacagtgtataagagtactcatttttcctcatccactctgacacattattattatttttttaaccattgtcaatatgacaactagaaaatggcatcttatttttagtataatttgcatttctttcattagtagtgaaatggaatatttctttatttatttgcatttttttttctttttttgagatggagttttgctcttgttgctcaggctggagtgcaatggcacaatctcggctcaccacaacctctgcctcccgggttcaatcgattctcttgcctcagcctcccaagtagctgggattacaggcatgagccaccatgcccggcggattttgtctttttagtagagatggggtttctccatgttggtcaggctggtctccaacttccagcctcaggcaatccacccgtctcagcctcccaaagtgttgggattacaggcatgaaccactgtgcccggcctgcatttcttttttgaaaaataaatttcttactcataacctttgagaggtagtatagattttggagtcagattgttgatgacagggtttgaatcttggctgtcatcattactcaacagctctgtaaacttgagcatttgcttaatttctcagtgtctcagtttccttatatgtaaagtgggaataataatattacttatgtcatagatctgttgcaaggatgaaattcatgaatatatataaaaaatatttagaatagcctatcacaaagtattgtacattattctaatgggtaattaattcttattgatttataagaggtctttatatgctaaaatagtaaccctttgtcatatatgatttagacttttttaaattttgtcattttgtctaattaaaatttttagaaaatcaaatctctctcatgaaatctaaagttttatttttgatttctgcctttagaaccatttttagaaatgtctttcctatctaacattatgtaagtggtcacatatattttattataatgttatttttttacctttaattttcctaatctatctagaatttattttgttgtgtgatatgcaattaagatatgaagaaccaattatgccaacaatgttagtcatatcattcatcttttaaacactatgattttcattatagggatatttgggtctattttttagcttctttaattgatctgcctattcatttggcaaattttaattattcatattttatgtgctttttaattgaattattctcatttaaaattatcttggttattcttgagtatttgtttttccacatgaacttttgagtcattttatcaagtctttccccctacccccacttccaaatctctgtgattttaatagaattatactaaatttgtaaaacaatttgggatgttatgacaaaatctcaggatgcattgtattttactttaaggacacatttttaatttaacgaatccacaatacctagcacatagtaggcctcagtacatgtttgttgaataaatgttaaatgttttagtacttactaactgttgaacatttaggttgttttgatgttttctctatcatgagtaatactttaatgaacatatttaacatataaatttttgaacattattatgatgacatctgtggagtaaattcctagatagctagttcgaagataatttttactggttttgatacactttgccaagttgccttcctgaaagcatgcaccaatttatgctccgcccaacagtttgaaaccgtagtgttttgatcagcttatttgtctcctcatggtaagatgcagttccaatttctaatgagttcgaaattaatatctcatggcaaaagaaacatttttactttttaaatgcttgtttatattttctgggtatggaggaggtaaaagatacatcgaaattgttgaatttctagtaaaatcctgactcttctgctatagatattaacacaatcaatggaaatgttattctccatgcttgggcagagtcacatgtgcaggaaccagataataataacaatgaaaagaaaacaataaatattactttagaataatgtcttcaagtggatgtttttttccatcttaaattgtttttctttttttgtacagtgaaatcacttgttcccctcttctgataaaaacaaatgttggttgcctatgtagtttctatgtctatttgattttagttctttttgtgacaaaatattttcagtggtacctagcatgaacaacctcactcctcctattattaactggcttaaagtggcaatttctggtggaggagaaaattcatatttattaatttttgtccttgcatatctgggaactgagatataaacaaggaaaactaacattacagttttgagtagttgtacagtaagaagctaacaggtaaacggctttaccctggttcctgcagtttttatttatctacttaatcacttttcagtcttcctctttttccttctcttgatgcagtatatatactactgaaagagaataaggctgaatcctgatgatatagtttttatcactatattttaaaattgaaatcctccttgttgggaaacaaatgccaacatcttcaataactctgtaactaacaacttgactttttttttttaaataaaagaattcctttgtaggttgctttatgaggttttcatttcttgagatagcactccttaatattcccgtctttcttttttttattttctttttccttctcttctacttcatatattccctgtcaccccaattctctcctttcccttcccttatctcccttctcttctcttaaatttagtgagtccttaaaaatatacgcttgtcagttctgaagtctaaatgttctatctatagtgcagtaggttttccccatttttaacagttgcctgggggaaatttaagttgatctgtcctgggtctgcagaatgtagtcatgagtttcagtgatgaccatgaggaattctttcctcattttcttactttaaccttatagagatcatgtgaaattcttactatcagcaagagtgctatgattttaaaactcaatttgcatatgcttcctcttcctgtattcctggtacccatcttctgaaagtaggctttagccattaaaaggcaggagtgtagaggaagtcggcaaaggatttcacttataattatagctaactctatcaaacatgcatggattatgtcttgaggattgagtacaaccattttctaattctaggatcactttcctttggcagctagcatctttttattctggatgcctctctctctctatttccactatcatctctactcccactccttgctagtgttttgggatgcaagtttattttaatattgaccttaagccaatctaatttagaaggtataaatccaggaagaaaagaaatcacattaggtatgccacatgtttacagaaattatttggaattaaccaaattgttttaattattattatcattatactttaagttctgggatacatgtgcagaatgtgcaggtttgttacataggtatacacatgccatggtggtttgctgcacccatcaacctgtcatttacattaggtatttctcctaatgttatccctcccctagcccccaactccctgacaggccccattgtgtgatgtttccctccctgtgtccatgtgttctcattgttcaactcccacttatgagtgagaacatgcggtgtttgattttctgtccctgtgtttgctgagaatgatggtttccagcttcatccatgttctttcaaaggacatgaactcatccttttttatggctgcatagtattccatggtgtatatgtgccacattttctttatcgagactatcattgatgggcatttgggttggttccaagtctgctattgtgaatagtgctgcaataaacatacgtgtgtatgtgtcttcatagcagaaggatttatattcctttgggattgctgggtgtgcattagctctttaaattatttgggattagtcaaatctttaaaaaaatgtgtttgccttagcttttcaattgcatccattactgtcaccaaataatattcaccacagaaatatgcaactttagagttttagtgaattctttaggaccaggacaatttcttctcttttttttttttcttttctgtacaacacttagtgctttgaagtttcaagatctggattggtgttttggagtttggagaactgggttctaattttaactctgctactaatttgtaactaattacttgaacttgaacaaattgtttaaactctctaggcctcactttcatttcagttgtaacaatctctctggttcagtgatgcaaaaaatctgatttcaactggagagattaggtgtgatgagaagatgtcattattctgtttaataatatgtataacttttgtatgaatgcgttgggtggcaaattaattggtgtgggctagaaagtttgaaaaagctttgaagtgttagttaataatagtaaacttctgaggcttctttttttcacatgagttgttggaatttatacctatttttttatataacacctaatggcagcagtaatttttttttgttagatgttgcttcattttgaagttccattcttaaaagttgctaataggcatagtgttgcatcaagtttgactttcattttatgaatttggactgtagttgtctcctttttttaaaacagtgatagaaaatatagaaatgtcaataataacaaaaatgatcgtggagagaagtttgaagagtgagatgggaaagagagaatgtgaatatgaaaggaataaaaaccaacctgctctttcctatttaagtatttgtctggctttcaaacacaattttattttattgtttcttggattttatggagtatagaacattgcctaagaatagagtggataaatttatcacaggcacataattctttttgccatgtgagtgtgtttgtttgttttttcattacaaagaaacctcaccacatgtttttaacatttttattatttaaagtatttgaatcatattgtggcatgtgtttcttaaataacactcttagggtgctaaataggagaaaaggataatgacattaatattatttttttctgtttaaaaatgtattccacgtgtgatatttgaaataccaattgcataaatgtagaagttaatttttaaaattattttgaaatacattgccatcattttatctgaataactctgaatctgaagaatgcagaagggttagaaagaaaactgcagatctgtgaattagtgataatataactaaaagttactatatgttataattaccagagattctaatgagctaaaaaagatgtgagttcctgacaatgaaaacatttggaataggttttacaggtttccttattttttgggtatacttccatggggttttagtgttttataagaggtaattcccagttcagttcataggcagtccaggatgttctgaataatgaagaggcacataagggagttcagagaaagaaagatttggctttatgacttaagtcagtatgatatagcataatattttgagataatatctgcatggaagctgtagtaactgtattgagttaaagatgggtcaatgatgtacagccttgagtatttattagctatactgagggctacatttctgtattaataaagataagttagcttccttccttcttcccttccccttctccctcccttccccttctccctcccttcctccctcccttccttccttccttccttccttccttccttccttccttccttccttccttccttcctctctccctccctccctccccctttcttttcatttcagcatggttatgacctaataatgttcagaacatataatatgtatacacatatgtgtttattcaatgtatttgttgtttacttttattcttaaggattagagttaagcacatatcaaccagaaaacctacaaacttttgcaataaaaaattgacaatgcctgggtatgattgtatctctggaaattatagaaacctataaattaaattctcaagtgtgatactgcatcacttacttgcaagatttactgtttctagagctgtaagggaagatgttacagatgataagaactatctaatattgtaggagtttaagtttatttagtagtgaaagagtaaccccaagaaggaagttagaccaatggaacaaaacaaagtgtgaaaggaagagtgaggtaagacagggcatctgaaacagtgggacagaaactgaagaaggacccgtttgcttggattgactgctgacacatctctcttttaggcatgtgtctagaatttactgctttacattttgtagacatatagaactgcatatcgtgaattgtcctttgtggttgtcattctgcctgtgaaggatgaaaatatgttagaaacaaaaagttgagatagttttgccgtaaccacagttttacgatgaaattttatttttgtgcactgttgcttatagatgtatatgtattcatatactaacacactattaggaataacattctgtacaatgccaattttccttctcactattttttcttcctaaatatatctacataccatgaaattacctttgcgaaaaaaatggttatatcatatgtatgagcatggcaagttctgaacatagttcgcactaactaatgtgaacttttatggcataaggacaaaaaatgaaatcttcctagtgatgggcagggattcatataaatgaaatcacatttttatatcagaaccttaattttactttttttctaaggatctttcagttccagttgttccatccacgtgtccagctggtgatatcaaattgactaatctctactggctctctccatcaacatctcaagggtggttaatgatgattttattctcttattactttgcttttatttaaattattctgcaattcctctcctgtgaaaaatcagtgttctagcttcttgtgaccagtcgttaactgtatattttggagtcagttattatagctgtcactcaactgggcttatctgtgaatggtgttttggagaagtggcctttccaacaaagtcccaccctttgccgtcaactgaagtctctgttagtgctttactctccctggtgacttctaacaaccttgattagttggctctacaattttaaagtctgccatctgtctctactttttctttctttttgtcttttattcctatgccattaacttatcattattccttttctactagaaaatatacatatgtctattatatattaaaaataagtatttggtatactttagtatcatacctagttagtgtgatgaggatgcagaattgaataacttgcttttcttaggtcctgttttatttattctggtcatcttgagttacctggctttcacagtctatactttcaggagatttaacaatatatgtcattaatcaatcaataaactaattatttattgaactaatatgttcaatacaatgccagatacaaaagaagcataaaatatgattcttgctttcagtacactcacaatgtaaacaaattaaggcagtataaaatgttgaatttgggaggttttacctgtcatttaacaaatattaggtgccttttataataatattagctaacatatactgagtattatctatgacccagccattgtgctaaagttctttaaatgtattacaggtcgagcaaccctaatctgaaaatccaaaatctgaaatgctccaaaatctaaaatgttttgagtgccgatatgatgccagaagtagaaaattctacacctgatctcaagtgactcagtaaaaacaaaggcacgtagtaattttggtgtagtaatactataatattagagtttgtaatacaattttacactttagaatgaaggcaagatagtatttatacatatgcaacatgtatcacataatgtgtctatgtacacatattcattattctttggcgctttggagtttggaattttattcaacagtgtttactgagcacttactattgctaggcaccagctggggattggagatacatcaatgatcaaaacagaaatctctgccctcaaggagcttacgttctagtagagggaaacaggcaatttattttttttttaaaaaaagaaaaagtaagttattataaagcaaggtagaagataaatgctatggagaaaataaaacaaaaaagggggatagggagcacccagggtggaggtatatgtgcaactttaaataggatagtcagggagggtatcattgagaataaaatttttgcctaaaaacttgaggtaaaagagaaagggaaccatgcagatatctgggggaagagcattccaggcagagggagggaccagtgcagactctgaggtagaagtgtgcttggtatgttcaaggtacagggagggatgagatcagagtggctggagacaaatgagtgaaggggggaaataataggaaatgaagtcagaaaaatgacaggggccgggttaaataggaatgtgtaggtcattgtgaggatttggcttttactctgtgggagatggggagccattggaacattttgagcaaagaagtggtatgatctgactcatgtttattttaaaaggatcattttggttgtttctgggaataaattatagggatgaagaagagtagaaacagggtgaccacttaagcggctattacagtaacctaagtgagagttcttggtggctttgagtagtagtggaggtagtgagaagtggttatattccgaatatatgttgaatgaagaactcacggggctttctgacagattggatttgttggatgatagaaagaaaggaatcaaggatgactctaggattctggcctgagaagctaaggatggagttgcaagcaagatgggaaaggctttggaaggtacagggtttagagggagtatcaaaagctcagttctggacttgttaagtttgagatgcatgttagacctccaaatggagatatggagtaggcaagagggaggagtgggttggagataaactctatgagagtgtacagatatgaacatagcacttctggatctcaatccatttttttggttctattttaaagacctattttataactttttggttaagataatataacaaatctgaattatataaattctaagggacaaaattataaatttattctgctgtcaatcttttggtctgcctgaagtgttatactctaccagatatagccatgtctagtcaggacaaaaaacatgataagttgttcaaatacttgggatttcattgaaggaatttgttacataggcattggaaaactaaaaaagcaaaaaaggaggctgaggtaacccagatattaataactgtatgaagcagctaccagccatggggctgatggaaaaaaatggaaaaatttgtgttactgaaacctacaagcttggaaaagcttgtgattggggcttggacttgtgatggggaggatgtgctccatgacttctgttcagaccactgagaagaacatggcatggcttatgctgtaatcactgagaggatggtggccagctggtgctggtacttgcgaggggcttaggcagctggtattgggagggctgaaagaagccattgctggtggaaacataaatggtgcagccataaatgtcttttgctgctggagggatgatggacagtagttagaggaaggaagtccgttgtctcttcccaccttctagtttcttactagtctctctcattggcagaacctgacaggaagccagctggcaatgaagtctgggaaatatcgtgccccagcatcacaaggcagagaattgaagagtgatatggaatcaagagacaataaatgaataactggcatatacactgtgaatgttagggcatgaataaaattttgagacctcattctattgaaataattagtaatgtaaaacactcactacattttaagccattgtattttggttatttgttaatgataaatggaagataatatttggtgttgaagaggataagaactgattaaagaatgacttggtttacaaaacttttaaactcttttctatctccaggcaagaaactaattaattgattcttgtacttaaaatatattagtgaataaaacaaatacttttcagttctcatggaacagacaacaataagcataacaagtaagtatattatatagtatgttaggagtttatgaatgctatagaaaaagaaaaaatagagattagagtaagggagactggtggaaagaaacaatattaaataggatgatcagagaagaactcattgagaatatgacatttgaggaattacttgaatagggagttagctgtagatggggcaaatgttatttttcattttttttagtaatagccatcctaatggacatgaagtggtatctcattgttttgatttgctttgcctaatgactgatgatcttgaacatcttttcatatatttattgtcattcgtatacattcttttttgtttggttggtttcctttttgtggagaacagagtctcgctatgttgcccaggctagtcttgaattcctcaagctatcctcccacctctacctccctcaatgatggaattacagggataagccacagcacctggcctatatacatactttggagaaatatctattcaaatttttgctcattgttgaattgggttgttgtttttgatgttgttgagttgtagcagtttttaaatatatgctacatactcacccgttattagatatatgatttgcaaaattttctcccattctctgggttgtcttttcattttcttgatagtttactttgatgcacaaaagtttttaatttgatgaaatccaattatctgattttttttgttgcttgtgtcatatttaagaaatcttcaatgtcatgatgatttcctctaaggtttcttatctgagttttatagatttagcttttgtttttgattcattttcaattaattttaaaaataagcataagataagggttaaacttcattttttaaataggtagatatacagttttccaagcaccatttgttgaaaagacattttttaattcttttattattattatgatttttgagacagggtctcgccctttcacttaggctggagtgcagtggtgagattgcggctcactgcagccttgacctcctgggcacaaatgattcacatgcctcagccttctgagtagctgggactacaggtgtgtgccaccatgcctagccaacatttgaattttttgtagagatggggttttactatgttggctaggctgatcttttccctctttaatctgaaattttaataaatctagatattggagagaaacagactagagacctatagtttattgcagttttattgtgttcaatgctctttttgctatgcctctgttgtctgctataatttgcaaaacataatgggagtgctagtcaattgaagaattatttcgtggccaatagacaagtaagagactatagtaagtcctcacttaacatcatcaataggttcatggaagccgcgactttaagtgaaaagacatgcagtaagtccctgaataatgagattaataatgttttgttataactatgagaaaaaaattggttttgttataggttgttttatataaagtttcagtttccaagaacccactgatgataagtgaagactttccctactgtattagatttaatgctttttaggaaagttacttttataatgtacatgtattatttgtatatatacaaacctcaaggtgccagataacagtttctctttatgctaatattggtgtttagtcctttggaaattttagccattgcgccattttgattcacactgttgtggtgataagctcctagaatttgtaaatcatgcattttattttgtgatgtgtctaagctgagggtgagattgagagcagtcttccaaggtgatttataattcctgggaaagttatctgagataaatcttgcacttcactgggctattctctttcttccttttgcttcatactgtggatacgcagtactatctgtactttgggagtaggttctttcctttaagccccaagggagaaaatgtggttacgctttgtgtcataactttgtgaatgacttgggccaccagtggcatcattaaagatctcagtatgtatactgtctcttctagcctatcataaatctagcatggtgtgagggagggtgcatttggaacattgttctttcctctgctcttgtttttctgaattcagtcttcatttggacccagttgaaaactgaagatatattaagcctgaaagtgataattctcataaaaagacagtatacttcaaaacaaggaacttcacttctgtttcagaaacagaacaaaaccaaaattagaacatacatagaagcaaaatgtgccttctcaaagtctaaactatatcttagaacttgtctgaggagctaacctgtagatttagattttctatctctacccattacacttgaataaacttcactttggatgaactagttattctagcaaatatcagatgcctgtaccatctatatgagcagtcatcttaaacatttttaaatttttatagatttagggggtgtagttatctttataagagttattgattatttaatttctgctgacctaatagagcttattcacttcgatgaaggcttgtacatgttttgatggttttatgctcttacacttgtgttatgatgttcgtatttgggttacaaatttatcacctgacagtatctgttagatatggaaagaaagtgaagggaccagatagaaaatttgcaaattgtggtactgatgtatgtaagaaatgcttcagtgttaaacagtggttcactttgagtagtaagttttcctagtaaatttgtgtatatctcaatgcagaaagaaagtaattgtgatgataggctatggactatcaagtaatcagttctctgtggtagtcattgaatggtgaaaacatggaatttgacctgggtttatatctttgttctacaatttgcttgcagtgtccttaagcctttctcaatatctgttatcattatagattgtggataatattacccatacctgtcatagactgggaaggattaagtgagagattatttgcatctttttctctgcttgaaatagctctttatggtacaaaaacatatctatatgtgcgatttgtttcagttgcatgtagataattttataacttgctcccttttcaggatgtcaggatgcaggaagaataggaagccctttccaaccagcagctgattaaacactgtatgggagaactgggaaatatgaaagatggcaaatgaaatcctggcagagagaatagtctaatcccaaaggacattctgaacaatagcctgggccctatgcctagtacttagaggggcctagggtgagagactcctgcccctcactgtactattcccagaatcttatttgttaatgcttggctttattaataaagtcatgaccacttgttcggcactgcatatggctggttgtgatttccagctgccctttgggctaaagtgtaaacagtgaatagattgttatgttcttctattaagcttaaagctgtgatctcatgtctgtgccacatatgtctgcaaccagaaatatatccttttctcatggaagggaagcagcactgtgtctgaaaagagtttgaattcattagtctaagagctttttactttttagtgaaaccaaagaacaaaatgaaggcataaaaaatcatgaacatcgtcaacaggatgtcaacatgacaccaaacagcataatatattgttaagacgagcatctaatctggtgactgaaatttctatacatttggcattttcacagaagacagaaatgcaggcagcagtccaacaatccagtcacaaagaaagcctcagtgcattggatttgaaataagcacaacagtttgtctgagtgactgagaaaatacccattgatagaactggctcctaaactctggcctgatttctaatatgctggttaattaacatctaatttttttttactatgttgatcaagaatgttgtttttgtggttggtggggtttacattatagatattaaaattgtttacatggtggaatgactgataaaaccctgaagttctaagccctctagaagaggaaatttatttatgataataataattactattttataccatacaagatacatacacacacacgtgcatgcacacacacaaacacacacacacacacacacacacagtacttccctgtttatctgatggggatgtgtttcaagaccctcagtggatgactgaaaccacagatagtactgaaccctatccgtactctgtttttctcctatacacacaaacctgtggtaaagtttaatttataaattaggtacagtaagagatgaacaacaacaataaaatggaacaatataacaatatactataataaaaattatgtgaacgtgtctcttaagttatcttattgtgctatactcacctatttttggactttggttgactctgggtaacagaaactgcagaaagcaaaactgtggataatggccgagataaaagtatgtgttacttgttctttataatagttccacagtagtacaatcccagttttacagatgggaaaattgaggcttaaataatttgaacagcttgtcaaaatcgtgggatctgaattcatatctatagttatctgactccaaagttttgatattcctgctatgtcacactgcctctgcccttttctaactggatttacaagatagcttcctggcctctgaaatacatagtcattgtgcgtgataatactagcaattaattgctctaccttacatttgtatggtgttttatacttttcaaattgatgttatgaccatttgctcatgtgttctaccttattaccttgtgaggtaatcagggtaaatattattatccatattttacagatgggtaaaataaacacaaggaagataagtgattttgcccaatgtcaaataacttataagtgacagaaccagaacagtcttgttgccctcaatttagtgctcttgtgcaacctctgacacctctttgagggaggccaggttggagagtagatcaagtttgtaagtgcagctcaggaagatttcctttcagctaggctagtagataggctgttttcctgaaaatgcaagtctttgggctactaagttatttttttggaaaaacctaattggaatgggcttatcctgtaagtcctgacatttttttctggtaaaagaatgttaggatagttattcttgttctgcattaagcttagcaaattcctgctggaatcttttaggccaggatcttggttcagaagctgttacaaattttttagcccaactggaatagagaaatttcagggaggaggaaaagtcaggtttgaaaaataaaattctttatagttaatttgttgggtaatataatatgccagtagcattatatactttctgcatgttcgtggaaatacccaaaacattgaacaagtagttcctaccatcgaggaagttagaatggacagtgtggtgatggaaaagaacatctggctaagtgtcagaagacttgggtttttgtgctaggtctgccatgggttagctgtgggacttcaggcaaatttccatgcttatctggttagttccctcatctgaaaagtgagaggctagagccagataacttctaacgtactttttttttttatctttaagctcattcaaatcttatttcttgatgccaattagagaaaaactaagtgttaaattgtatggtattaataagtacacagataagcaaagatgcagagactaactgttggagtactgacttttagtaaccaagtagtccttaaaaataaagttttaacctgtttttatcaaaattataaggtgttcctagaatagcactcagacagggcatggttcttagccctaccacctaccattgtgatttatttaaccaactaaatctgtttctacatctttaatacaggttgagtatctcataaccaaaatgcttgggatcagaagagtttcaagtttcagactttttttgggaggattttggaatatttgcagatattggattgaacatccctcttctgaaaatctaaaaatccaaaatgcttcaatgagcatgtcttttgaccattgtgtcagagctcaaaaattttcagattctggagcattttcagattagggaatgctcaatctctaaagaagttttctccatttactcaaaaacctttattgagtgctaagcattatgctagatgctgaagctagaaggtggtccctttcctttaaatgctcaaattgtccttctaccagggatgtttgcaatttaagaatcttagagttggaataaatcttagaggtggtttaatttgacttagaatgcaagtatataagggcaggtattttatcttgttcactgctttatcctcagaagctagaacagtgtcaagcatatacatatatgtatttaccgaatgaattaatgaaagaagaacagtgagaccatatctggaaccgtgtgtttataagttaacggcatagtaccagacttataaagatctctatgactagaagtatcacaggtatatcctgtgtggccattttcacagtggctgcctctgcaatgaagtgtctgacttgtcattccttgcacatgaatgttgaaaattctatgttctggttctgagaaagagtagacgtgcttattgaccttgattccccagaaaattttacaattctgaagcaggcgtttttatttactctgtggcacggaattctgcaggcataacagattctagatgggcttctctgctttttcatgtttcttccattttccagactctagctcccccactttttttttcaccacatacagcataccatgcaatgcttctgtatagtcatgctatattatattttcctctagagaattatcttgctgttctataagggaaaattgctttattttccattttctaggttttttcgggctttcctttggcattttccctgaattgagtcatggggcttttttgagtgtctatcacacaactatggtggtaccatgttgctatgattgttccacaaggttcagagagtggaggagtgaagttagggaacatggggatggaaagcaactgggagggtctttatttttttattgcttgtatcccttagtttatttattttcctttcaaagggggaaatgtggagattctttagaagagtagagaaagagagatgaaacccgtcattccaatgctttagtcattgtccattttgcagtcactgttactttttctccctctgtaacacaagatactcttatttcccttttcttctttgagaggaaccacatgatacaagggaaagggctttgttttaggggactgggattttaggtttcaccacttcctacctaaacaactgtgggaaattatcttctttaagcttcatttgtagaggctgattctgtagagatgataattctactgatctcaccaaattattttgtgaattgaaagaaataatgtacaagataaggccttgcaaattataaattatgaataacatacaagcatatagcacttacgtctagttttcatgattttgaagttatcaagaatttcctgttgccatttaaaagtaaagatatatcttacatattttttcctgaattttgcaacagcttaataaagtttaaaagatttggaaattggtattcagttttccagtttttccttgctatcttcatcaggccattccttggacaccctaaacagctgttgtgtgtcagtgcagaggtggttgtatttcactggttcaggattacatgtttctggggtagagtttcagggtctttgcttaacaatggttgctcactctgaggtatgctatctaatttggtgtattgagtggaagttggcatggatgcttcataaatcacagaaaattatgcaaaaatggcacacactaatttttggtaagagaaatacttctcagttttcttattatttttcccagcacttttgtacctgctgctctggttttctactctgtgcagacagactcttctttctatcttttccagtgtttatagcagaagtaatgtgtgagcttacaattttttttaagacgtgagagttgtttaatcttggaacaatgtctattgagtgaaggttttattacaacatctattgagtgaaggttttattgtaaagtagtcaaaagaatgctgaccctgaagtgagactgcatgggcttcaatcttgactctgccacccttattggctgcatgaccttgaacaagtcacttaacatttttgattttacagagtttactctgtaaaaagaagttaataatagtaactaagttactggcttttataaggattgaatatatataaagtctccatacatacagggagagttagctgttgctaatattatttttgaaaacttcttcttcttcttcttttttttttttgagatggagtcttgctcttttgcccagactggagtgcagtggtgtgattttggctcacttcaagctctgcctcccgggttcacgccattctcctgcctcagcctcccgagtagctgggactacaggtgcctgccaccatgcccggccaactttttgtatttttagtagagacggggtttcaccatgttagccaggatggtctcgatctcctgaccttgtgatctgcccgcctcagcctcccaaagtcctgggattacaggcgtgagccactgtgcctggccaaaaacttcttactattagagtatattggagtcattcaacgcattatttattaagccctactatatacttaggtttctgccagttatcttgggggatacaatgtattatgacacaattcttgtccccttctagaggctgagtagtataagatatgtttgggcagtacatcttgcctgaggagcctgctacaggcactatggagttgactggggatatggaacataaacatataggaggaaacaaatacatatctattttgatccaattaaatgaatgttacacaagtaatcgtgataggaatgcaatggtgaactaatattttgtggacaggcttctggaagaagtaagatattagctgagccttgaaggtagagtctggaaatgtagagatggggaagagttctgtagggaaggaaagaatcagaatatatacacatcataatgtagtggaaagggtgcatccaaacagactaggcatcaccacccaaactctggtgatgcctcttactagttgtacaactttagatcagctactcagtctcccttctcttctgtgaaatgggggacaatgatatttactttttaagattattgtaggtcttagacatagcctgtgcaaagcagctaggatagtttttgacacatggttaacattcagtaactgatatcattagaagtatagtgtaaaagttaaaagcatgggatttggagtcagacaggactcacttgaatctcttctctctcatttactttgtaaccatagtcaaattacttaaccacttctaagcctcacttagctcatctgcaaatggggataaattggtagctttgttgtggggttgttttgagatttaatgaggtactgtgaagcataaagtaatgagcttgtcgcatagtatgcactcagtaccattagccattaggttgttatttttattagtataacttctctcttcttctttgatatttcctttgtgattattcatattatttcctcctcttcgttccctactcgcttcatctaccttctttcaacaacatttatcagtggcatttgtagagacttaaaatggagacttgaaagaacgtagaggtagagaggaactggtcagtatcacatgtcgagcagaacaccaaggacaagataagaaaaggacaggtaggcacagataaatacaaatgacaggagcataaacatatatacaaccttttggatgagtcatccttcctaaggccactggagatttttttttcataagggaaattcagacctactactccctatgttaatccaatgatttcctatttcccagaggataaaacccaaactattttgaattgcatttgaaatcctttccaatctgttgtcattctgtcctactagatatttttcctgctacttcccaccatgcactccatagttcagtcacttcaaagttcttcctcttcttggaatgtaaccatattcttttatatgtctcagcccttgcacatcttggaatgtcctttttttttttagttccaccagacaaacttctcgttctgaggacccggttaagtgagtcttctgtaatgtctctgatccctccaaaatgaggtatttgttccttcttctgggctcctacaatatatctctctagtacctggtttcttatcctatcacttttcaatggtttattttccatttatatttcttgctagactgtggactatgggaagttgctgtcttatttatatgcctctgtatgtctgtctggcagtcagtatggtacttgacacagtgcaggtagtcagtaaatatttgtaggctaaataaaagaggtagtagacacagaactggcaacttctctggttcacaagccaattttagtatttctcctattaggattgccttagagtcataggctaataaaatttcagtgttagaaacatacctcattttacagataaagaattgaggccagagaaaagggattttcttttctttctctttcaggtcaaaccatgattctgtttccttcagaacactgtggcaaaatatctactacttgaaaggaagcttattgagaaaaatcctgctaatttctttccctcttatggcctgtcttccagataatttctccaaacacttcttatttaggtgttctttctagaccagtaattggggcataagttgatgctctgccacatgaatcgatgtgcatatatgtatattttagtcatgttgtgttctgttcagctgctagatgttcaaaccaactgggtttccccttagttaccctgtttgtttgctgtaacactttcctgttggtagaactatttgttctttcataataaaattgagaattttcttgtaaaatatatttttaaggtaaaacaatgtaatgatttgtcctggcattctataattttgaaagtcgttgatggcaggagaatggcagagtggaaggatgtctcctagttatagttttattagtaatgtgctgatgtttaatggtttatcaggactgaatttatttgaaaagaaaaccatctaatgtggtcagagtcatcttttgttcactatggctctggccctttttggggagtaaatcagctttttatgtatacattctgcatgggagctgtaataagtgagcacatgttgcaaatgctgtgaccttcagtcaactagagaaagatacctcttctaatcaaaggcaaaagccacgatctttcttgttgtaacttactgttgacacaagaaaggccagagagattgacatcaatctctatagaaaccattaaccaatgctgaataaatctgcagcattgaatccatatgcatgcttgcttttattattcttgacctatgggcacacttcagcattttgtgggctttgttttaaaaggaatgtttaaaatgtagctagttattatgggatttcgttggtgaaataaattgtttgggtagtctaaataaaagaatccgtattattttgcatctactaagcattatttgtttaggtgtggcttggtttgattccagattaacacacagcgaaggctgtcactttagctgggtgtagcaaaaaccaagtagttttatacatgttttccaaatgatgtgcaagcaatgtgtcatttgattctaattgtgactttattggcttgtggtccctcttttttattctttaaagcattaacaatgactgtgttggctgaaaagacatacgtctttaagaattccatggatgcccaaaactcagttggttataagtactaacaattgccgaccgtacgcatagcagaaataggctctgtaaatcagagcttcagtgctctgggcccctcttccttaattctcccgcacagaaatcgtatttctagttgaggagggtgagaaaacaaaaatgcttttcatttcattctgtgctgtacattttccagtctgggtgactaaagctggccagggtgcctatttttggaaagaggaattaagatactttggagaaagtagtgcactgtgtgctgacattccagatggccaaactatagtagtaccaagcccaagtttttgagcctttcgtgccaatgatgacctcatgaggtccagcctggagaaatagagacatagttctccaacaatgatgaagaatggcttcttcctttcatatttctattgagtgatctccagtgtcctcctcttttcctgtctctgacaaaattagccttttataattaacaattgttagttttttggcttgtctttcagacttctcttagagtccctttcaccccatctacttattgtatcctctctaccaaacagaaaaacttgtgatatttttctctttggcattcctgtcttttcctagcaggcttttttaatggggactgtgggagattttacacttgatttgttgaatctgaactctttgctgtaaactctcaccacacagaagaaactatctttataaatgacagaatggacctggcctgaatggcgctttgtttactgttttcctaaaaggggcccctctatatttcatctgtcaaagttgcttttctttctttcaacaatgcttgattgttttcacaaaaattcaggttccatagacaggagaattctgtattatattttcctgccaaattccgatctctgttttccttcccctgtgctcacaaagggctcataacttactgtcaactgtgaggcaaaccacaaagctccactgttgctcagcaaataggctctattggatgatggcttgactagcttgtaaagtttgcttaactgtagcagcagtggcagaaggtatgtggggtactgtatctcccaacaggccaagagatttcacttctttcatttacttttatgtttttaactcctttaattgttgaacaaagttaacagtgttttgtttagcaaattagatgttgcttaaagttatggctacaattggtagcctgagacttggcagagattaattagctgtggggttgggttttttttttttttggttggcagtcagaggtttcttgtgatttgggaaggtgtcaaaggtgttatgccctcaagttctgaagttctggctgatgtggtaagagaaagccggattgaagagtggaagagcagccacttcatgtgagtgatttgtgcttcctttagctgtcacaggtcttggctgtattactttaccttttaatttttctaacttcaaagcctacctgattgggtgggatgatggcttgttaagaaaagcttatgttatggtaataaggtaataacttgaaaagcatttttgcatgacatttgtaatcttgctagggaattgcaacagactatttaaaaacagatttggttttcctgagggttgaatatgcatacctttatttgtagcatctcgtagatttttaacatgtgattattttttctgtataatctaaggtcctgagtactattatctatgaggaatcatagattccctacatgaatcttttcaataaaatcaatctttccaatatacacggctagtttctaatatatgctgcatctgataaggtattttatgcactatggtaaaagatgtttttactaatgaaaatatttaatcataataaacatttcaaagaaacacaactgacaagcagaccactgggtaattgctgatgtgtttttagtaaaaacttaaaattattaatgttcataagctgctataactaagcaagactggtattacattgagatttatagtatttaatgctataactatgtattgaaagtattatttatataaaactatagtaaattaaattgatgattggcaagtgcattaaaaatagtgctttatcaatgcttttcaatttactcctttttattctgcgatacatttcttttgaatttttctgagtaacacacaccttgaatttgttttccatcatgcctgtcaaagttcaaaatattaatttgtttctttccttatccagctttcctagataccttattgtttgtgagtttggtctttaggcaagtttatcttgatgatggaactttcagcttcaaattgtggaaatagtgatctcaaactacacatggaatagtgtgtcattgttctaagctgtggtacagttaataatacctattttgtgataatgaattgaccagaataccaaacagttagtctagcaaatctatgactcctcaagttgattttctaaagtgaattgtgagaggagaattttaaggtaagctgctttcaatcagctcatgagaatgtgctggggttctttagcacactagtagcaacttgattttagacctgatttagaaataaaaaaaaattgtgtgaaacaagtaacattttggaacatttagtgttgggccaggggacaagaaaataatcaggctttgaaaggtattcatgtatttcataggatagggtagctcagactttttatttattgtcaagttaatttaagctctggtagcaattttagtatactgcaaggctgcttctgtttaaaaattaattctgagcaaatgggttacagtctccaaatacttggaccgttttagttgaaaatcaaggaaagaggttaataataggtggtttgaataggcacctacagctcaggactctattgtccttaggaatacagttatcagcagcagatgctgtaggctttggtcttccctgtgtaaaaagtgattccctcctgtccataccccttttgagaaacagtaacaatatatttttaccctgtgctttttattttcttggcatggttctcgtcattagttcactcagcactgggtcacgagtatattgggactggaaaacttatattccgtggaatttttatttattgtgatgtgtaaaaattcagaatctttttctttaaggatttttatttgtttttgtttgagtcaaaccatttttctgtcaagttttctttaaagaaagttagcatttgtttcataactaccaaataccaggtatttgcacatatatcaaattaatctcttcacaacaacttttcaaggaagatgtgttgtccctaattttatagatgggtacatagagactcagagagttaagtaacttctgaagttcacagacatagtaaatgagatttaagtctttcctctaaacctttccattatactgtacttttccttctggcaatagatcctggtaagactggtagcaagcagttttccagttctaggcaccatggatgcaaataaagtattacttttgaagaaatctaaaaagctggtagattaggcatgataaatgtaaaagtttttcaggggactactcaattttgggaaatcgtgaggtggaggtggtggttatatgagaagaaagaacaggaccagataaataatgcaggattctttcctataactaacaccacagcttgggaaaaccagaaattctgtaccttggtaggtgtgcaaatatgtacttggtaaagaatcccttaagtatgcaagacagcaggtagtcatacttgtcttttataatgataactcaaacaattctgtgcaatgattcatggaaacaattggattctcatgttctcctggagctgtttatgataattccagcaaatgcaagtgagaaatttaaagcaaatagctataagaaagggaggaggtggtggaagtacagagggagaaatacaagatagcagcactttagttatttgtgaaaccagactgtttggtgtgtataaaaaaatgtggaaatttgggttggtggtaaaaacctttcttcagctttcacagacaattataatttataagaattcatgtcctcatatgagaggcttttctatttcttttcctcagaagttaggatatatgtaatgttatatagtagtcatattttaagagggtatctaaattactctgcattccctgaaatcagctctagacgggtagtgtgttaaatacatattgttcaagctcctcatcttgttttctctcaaggctgttctcaacaccgacttttgtagtgaggcagctccagttttgtctgatatagctggtgtggtttctctggtcagagatggaaggtagaaattggatctcatatttctctgggccttgaaataaacgggcagtgacattcttattttatttcataattgtctgtgtaagaatataattaaatgttgatcatctaggctaaccagaaatagcatgctaggaaaagcatggatagttaacaaccaacaaatatttgttagaaaattactgtgtaaaaactgcagtgaacctctcagccttgtgtgtcagtagctttaactacttcctcaaccaattttgttgtcaaattgcccagaatgacagttaaaaggattggttagagaattacctgctctatgtttctctctcttttttaaagttgttaactagtaattacatatctcaaactgtagaagtacacagaaaagaaaaagatagcaaatccttttactaagctctgattaaatgagtatttagaatatctaaccagaatattcaaaataaaattctacaggaatggtataaattagtaaagaataattcagataataattgaaaatagttaataatttatttaatttagatttcagacacttttaattctaatagcatctgccctggcattagaccaacctgagttgaaattttgccctctgtatttactaggtatgaccttaagcaagttttcatttttattgttttaataaacagttttgtgccttggctttcttatcagtaaacagggataatgacattatttaacttctagagttgctctaagaactaaatgaaataatacatgtagcagtgcttagcacagtgcctgcctggtactttctaagcatctagtaaaaattatctatgtatcttttcaaccatctcttcaacatccatccatccttccatccatccatccatccatccatccatccatccatccatccatcatctgcccattggttcattcatttatccatctttttttatgtttctgacaacataaattgattattttgggaggctttctttgccagggaatatgcagaacttttaaaatatgaggtgaatttattgtccagagtgtgtgcaaagaggagacacccccagaaaccagtttattttaagtcctttttcatggctacttttttctggttgaagataacaccctaaatttatttctgcctattaattcaataatatttaaataattgggaagtatttactgagtgtttcttttcacaaaacattgttctaggtattgtgggaatgcagagaaagctaggattttgttctcacccttgagaagtttgtaatgcggttggggttacttagaaaatataatgatattatacatttttaaaagattatgtgaggtaatatccattaagtgttgaatgagtgatataaaaagtaatttctcacagatcttattagaggtgtttagaagaggggtagatcgtagttacctggaatagtctcagttggtttcctaacactaagaaaggaaagtgaggaaaatagggagagacaggcagagcaaaggctaggaggcaacaataagtgaagtttgactggtgaagataaatgtataaagattggttgtatctggatggagggcctcaagtgccagggtcaggagtttggactttattttgtcatcaggggagagccactgatgttttttgatcaggagagtggcttgatgaagggagtagcagttaagattgatttggtggaggagatactaaaatagagaaagtagtttagggtctgttgtaagagtttaggtatgaggtgtgaaaaagccctgtgctaaggtgattataagtatggtaagagagatgagcataagaaacattaaagaatagctgatggagcttcatgactggctggcattgagaagcaaggataaaaatgaggaggtggatagagtgttcatgttttgaaccttgatgattctgacagtggtactcttctgggtgtggatgaatgaggggaggtattgaggaaaatagtgatgaatctagttttaaggtgtttaatatgaaattgcagagcatatcttggtataaatacttaacagtcatttgaggactgttggatttctgggagatgagagagtttagtgttggggatatggatataataatcttatgacttaatgagatgcttgataaaaacagtatagagaaataataatgtttagattggcagtattaacatggagtggtattttctgtgattatctattcactttaatttaaaacaataagctatttgcctatctctccctctctgccttttcctccctcattcccatagtattgattgtctacgatgtgttgtgcactgtgctgggcactggggatccagcaatgaacaagacagatgatccctgtcctcatgaaatatacagaattaacttgttttttaattaaacaaaatattttaatgagttctccttttacccatttaccatgagcttatgctatgtaagcatttatctcccagggtctgaaagatgttctctgacaagaagtttccttttcttcctctcgttgatactttttattttagtatattgtaataaatactctgtaggagtataatttcaggaattgattaaattactcatcatcgaagtttaggaaatactgattgcaatcccctttgcctgggaggtttttattgtgctgagcttataagaagtgtctcttggaaaaaattgtattatattatttgaaagttctaagaacaaggaaaaagatgtttttctaaaaccgtcttatttcttacacccagacacttctcttaatgatgttaagtttatctcaaatcaaaataaaacgtgcagctagagactggacttcccctttctcctgtcgcttgctatccttgttttccttctgatttagccaccgatgttcaaccaatgtcttcatctcattctttcctctactccttcgtaataaaatagaggaatggagaaagaggaacacaatgcaagactgaggaacaccagttgagactgataccagatgaaagcattattctaatgtctggatttgtattctaagattcaagctcaggagagcctatgctcttgatgagcctcaattcatttcactgtcaccctggtgtagtcagtgcctcccccttttttgctaaactggtctatttttgtgttaaatgatcataaatgatgttatttagaacagaagtatctgttctaaaattggaatggaatattaggcatatcaggcattagctataggaaatatttcaaaaatgaaatggttaaaatgggaatatcaggcattagctgtaggaaatattggtaaaatggcatatcaggcatatggtaaaaatggaatgtcaggcatatcaggcattagctgtaggaaatattttctttcttgcttgctttcccttccttcccttccttccttccttccttccttccttccttccttccttccttccttccttccttccttccttcctcccttcctccctccctccctctctttcttctgttttctttcctcttcttatttatttatttatttttttgacagagccttgctctgtcacccaggctagagtgcaatggcacgctcttggctcactgcaacctccacctcccaggttcaagcaattctcctgcctcaacttcctgcagagctgggattacaggcgcgcaccgccatgggtggctaattttcatatttttagtagagacagggtttcaccttgttggccaggctggtctcaaactcctgacctcaagtgatccacctgccttagcttcccaaagtgctgggattacaggcatgagccacctcagcaggcctagctgtaggacatattttctgataaaaatgacattattgatggaaaaagcccctatatttagagtatttggagaatgattagagtttttgctgtattagaaggaatgatataaatttgaatgtcttaaatcttgagttagttatgaaataaaatcacttttctaagagagcttttaaaatgcagtttgtttggagcattatctatattaattatattcattttaatttgtatcttaggaatctttggagtgcgggagaaccatgtcaaattttcagtcctttaatattaatttagcttcaggttactgagatcactttggtagtgagccaatatggtcaccaaatttggatgagaattctagatgctgagtgtctgaaaaacagttgtggatatgtgtcctatgcttggttatttttctaaacttgtgtagagatattaaatcactttcatgagatgaattttcagcatcaaaaatataagctactttagaagacgaaaacgaagcgtaactctctgttaaagaaaaattaagacaaaagcttttgaagttgaatcctgcctgtccttttcaaccttcaggaaggttgctaggctagaaagacatctctaaaaacaaagtttttataatggaaaatgcgctgacataccctttaatgatataggttcaaatggcagtgatataatttgtaggtctttgtgcttggaaatgtctggaaagttgtagtgctcttattaatatttgtagtcactttttatgaattagtatttcttgttgtttttcatttttatttaatttaagatgaataaatcttattattaaataacatgaagattgcatcatagccttcaggattaaaatgcactccttttttggggaagaagatagatgtgtttcctctgttgaaaaatttagatttgatattttgttttcttcatggtaattatgtttgcactttgctgatcactagttgtgcattattacaatggaaggtgacaatttgattgtcttcaattggagaaacaagtaattttatattcactaagctgtcaggtaacactaactcacagtactaagagctcctggcaatgcagcttggcacctatatttaactgctttgatgcttgtgtaacctctgctgaatcagaagtactttgcctgctggaaatgattttcaggcttgtacaatgaggttttcattaagtagacaaactgaaaatgaactgcaaagccatggttgtttttctcctccccttttaccttctccccttttcccctcctcttcccctccctttctactctcactcccttcctccctccctcttctttctcttcttcttgtctgtctttgaataggaacctgaaacttataccttatttcatcacatgaaagagtggacttggtagattgccttatttagctaaaggaggacctcagagattagtttctttatataaatttgttcagtgtttgtgtgaattttcatattttgaaacaatctaaagtatcaatattcatttttctctttttttctggaaatattgaagagggaaattcgagttaaggatggaaaagtatacagtgacaatttcctacactttgtctctgagaagttattgttctggtttatgatttttattaatataattggataagatatcctgtacttgggcttccatattaatgggccagtttcacgctgacagagagatgtctgtttattcacttaaaaaattgtagttctcattttatatgaagaggaaattcaaagtgaacttacataaataaattcattctgctattattttagacagctttctttcactccagccacacagaggtctttcgttgagctataaagtcattgtgctagattaaaatcctctaagttagtgtatatttatagtagccattgttaggttttactcttattgttaagtcactgaatttatttataaaatctgggcctggctttccaaagcaaaaattccaaaaagttattggtagataaactgtgagaagaccatattatttatatcaagcaaaaagtatagatagaggttacatgaagtcaagttgttttgatcccaggaagaaaccagatactcagggacacttaataattataggttttccataggcagtcagtcagcaggccagtcattaggctggctgcctgtctcttccagcagatactaaccaattagacagaggtagttacgtgatgtaacattatcaggagaaacaattcatgagtcaaagcattccaagacatatgagctctagtccaaagaacagtcttaagctacataaagtgacagcaatattgtcagctaaatataaactctagaaacacaaactttgatgacttaagaagaatctgttccaggtagttcttgttttgtaagaagctcagagggcctttggagacaattttggtgctttgctgtgaaaaattggacccttagaaaagtcagaatccattaatttaagcactttcttagacacacttcaagggcttcaaatgtatttcatttacctcatctccattgatttgacagctaattctaatcagtgagttttcttctaatagttactgtcctcatgtgttaccatatctgttctgaaagtgctgctacaaactctagaagataggtttataactttccaaggtaattctgaaaacagttaccttcttttcacctgaattttcttaattacttaatggaagaaatagaaaaatctggcagaagcagagggaagtttggaggtggattgggggagaggaggtggtggtgttgtataaagtaatacaaataattagtaagcaccttccgactttactggaatgaattgaggaatgttttaaaaggaatgtcttcattttaatgtctagaattaggatgtaccatgccatcctcccttccccaagatccttgaatgtggaaattagagatagaagaagagggttttaaaatcattctttgccctaggctgggtggactggtgtcctttgtagaggttcctgggtattgtgcattttggcaactaaacatatctgttactcatgttccttaagatgagaggcactgtgatatatttttggaaaattagttgtttatttctcaatatcagctcaagtacagcattatattaacagtgaattatctgactgaaatgagtctaccttggtagcctggggctgagctgcaaaaataaatgggaatgttggcctgaagttttaatttttttgaataagtagaacaactcttaaaatgttgctttatgttaaaaacaggactttttttgaataaatgtaacacacctggaaagtgaatgccatttgataataatcataaaaataatggaaatattttcaaaaattcagttaaatatattgctatgatgaattcagtggctctttttgataattatgtaagcttcaaatgacagttttgaaagatggatacttttcaagctataataaaaaaatgtaattttgagtgattatgccttatgagaaagtttaaaagtttgaagttgtttaaaaataatcctgactttaaacacataaaaataactgtttttaaagaataatgtcaaatcagaaaagttctagaaaatatgatattctgagatagaagacttaatgtgcacatatccagcattctcatcattttataaagtcttgggccaactaattttgatttattgttgcagaacagaaaataaatttactgtctgagtaagtttgtagtaggccaaacattcagactttgtactggtgttttggagtaaaataattatgacctttctagaggtgttcgtactgacttcctagagaacattctcagtaactggaggctttatctccagcaatctcatttccaaaagtcctaagcccgaagttcttcccaatggcctggcatcctgggagttcacttgattgttgggcagagacattttaaactcagggaacatatgatgggaatttagttttatgtgtcccaaagatatataattctctttgaaggttttacttgataatagttatgccccagaaaaccatcttgtttaaccaatgtgataagttgacaatgtagtttttctctctgattataatgtactctgtgtagtcaatacactggtaccatgtgagtgtaatttcctcttttattttatctccaatgcactgtattataaataaacagttaaaaaaaacaccaaacaaatctgttgcatctccttttaagattgtaccactgtagacacttgttctagtaaagtagaattgggcgcatttgattgcatttaaatttttcatgcttcagcagtttggctgggagcacagtaaagaaaaatcccatgagcgaggatagtttagaataatagaacttgattttgtgtattatagcggcaacatttgcgctgctttagttagggttgtgtcagcacttccattataaacccctgttttcagggggtataactagggagatttttttttaatacaaattaaaaaaacaattcatttgaatgatttttaagttataatagtgcaaaaataaaacaaagtaaagtcacatcgaaattgaccatttccacaaggattttgattttcttttacttattagtcatataaggcagcagctaaagtaaggtgctgttttaatatgttggggatgaaaatttttgcaatggaaaattactgactgagcattaaaataaatgtaagcattccacatgacattttaaaacactgaaacatgggtatatttgatttatgagtttctaaaggagagtaactatggtacagtggttatagtaaaggcattaccaaaagtcaagtgccattgaagcttctagaatacagtttggttggttgagtaaaatgttttaaaggggaaagctaaagaaatgaatgagatgtcatcaggattatttaataaagtatttatgcaaaaaatcagtgaatcagatctaataatcagcaaatctaaagtttatttaataaactgcattaaaaacaatttgtgcacattttataacaaaactcaaaactgccacccaaaacaaaaatcaacaacaagaccaaatgtaaaaaaaagatgtaaacaaaaaaaccccaacaattctaccaaaaggaaatgctcaaggaaataccttgctaaaaacaaaacccatctttttcaccactagcaatgcatttgagaactataataaagtaaaaacaagaaattatatgatttggaaaagtatttttggaacaaaaaatgttaattcctttgctaaggaaagggatttcaaaactgagtgtgtttttcttgattgttaaccgttgttgtcctacctcccctgtctccttttcctctaacgatagtgtgaactgagaatgaacactcagatttaatattgctttttttggcagcttgtgttttatttgcaaccttgatacacatatgtatttgtagatgcaaaataaaagacaaattgtgagatgttataaataggtagcattcctgaatggccactggaggaatcaccagaagactgttgatgaagtagaggtgaagcctttcctcactaattgtattcagcgtgtaatttctaaacttccctctgaattttgattttcaattaacactccccatttgaagataattttctatttaatgtaattgcaggaaataatttattggctgattaagactgaggacccagccttccttaagaaaacattctaacaaaccatcctttaaactcaactcatagatttagtctatttttacagctgcagagttgtatttaattaggattgtgcactattgttcactggtgcagtttatagttgaaattattcttaagagactgttttcattttgagttttgtcatgattaatttaaactgaagcaacaatcatagacattgctattggaaggagccaattcactttataataagaggatgtttgttgagggaagtaaagtcactctgatttttggatcatgactttcaattgtattgaactattttaaaaagcagaagtacattcattcttttgtttttaatgtgaatgattattgatattgtcagtatctgaaataggaaatcacccttgtttgtggcaagctcttgataaacttgcagaacaattataatttgcctggttttactaatagtagttatggggccggtaaagtaagccatacagcaattctcttatactaagaagcatccattggctaccatttttcataattgtgtatatgtttgtccatttgttattattgatataaattgatcaagaatatatctgatttattgatatagcactctttagaacatttaattcatttcttctcaaagaaattataggcattcttttgcattccctttcccccattttattttctagtatcaaatttaatagatacaatttttgttacttgtagaatgattattataaattggtatcagcattttaatatgtttcaaagcacttcaaaagcctgtaatacttttattttgaactgcgcataattagattagctgatcttatattaatttttttcactgtaggatactaaatctgagccccctcattaattgtgagaaatttagcattagctgttaaatcctatgtgaaacatgggctgctacataaaaactactgtttaaattggaattaacttaattatttttctttgcacttgatatttccttcactgcaatattcatgaaagcgtgtgacagatttgtaaatttaactgttaatctcagatttctagaccctttaatcagtatttatttgtctgtagaaacagtactagcaagttaatgatttgctaatttgaaaaatgctcatgtggtttcctatgttaactgatttgtgcattttttaaaaaatggtatgaaatcaattaatgttaaatagcaattaaggtggagattttattcctttcattacacagcagttttagagctaaagatgtaataaactaaaaacaatgtaaagttttagaaaagtgctcaattccctcttctgttaagttatacactttcagtggttttattttctaaccattttgccaagaaattcatcttaataaaatgatattctaaacattttgaaattctatttaataatcatggttttctgattttatatgagagcacagaatggagacgttgtcatgtagcgtgtagtcaatgtttatttgtgggcatataaatgaatgttcaatattgtatttggaggttttaaatattatgcacagtaggcattttactattttcatggtaaatgcttcgaatcttgtatatacttcctaatataaaatagaggtatagctatttcagatacttaattcaaatgctacaaaattgccctaaaactaatctaacagtatcagccactcaatcaatatgtcacttaaaagttaagttacaacaattgactcatttcaaaggtcttttaaaaagctttagatggcactaagtagtgttaggcccagccctaataatgcaaagtgtaaacaaagaagtcaggatcagatttgtttaggactttaattatgaattatttactctcctgattatattttcctacatatcccccttcttttgctcctacataaaccataggagaaagttggataattgtgctttcaaatcatcttgcaaactgactcatttgccagttcattgattcatttttttccattgctaactatcaccctaaatactttcaagaagcttataatctagttaagaaaactaggaggaaaaatatacacatacacaccctgtccattatgaaaacttactctgtaaaaaaatcattaatggattgtaagagagaaaatatgcagtaattactgggaagaggtttgctgagttaaaagcaaagagggaaagaaggacacataagccaggagttctttttcaggggtttagagtggaccacaaatatctctaaagttaaataactttccttctttcctgaactagccaaatgcaaggattggtttatggtttgttattgacagccatttttaatccgttctgttttttttctgcagaagaatgtcttccaagcaagccacctctccatttgcctgtgcagctgatggagaggatgcaatgacccaggatttaacctcaagggaaaaggaagagggcagtgatcaacatgtggcctcccatctgcctctgcaccccataatgcacaacaaacctcactctgaggagctaccaacacttgtcagtaccattcaacaagatgctgactgggacagcgttctgtcatctcagcaaagaatggtgagcctttaaaatctgaccactgccactaaatgcattccttagaatgtcctcattataaatagatattttagggaaatagatgaccttagagttatttttgtgtagatcatgaaacaactaccaggtacatattactaagatactaataactggaaaaacttgaaaaatggtttgtgatttagtgtatatacgtttattattaggtcaatgtgccagtaatatattttatcgattgatttttgtggggggattggttatcttattctatgaatccatgaatttaaggtggttaacttggtaatatcataaaataggtatgagcaaataaagtatgcttatgtattaatattgaaaaatttaattaagcaaatatgtctgtgtgaatgaggtcatatgttgaatacaccttcaatgagaaaatgcaggtatttatcacttttaatggtcattcttgacttataataaagcttttctcacttatgtgcttatatattaatttcaaaagggcatgcaaacctcgtgagaataagtcaatcagactacaggagttttctcaaaaagtagaaaccacatcaaatacatgcagtgtattagccagctttcccatgttaaattccatctctaaccatcagaacagaaaccatagtcagtgacattaattatctagttcaaagcaaaaatattcaatttttttagcatctagaagagattaaaatgttaatatattttattagattagaagttttaaaccccattttgcatttcttaatctttggctaacaaaaattaagttaatgaaaattattttaagtggacactgagaaaatttttatttcttaacaaaaataaggtaatatttacaatgcctttactactaataacacatatttaaattcttatttgatgcttaatgtctcagagacttaattcaataatttatgaaggcagacatttttctttttcagatgattttgcagacacagtcaatgctctgaaacagtaggtgagaagcagaggattgaaaggtagtttctagactaattttagttttgaaagggatcaaaattgtacaattcgatccactggaagatttatttttcttgagtaggaagaaggtaataaagcaagtctgtttttctgattgaacttaagttgttcattttaacacctccaaggtgaaatagatatccagtcactgccacttgcgtattggcaagataatggagcgatgtttcatttttatttaaacaaatatttattgagtaccatctatgtgccaagcattctattaggtgctgactatatagtggtgaacaaagcagacatgatgcatgccttcatggagtttatagtctgggagagggaatagaaattaaataaatatatacacaaatatataattaaaatgtgatgtttgctatgtgtgaggagaaagaacagaatgctatgtgagaacataatggggcaaacctaatttagaataaatggttaggaatgccctcactgagccaaggatggtaagaactaaccaggtagagtggaacaaagagtaaaactgcagagggaacagcatgtatgaagtatttgaagtgagaaagttactgcttaatttcagaaagtaaaagatggccttcgtcgctggagagttatgatgaaggatgcaatataggataagatatagttggagagattggtaggggctatatcaaacaggaccttggagataacattatggatgtgagatttgatctaagttcaatggaaaacgtttgaagcattcaaaaacatttcaaacagataaagtctggcgtggtataatgaatggatgggagagagacaagagtgaaagaaggaggacccactgggagtctatttcagaagtctaggtgagagatgaatggcttggattaatgtaaaggaagagtggctagagagaaaggatgggtttaagacatattttggcttttatgccaaatctagtcatagacaaataaaaataactggactggaaaatatgggtagaagaagaaataatacagttcaaattttatttctttgagaacactatacttatttttcctagaaaaattttgtttgtatcttgataaatgccaagttactttggtgggttattatcaaacttttatgatctaaaattttgtcttaaaaatatattaataattttcttaccaaatttatattaaatgtggtttatgatagtataaaatagtttaatggtacaaataagttaaatattaatgtaaaagaaatcatacttgctagacatgttttcaaactttcactttcttttgctatcaaacattgctttccactggagcctttgtgtattccgaatgactagaagccaaaatattttgtttaaactcccactctatagtatttcccagctgtgtacttatatggtgtaataaaaggatttaacaaatgggaaatagcagctgcatttggaaattccctttgtgcttctttttcactggatagattcaatattttgtaacaactgtaatatcagacctgtaatgacttatactgtaagtaccataacacttacaggaaaaaaaacaatagaaggattttaagtttctgggcagacctgcaaacctacatatattgtgtgtgtgtatgtgtgagtgtgtgttggagtgggaggactctgctaatataaaatttaataaacattttacctcattctactttaaaataaatatgaagtcaaaaacatgtttatgaaatcaagtaaaacttgtagttttttaatggatcatattctgtacttagagtcgcaaaaaatagttgtgaaaaaataaaacttaaaagaaaatctaaaaaataacaataattttttcagcacttatacagtttccattgttatttactttctgtaatggccctcatggccctcattcatgaactgttagaaacaagccctaaaagtttcttatctcttgggtacaggaagggttttactttgaaatgtcatgaccacagaggaagttttctgtcagagaaggtgaagacaaagcaaagaagctctactaattcccacttcctgattagaaaaaaaatctttaaatgtgaaaattctgattattttgaggtgacactgcaacaaaatatgagaccacataggttcaaacaagaaaaataatttgtaatggcataagcaaagaaggagaatagaaattttagaaataggatttcaaggaccactttgagataaaaagttttagattctgattttaatcataattacctatttatacacaccaaattgttgaattataaatttaatgtgctatgttaattagtgagagccatttgaaggttggaaagttaatgtaaataagattcactatcctctatccacaactgctaccactttcatcatggcacccagtgtgccaataccttttttgcagaggaatgttgacactgtccactaaaatgtgcttttgttctcattaggactgactcattaggctggaatacattcacataatttttttcatggaaaaatgtacagcatattattatttttgatgttaataagcatggagaggaatatttttgtgataatgtttcatgacctgtatatgatattgtgtgtaatgattatctgctagattgtaactgtagaaaggacagataaacttatatattgttggtgatcttgtctgcagattacatacaattttttggtgcaaattatgtatagctacttgtatcaaacagataaattgcaacgtacatgttattttgagccttcccttccttacttttttttcttttgctttagagtataatttagaaaggagttattatcatcactggatacctgagtgtatagtacctactaaagttccaggcacaaggactaacttgtgaataatgtagttaagatccctgttatcatagaacttatagtctagtagtatggcagacaataaagaagtcttatagagtgagacaatttcagacaatgataagtactatgaagaaaattaagtaagaacatgtgatagagaattactgctttaaaaagactggggaagttattttggaggaggtgacatttgagctgaaattggaataaaaagaatcactgtgcaaagatttggggaagacacccagtcagagtgtataataagtacaaaagtcttgtagtttgtatgtttgagaaacagaaaacaacagagtggctggtgaggcagagaatggtatgaaatgaaatcagggaggctgacagattacagatattatggagtctcataggctacagggaagtgtttaaactttctttcaagtgtaagtagaagccattggaaaattttaagcaagggagtaacatgatttgatttatgtttttaaaagatcacattgcctgctgtgtagagagtggactgtgagagagaacatcagaaacagggacaccgattaggaaaccattgcagtggtgcaggtgagagtttgattgatgataagcagaagagtgaacagttagggaggttattcattgaagagttctcagagattctgaagaagacaaaatttacacaaagggtggagacaacgttttaagtaatgtacatgtgggcagaaacatagtcaagaatgacaagaaatgacgttggtgagaccaaggagaggagggaagcgagtagaaatgctctcggccagagaatgggccgaggtgagagacaagctttttgcctaagaagcaactcttagtaggtggcttctgtggtaggccatggagatgtgggtaaggcaccaacactcttatgagatacaaaatgtgatgattgtaagtgggaacttatgtacatgtgtacacttacacacattcttatattgatacacattttggcaaaaatatacatgtggcttttaactactagtctaagtaggtagaaataaccatagtggactatcagccccagaatatctgaacttcttattttagagacctacttaaattcctccaggggagtttttatcttctagaaaagttttaaaataagtttccaccttaaataaaagatgtcaataatgccctttgttgtaattgaatgaaaataatggtaggcatgctgagatatttaataaataactattggggaaaacaccttcttgcttgcaaacaatttctactctgcttctctagctttcagtctcatgaagttgctaatcaactctggagtgttttgtgtttttcacttggagtcataaaattgctggtgtggactttgtaccatttctgggaatggagctattgtcattacatgataacaatccaggaatttttagtgaggatctaatcttcagtcatgctgttatgacagactttgagaagatttctaatcttgttattttagagaagattttaaaaacttgaattgttgccagttttttgtaagattttgtcatttaagatagtaggcagcaccaaaatgaaatttatttccccacttttattgagactgtactttagaaagtgtagtgaaacccactcgttcacttggttctaactagtgtatagtcatagtcataactcctaaggtaagatttatgtacacctttgtgatacctgattggcctatgaagcactggaaaaaagtccataaacctgtaaggtttagacttcttgagacatttagttactacttctctcatttttggattttggaaattcattcaattttagtaaagttcaagcctagatttctgttaacaggtgaaaatggccatccttaccttgaatcactgaatagtattttctaggaagactcatgggagatttcccagttcctgtaactttgaaactatatttgcatacggtactatctctttttcaacctgtttcagaaatttaatgacagaaatttatttagtatttgaactaaaaaataaaacattttattgcatggaatctggcaaagctcttgctgtgggtagtgaaatagacagcaaatgttgtctagtgttgacacattgatttcctttatatttttacaccctgataatgtgcactgtcctttagaaaaagtatgtatttttaaaagttccccaaatctaaattgtttaaattaaacaaagggttactggtatgatacttggaagtgtctcgatgtttatggaaatataaattattttttcatgattcttaattacataatatgcctttctaaggataatttttggaaaaattttctttcttacctagcatattattaaaatcttcatcaaaaatagagacattaggctaggcgtggtggctcatacctgtaatcccagcactttgggaggctaaggcaggtggatcacttgaggtcaggagtttgagaccagcttggccaacatggtgaaaccccatctctactaaaaatacaaaaattagccagacgtggtggtgcgtgcctgtggtcccagctactcagaaggctgaagcaggagaatcgcttgaacctgggagatggaggttacagtgagccgacattgtgccactgcactccagcctgggcgacagagcaagactccatctcaaaaaaaaaaaaagtagagacattaacatgctctggaatagttggcttttttcccccttgggcaagaaggaatcaggtatgcatgctgattaacacactccagtcattaacatgtgattatgtgggctgcgtattgagcacctgccaaaatataaaaatccagtactttgctacatctgtgcaaagactttttgcatttcttttgtattttgacagataaacgaaaatcggacattagtatcttttttttttcagtgaagttgtgtattcagaatgtctttaaggaggtgtcacatgtcatgtttatttttattttaatcattaagtctgtataagatccaatgactagggtttgtagtgcactgactataacatgaaccccttaatgaactctatcactgacactcacaatttgcaacattactgcatgttcaaaaggattatcttttcttggagtcagccaacgttctcctaatttgcctcagttttatgtttgcctcagtttgatggatattttgttttcatttactttacctatgtactgctagtgtatacctcatagtaatgccagggctgctcctgtggtttgacttttcctgtcaactatccctatgcaaatacttctatatgaccaaagtgtagcttagagtctatagcatttacacacataggaaaagtagctttttgataattatttaaagtaagacttggttactaataaaaaatctagtataatctagtctagcgtgaatctagtctagtgagtctgattgagcaggactgttctactcagcttttatctttcttaatggattcaaatgtcatttgaatgtagcttttttttttaaataaaccttttattaaagttggtcagggttaatcaatggaagctaatcttgggacactaataatttcctgattaaagcagaactctatgagcatgtttcagtctataggtggttctgattaatatatattttcttgtacagaaatccttcttaaaattttttcttgcctagcctctgggtacatcactataatgaaatatgataactggaacaataaaatctgcacattttttcataatgcttccaagcaacatgaagaaaataatgtttatattgtatagaatgcagttgtttatatgactaatttgaacttattgtgattagaatgaaatattaatctcaaagtccttctagatcagcaggaataagatggagacaactgtgatacgcagcatattactttgggaggaggaacccaggattgtgtctgcacaccttgagacctaccttctttaatttggaaagggttgctttccataaagccaactttactataatgaatcctacttgcatcatttgtttgaagatgaggttgaaagggctgtctctcgttattcagtcaaaccacctgcatgaagcaggaaagaccctactctgttccctccacaaatatatctaatctttcttgaacacctataatgaatatgtattaattaccttgatactaaaattattccactgtttgattgtcctctgcaaaaaagtttccttgctttccaggagaagcataaccttttaaaagaagagcaacttcaagctattattacttttgttaatacagctttcaatgtgatgacatatttatttttcatgatattaacctttactacattctcttgacccctaggcattgttttttaggtgatgcaaattgagttcaataatatatctgtgtaaaccacattctaaattccaaagtataaattacaaacctttgctaataaaattttacaatcaggttgaaattagaaatgaatatttatgcatttcatttatcttctttatatttcattagcaccctggaaaatagaaaatcttatttaataaaatgattggaaattatttggtaaacttttgctttcattataatttaactctgatttgtttctactcccagtatactgagagtactcagaaaacaatattctcaaatgtctcaaaattctgagaggaagtgtgccctcattcaagcacaggtagattatggtggtataatagaagaaattcttttgctgagaaatgaataattcaaatatttatatgataattacttttatttatcaattttttggtcagttccagtggtgagtaataattttttgcataagcactgagttagccaggattaaactaatgtaatccatgaacgaattcagaaagcttttactcttgagtttagactcaatatatgactttcagttatattaatttatttcatacctggtatgcttctactaaagatgattctctcatttttgttctctcatcgatgtatttcagatataattggattatagtttatttcttttgctttctgaaattaacagtaaagttagaatttggccctccttttggctactgttctcttggatgacacggtaggtcaaggaatgaatctatgtttttggatatttggaagttaagaggggaaaataaaaattcagagaaaagtttttctttccagagagaaaatatgggctctgtgattgtagttgtgtcatcagtccaaggttgtatgttgcattcaggtagaggaatgcacagcttccagacattgtgaggacctgattgcagttagacttttaatttgctgccttgtgttaaattggtgacattttgtgccccgtttcccttttgctggaaatgtacgtagagataggtgggtggatgcatggatggatagatcattgttttataagtaacataacctctgaggaatcatttttagtctctttgtacttgttctagttgtaagaacttaaacaagagagctagagatgttatttaaaatgttctgaattataaagagtttcttggtagcccaccatatgaatttaacatattagaagaaaatttgaaggttctttcagtgaaatcctcaaacttaggagctttactggacaagatctagtgaagagaggagtttgttgagctcacagggtggccctgagtatgtatgacacataaagcaatctgttctcttgactctcttctttaggcaaactgggccttgaaaggacttaactgtcaacagagttgcatctctattaaggaacaaatggatttgacaaaccttgattgggctctgatacttttaatgttaggatttgtgaggtatgaagagcataccatgagttatttcttttcatgtaaaacacactagttactttgcttattacaaaaacaacaacaaacagtatgggtgtcactcaaaggaggatgaaaagaaaacaactgcagaggaggagagcatgaggaagattgacctgacaccagagtaagtggttacctcttaagaggagctctatggaatcatttgagactctccaggcatagaaatgtgctctgtaagaatttgtccaacatctccaacttctgcataatcactccctttatttctcaatgccataaattgtcaaaaagacattctttttgtttggtaggggttcctttttttctttttttatctgggggccttagagggaacacaagttacctcctagaaagcctgtgttcatctctgccctaatttgctgtgtgaccttagggaagtcactttatatctcctgacttcgatttcctcagctcaaaaaggaaagatttgaactacaatgactaagcctcttggcacttctaactttcttggtttcaaggttaaaattgggatagccaatttgacttagcttactattgtttagattgagtatcatgtatatggtagtttgagtactaatgaattgccagatgaaaataactgtctagagttggtaggcacatgaaccagtcaatagttgaatgttgtttttgtttgtttatttgttttagatggagtcttgctctgtcgcccaggctggagtgcagtggcttgatatcgactcactggaacctccgccttctgggttcaagtgattctcctgcctcagcctctcctgagtagctgggattacaggtgtgtgccaccatgcctggctaattttttgtatttttggtggagacggggtttcaccatgttggccaggctggtcttgaactcctgccttcaactgatttgcccgcctcggcctcccaaagtgctgggattataggcatgagccactgtgcctgaccaatagttgaatcttgatagaatgttgatttaattgctgggaaattcactatcaggcctgccttaaagctctgcttacatggcatgaaatctttaaaacatgacatctctaaggaattcttagtgtcttaattcttgttgttcagacagtactgagtatattgagtttagggcaccactctttaagagatatataaagagaaacaattggaacacactcagagaagaatgttcagactggccaaactgtgttttatgaagaagaaatgaaggaaaaagggatattttccctagatgaagagaggatagaaaggtactgtaatagctgtgagtatgtattgaataactgccattctgaatgtttccatggaatagaaatatagattggaacgtgtttcatatttctgtaaagaagaattttggacaaccctccaaaaatggaatggaccactttgggagctgctaaatcctctattagtgaaagcgtttagggagaggccaaatagtcacttgtcaaggaaattgtaaccaccaccatttaattatcacttactatgtaatgccactgttctaagtgttttatttttattaattcatttaattcccacaactctttgagataaattctttactgtactattattattgccattttgcagacaaggaaattaaggtgaaaagaagttaactaacttgtctgagcttatatggatgagaggtggaaaagctgggatttaaactggaaaatcttgcccagggcgcctgtactttgttaactattttattattccatcttctcttgcacagggaattcaagtgctagatgggattgaacaattggagttttaaagacctttgaatcttgagattctaattttgtgtgtgaggctggtagtgtatagataatgcagggcttttctatgtccctgtcttgacaggtttggggatgttttctgtatttaatctattcactatatttacttccatttattaaatagaatgttaatgaggacattcaacaaacttttgggtttgttattttttttctgggaattgaaataacatttaggaaacaacagcttatttttaaagccttaggaatcatgacactttagcaaatattggtaacaaatctattttctgacacatctatgaataattttattgttattcaacagcatagtaatagtgataagtggcatatgttatttcaattttgagaatgttatgtaaatctaatatactagcaaatatcagttttaataaaagaaaaaaatacactttcactatcattcaaaaaatgatacttttgtcatgaataatctgttggcaattagaaccaaatatagcattttaatttatatatgcttctttaacccaatccttttctttacagtatgtcacattagaaaaaaacatacttttttcctctgagaaagaaccgtaaatgtttgcaatttagtcttcagcatattaaaaaggttagatttcctttgttagcaagaagttattggaaccgaaatcttttctgtcagtcaataacactatagtagaaggtgtcttatatagcacagttggcaagtagttttttgttcatcaagaaaacaaaaggttgtttaaagtggagaatcagaaaaaatgttacatatattgtctgtggtataagttaatgtaatatgtcaaacatagttgtatatatgtaacttatataacataatttggacatttaattgaaactttaaatatataaatgcactgcataccaaggaaggatggggtatagttagtggtgggagccatgtgacctggcaaggaagattgatcactaacatggttgagttgccagtccatggtaatttaaaacataaatgacttttggttgtttttgctattgtgttaacttctttacataaattgtagctccttaattccctccagtcagagactaccaggaacatacctgtagctgaacacattgggtttattactcatttttaatgaaggagaatatataccatagtgaaccatagaacgtcttaggaagagagtgttatatttggacctattttagggtttgggctttcttttggtgattttgagtagggtctaaagaagcagaagtttgttgtagattgagtgtcgtccgaaaccagggcaaatctatgattggatatctcaataaaccttgtctatagggagggcagactaggttgaggataacattgcaactggagaggctacaactaaaatggaaaacaaagcaaaactgacaacatatggtgctataagaatgaatagatttaattcattcttgctactggatacaggaaagggtacaagtgaatagtattctgttcttacagttagactgggcagccggtagggaagttgattcttgcagctacttatgccatttcccagtcatttctcccaactgcagtgactcccacctgtatgtgggtttcaatttcattatataggcaagattcaactcctgacctatgctttctgactcttaattcctgacatctgatctgacttttgcaaccccagcccactgttctcctctgcttgcagtatggctgaccatccacattccttgtctaggtatggtcggcaatccagctgaataagagcggtagtgtactgtagctgctcctggacacagtagagagaatccatatgcagataggataaataagaattggtagtattcctagaaaaagcaaattataaatgctaaagttcctggagctttgtgagaagccagatctcaatggaattggtttgaggtgaacattgataatgaagaaagtaatgtagtttagtatttattattccacttagatgaacaagtatgaataaaaacttaaaaggtgccagtggttatcatgactgtattttcagaattgaaaatagaaaaaaagggcaattggacaaaggacatttgtatttaataagagtagctatcatttattgagtacttatatgctaggcattatactaagtgctttatacatgattcatttctcatagcaacgatttgaagatataattatagctctatcctataaaaatgcagagtctaattcccattcccttgacttttggcaaggcttggtgactcactattgaatagaatgcagtgacagttatacagcgtgatttcccaggctaagttagaaacagtggtatagctttcatctggctgtctctgggacatgcacctttggatctctgagacaccacgtaagaaagaagtttcactatcctgaaactaacatactgtagagaagagaccatgcagaaaggtcatgtagagctagagtaagatgtccaagaaaccctagttatctcagccccgaactcttaaaatgttcccagcccaagtaccttatctgtgagtaaagaagcctttggccttagccactgacttaactgtaacctcatgggagactttagacagaaccacccagcccagatgctccaaaattcctgacctacagatagcattaaggataataaatgattggttttgttttaagcactttgtttttggatgatttcttatacaacaatacataagtaatacaagttacttcttggtaattcttggattaaggtgaataataaagtgtaatttttgcctcaaatgtagataaatctcctttctggaaatggatggaaacaaaaagacttagaaggtagtcatcattggcattgtggcatcttttactgttgagagtgacttttttttttaaaaaaaactgtagccctatggattagaaaaaacattggatttggtgtcagaaaacctgcagttaaagatttttaccggtcctgcctatgtgacatggagggaacaatcctgctgagtgttgtttttttcctgctgaaagtgaagatgtagaatttggtatctagttgttggtgacatatttttagaataacatctagagacgagtgcatcagaggaggatgatgaagggtctggaaatcatggcaaatgagaaatgggtttagaaagtgcaggagttttacctagaaaaagactattaatttgatatcttcattaagatatttgaacaactctcacatggaagaggaaatagattgatattatgcatcttttgagagcaaacagtaaacaatgtgttgtaattaatgtcttagtccaatactgctgctaataacaaaataccatacactgggtaatttataaacaacagacatttatttctcacaattctggaggctgggaagtccaagatcaaggcaccagcaggtttggtgtctggtgtctggtgaaggcccagtctctgcttccaagacgacaccttgacaggatcaacaaactgtgtcctcacatggcggaagggtggaagggcaaaaaggaagtaactatttgccttcagcacttttataaggttgctaataccattcatgagggctctgttctcataacttaatcacctcctaaagtgattaggtcttaggctttgatttatgaattatggggggacgtacattcaaaccatagcaataagtatctagattttagcttatgtgaagattaattttttaataattagatttattagaaataatatttgagatcctgcaactgtagaaatgccaaggaaagaaatcttgtttattttttctgtgtttggtagagggaaactataatatactgactctctcgacatcttcaagaaggccaaaatctattcttttaaattactatttttttctgtttcccctaagcatcagtgtataaaatagcttttgtttttctttactacatgagtaatatgtttatggaagatgaattagaaaacacagataagcaaaaaaggaaatgaaaattaccaacagtcttaccaccatttaggaatcactgtaaatattttaatatatctttccagtttgtgtatgtttgtgtgtgggggagcacatttacacttatgcacacatataaataattggtgttatattctaaatactacagtatatgctttttttcatttaatacatctttccttgtgaataaattatttctatgacttctttgatatttatatttaaatgtgaagatgaaatttattttctgattaaaagtattatttgtgataggacatttacaaaatatcgagaacttcaaaaaggaaataaaattatctgttgtcccaatactcagagggccattaacattttattgtgtactatggtctctttttttctgtacataattttttaatgatgtataatgtgctaccaaacagtagatcttattccttctatctaactatattttcatactcatcaaccaactcctctttattccccatcaccactagccttcctagcctctagtaactactgttctattcactacttctcacatgtgagtgagaacatgtgatatttgtctttctgtgcctggcttatttcacttaacataatgtcctccagctctatccatgttgttgcaaataacagaattttattctttttttactgtaaataatattccattgtgtatacatactatctttttaaaattcatttatctgttgatgaaggtgatggatatactagttccccaaatttgatcattacacattatatgcttgtatcaaaacatcacatgtaccccatacatatggacaactattatgtatccaaaaatttaaaataaaaaagtatattagtcttattaatatactttgaactaacaatacattatgaatattcccacatttcattaaattttctgcaagactatgattttcagtagcttcaaaacatttcatcatatagataaaatcataatgccctcaaataattcctacaattggaataactaggttgcctatagttattcatcactgtaaacaacagtatgttcaataggtatgtttgtttttaatggctgtgttgtattccactgtgtagttgtatcatcaattccttatgttttaatatctcagttctaaatgtttagcttaagcaatcctgtcattgttggagcaaatctttgctctttgcctgtttgattttttttgtttgtttgtttgtttgttttgagagacagagtctggcttgtttgcccaggctggagtgcagtggagcaatcatggcttactgtggcctggacctctgaagttcaagcaattttctcccctcagcctcccaagcagctgggaccacaagtgtgcacccccacactcagctaattttttttattatttgtagggatggggtctcgctatgttgcataggctggtctcaaactccttggctgaagtgatcctcctgcttgacttctcaaagtgctgggattacaggtgtgagtcactgtgcccagccttttgattatttttgacatatttgataattagttgtttcaagtttgtcagtccacatatttaattttgttgtatgctctggaagcctatggaagaagcatgaagtcctgaaatcctttaagagttaaaatttagttacagatatgacaattacatgcaaaatagtaatgaatattttattccagtatattattaaatgctaaattatatggttatgattaagtgctttgatgtgtagtttggagggtagcatgatagtgaggtccagtatagtcaggggtgcttcaaggatgaaatgcagtttgatctgaactttgaagagcgggttgggttcaaagttaaggaagatatagggcattccaggggaaagcaacaagacacacaaatgcccaaagatttgagtaattttgatatattcaataccatgagatggctacttaaatttaaagccatttgaatgccattggtgaaccatcagttttgaatagtaacttctgaaaaatctgaacaatattcgttttaatgttttttgtttttaatatttactttatctcttcaaatactggaaaacatcttaattaaaattctatttttgccgatatggaaaaactgctttttctttcctagaaactttttctaataactatttttgatactactgtgtactttttcaatcatctacatatattttacatattgtgtttaattgatttccagtgaaatgctctttagattatctgaatcaacatggcttttttcctttatttgggactaggatacttttaaatcatattttgaaaattttcttcactgttaggtttggtggggctgctgaagttaggggttgaaagaaaagaaatttatagtacatttcctttgaataaactaatgtttactaactcagtgcccacatgttcttcttttttgtgatgttcatgtgtttagtcgtgttaaacagtggttgttttcaaaagaaaaatcaaaagaagagaaataatctcctttatgttattttgaagaatcacaaccagctttaaaaattttttacacaattatattcacattgtaatattaaggcaaaacacatttatatcattgttctttagggagcagtatttcttaaagtgggatcaggacctgtgcatcggaatcagttgggttgttcatcagtattcaaattccttggccccctcattgtggaaggtggtatgggatgaaggaatctgcattttaacacacttgccagataattctacacattgaagcttgagaaccactactttagggaaatattgtctcaagtctcttcacagcagtgctgccgtgacatgcattaagacttggtagatattatcattggacattggtttagaccattctcacactgctataaagaaatacctgagactgggtaatttataaagaaaagaggtttaatagctcatggttctgcaggctgtacaggaagcatggctggggaggcctcaggaaatttacaatcatggcggaaagcaaaggggaagcaggcgcatcttatgtggctggagcaggaggaagagagagagtggggaggtctacacactttttaacaaccagatctcatgagaactcactcattatcataagcaaggggaaagtctgcctccatgatttaatcaccacccaccaagcctctcctccaacattgggaattacaattcaacttgagatttgggcagggacacaaatctaagccatatcagatattttgcctcaattgatgtgtcattggacctgttctgttcttaagaaattacaaaataatctgggctttttttcttaataaaatttactttaaagttacatagcctccttaaaaaaaccagagattctttgtcaagatttttttttaaagttggcattattgacttcatattagacagtaacctattataagtttattaatttacgtgccccttttactcagatgaattgcttacagacttccacttatgaaaggttaatatttgttaggtgttagaaagttaaaaagtgatggctggaaatggtaaattttgccccctcccattgttgttaagcatggtataacataacacgcgacttaagccgtttgtttttatttactgcctatttttacaatttggtgacatattgcaagtaattcttgtggcttttgtggggaaatcatgactctctagcctcttgctctctgctgcttggtagtgttgagccactttgcacagattatggggctaagaacagtgtgggtcatcactgcaataaggaacccatggttattgtctgtggtgcaggatggcagtgaccacattcccatgagtaaacaacaagtaacatagtccaacaagtacataacaatgcgtaaataagattgtttggcattagtcctgatagaaaaaaaatggtactctttggagcctaaatgctctcaggacaatctaaagttgttactaggctggagagcctctcttagcatctttcaatttcagtttggcagtgatgggaaaatctcctttattatagtcaattgtgagtcatttgtaggtaaccacttccacatattactgttttgacttgttcttcaatcccttaggttgagtcagggtttttttttttttttttggccataatgtgacaataattggcatctgaaataaaagcaactgaagtatgattgatcaaatggtgattattaattcataaaagccttggtcagatgtctaatacggactttattaagaggtttaaatggctttgacaaatatatctctgcattttcattcacacaagtggagaatgaactggacattccaaggagccacatactagccatgactggcatctaaaagaaggggttcctctgcatcacttcacagaattcttgtaaacattaagtgagataaaacatctttcctggaggaaggaagggatctagaagaaaggtaaagaagagctctctttcctgccctgccccatttattttatccttttctgtttatttcagcataaatatattgagctgctctattctgggcattgtactagcaatgggtatgcagaaaaaattaagatttatctcaatgaaaagattcagcttaattgagatataatatatgtaccatataatttacccacttaatgtatacaattcaatggtttttaatatattcccaggtttcacaagatttatcttagttggagactcatgaacattttttacttcataattcctcaggtccagaaggaagacaaatctctttagtcccattcccaaatctgttccttccttcaagaaatagtatctaccagttattaaacaccacctcagtattatgagcccagcactatgccgtggtgccttacaaatataatctcattatgtgctttcaataaccctgaaaatccattgtatcccaccttatatacaatgacaataatccgaaatacctagcatttgttgagtacaattattatgtcatttaatatatgtagaaatttactgctgtagatatcattttccttttccccccttttcccattagttattaactgtgtaacttttgccccatgcttgtcctcaagttcttgattcttactgggcttccttgtgaaggaaagatatagaggagcaattaggattttcaggagtctgatggtgattaaaagactggctgatttactttatacacttttttatataaatatagggagagagaatacccttgtgcaaacagataaaaggtgaatgcaaggctgctgaagggctatggcaaaataatagctgtttccaaccctcagtttcagttaaaagaaatataagaatattttatttctatgaacttttaggtgtttgttttccacctacgatttgctttttccttttcagctgatccatctaaacctcttcacagttagctaacttctctatactatgaagtaattcctgcacaaatatttctataataagcctgtccttttttttaagaaaaatatttctcatctgaggataaacttgtccttttgtaaaataaaaaaaaaaagacgtttataaatcatgctgctataaagacacattaacacgtatgtttattgcggcactattcacaatagcaaagacttggaaccaacccaaatgtccatcaatgatagactggattaagaacaggtggcacatatacacaatgaaatactatgccgccataaaaaaggatgagttcatgtcctttgtagggacatggatgaagctggaaaccatcattctcagcaaactatcgcaaggacaaaaaaccaaacgccgcatgttatcactcgtaggtgggaacacttggacacaagaaggggaacatcacacaccagggcctgttgtggggtggggggagggatagcattaggagatatacccaatgtaaatgacgagttaatgggtgcagcacaccaacatgccacatgtatacatatgtgaaaaacctgcacgttgtgcacatgtaccctagaacttaaagtataataataataactaaaaaaagacatttttaaatgccacatgaaaaatgtgctgaagtatcagtggtaagggtaaggaatagaaagagacttctgtaactttggacagctgtgtagctagaaaaaccaaaacaaaacagttttctccaaaccccagcacacaaaaatattcatgttggctaactttctggcactgatttagataatttctgtattttctggtgaacaatgaacattggctactgaagctaacttttctacttgttctaaactaaaggacagtgttttttatgatgtactcctttttatgttgtgggaagagtgttgatactaaaagtgtccaattaaaagaaaaactttaccaagcctaataattagtcattgaatctgaactaatttgaatgaaaggtgtaaatgagtaaggggttgaaatgcttgtttttgaagcacttaaactgctttatatttaaaaagctaaacagttttaatctgcaacttcacattagttcctttgacaattgcttctttaatgttttgtttaatcggtgttgttcaatcagaattgtattttttatttgtcctactaagttacttgtattttattttaattaatatattttatttgtcctactaagcatcatatactgtcctcagtttgggatttttttctccagtagcatgcaaagaaacgtatattctaatggttttattttattttatttttctaggaatcagagaataataagttatgttccctatattccttccgaaatacctctacctcaccacataagcctgacgaagggagtcgggaccgtgagataatgaccagtgttacttttggaaccccagagcgccgcaaagggagtcttgccgatgtggtggacacactgaaacagaagaagcttgaggaaatgactcggactgaacaagagggtatgtgtggacttcactgttgggctctgttttttttcttctaaagattccaggccttaaaaaaaaaaaaaaagtgggatttcaagggtcagagaagtgcataattgtcactagctaggaaaaagttattcagaggttactatggtgatggcagattttgatccattaggagtgttaaacagatagctccgtttttctaaaactttgtgcattttatttggttcttaagataacaaattaggattttaaactgaccataatcctactctggaaaaaggtaacaagagaattttcctaactgcaactttatttttcattttttctcccctatttccttttggtggatagtatttctttataaaaatgtcaactgtttaaaaagcaaaattaaaaatatttctcttcatttttataaatatattatttatctcctaacattgtagaatggagagttagagggcttcaaacattgttaaaactgaaagtatatgagtgacttctttgatacatgacatctcttgcaacatcccacatctaccttctctactctgtacaagagttcactcaggttcgtgtacatcctagaaaacaaatgaaagaagactctccaataatatttttaaacaaagtaaatcaagtctaagtgatggttatactatgttgcacttttggtttttatgtacagattttaggccttaaaatgtagagtaattaatagttctggatttattactagcattgcaagttaaattgagacttttgttttttactatagacaaattgggatttgatattagggaatttttcatgtaacttaattttattcctttgagggctcaaaaacttaaaagattccaattaattttcgtagaagtctttctaaaatatattgcatgcttccctgttttactaatcaggtaatatgacacaaaatgtatatattttttgatgacctagggtcataatacagtagactaggaacttcagtacccttcaaacaattatgtcaccctgggtaaattcttcaatctactcgagccacaaaatttaaaatttggttactgagtttgcaacttaaacattttgaggattaataataataatgaatatgtcttgaattaactgtaaactatatgaatattaactataaacttatacatttggcttattgtattatattatatataacatatataactgatatattataaatgtcaattattttactgtgctataataatgcccctagtgatcattgagattattagcactttgattttatggttatttttcaattatgaaacttaagagtttttgtgtctgcttgatatatatatctttttgtatatatgtatttttttggtgtgtgtgttggtttctccttcaatatcaggttgcaggctattatttcttgcttagttgcaaataatttctaattttctcctatttacctatagattataaaattagataatcaggaaattctggactgtatttgaaatatgaacaagtatgttctggaggtgttgctgagagattctgggaaatacatatgatctttagtgcatgaactacatgctgacacttttggcttctgaggctttgttgtccacatttttggctatgttctgaataatggggattgccagataattatctactgaataagtaagatcactagattacttttaattgtgatccaccaaaagatggtttcagttctataagtaagtggttttcaaaatactttggaggagtctttaatgtaaaaataaaggcattgattgatgatgatttttttcctgaactactagggaattttaaatcattttttccttgcaagtaatggttaattttctcttcgtcctctttgttaccatgtgttacagttgattttgtataagagagacacttacagaatgagacagtagtcctttaagagtcatttattactgtatttctactagtaatgaatgttttcatactctacagatttttttttgcaatatgtatgttttagacatcagaaattcaggcatctttagtatatattaatgtatataatataaatatattaaatgcagatattaaatgaccaaaaacatgctcatcaaatttacctatctcacaaatctggaacagtgaatataacggattaaagaaacaaaacttaaaatgttttgacaaactgaaactatgaacttaaaaataacctaccaagataaaatttaatagatcttattatcaagttcagaagttgtgacccaaatcccagctgcacaagtaattactgaagaaaattcaaataacagccagatgaatgattaaaaaaaaaaaacctatgagttttaagtgacagaaaatgcaatggggtcagcatagtgaatattgccaaaaaaattgccagtgctatttcagtcagcatcactagaagtacagtatgatgcattcaagagttggtagtcccactaaactcactgctcaatagaatgtttgtgaagtattgtgttgagttcagaattaccacactttaagaggaactcaaaggcattgggatattctcagagaacaattggtataatcgcagagatgaaattatataagaagaagaatggttgaaggaattagtaatactaaccccagagaaaagcaaatcaaggatgacatgatggtgtctttaaagattcaagtcacatggaggagggattgggtttatactgtctagcttcctggggatagaatacagatcagtgacaagaagttatgaggaacctgattatggctgataagaccaactagctaacagctgtagctgtctatatggaatattctcccttggaagatagtaactgatctatccttagagatatgcagcaatctctattgtcattttaatagaggtgttgtagaggacagaagtttgatcttttttccaatgccaagactatgaatttttatgaacattcttataaaatattctacagtttatggtatatctttttttttacagcacttttcaaggactacatagtattgtgattatttttctacatattcttcttctgtgaaatgcattttattaaaactcaaggattcttaatttttctttctgtgaatccctttgatagtctagtgaagcctacagatctttttttaaaaattattttaaatgcataaggtaaaatacacagattacagagaaaatgaatcatattaaaacagtaaataggccaggcacggtggctcactttgggaggctgaggcgggcagctcacgaggtcaggagatcaagaccatcctggccaacatggtgaaacctcatctctactaaaaatacaaaaattagccaggcatggtggcaagtacctatagtcccagctacttgggaggctgaggcagaagaattgcttgaacccgggaggcagaggctgcagtgagctgagatcatgccactgcacttcagcctgggtgacagagcgagactctgtctcaaaacaaacaaacaaacaaacaaccagtaaataatttaaaacatttgtgatatggtagaatatgctattccactaatgcattaagaaaacaagatcttatagagggcctaacagtataataattttgaaatagtgataagcgtaaaagatattttgagatatctccaagtataatgtaatataaaatatcaattgtgatactattggtgacaatgtcataggaaccacaaatacagtatggtttgttacttgcatccataatttaaggaaatgtaaattttcaatacagtctagtgaaaaataatttttccacaaaagtttacagaccccttgaattctatctatgtctgctggagtctgtggaccaccagttaagaatccctatgctagatgatatggtacacccataatgaataaaacaatggtctctaacttttaataattcatattccagtaagagatataaggcatataaaaatgaactctaattcagtttctagtatataataaattccatagagctatatagataaaatattatgggaatttactagatagaaaaattacttctgccttggaagccattggaaggttctgtagggaaatgggtcttagttggtcttggagaatgaaaggatttatatagacagaaattgagaggagaaacatttcaggcagaaagaataggcagaggactttaaaacggccaatagttcaggttctaaattaaaaaaagaagatgcatatgggatataagactgaaaaagtaggttgtgttcagatcatggaggccctttgactcttgcctaaggagtttgaactttatattgaaggcaatggaggaaccactgactgttttttagcacaataagttggtggattagagctttctttcaggaaagttaatctggctgcactgtttaggatgaatgggagcagggagagacattaaggaaattgtttcaagctagagataatgagggtctgctgaacgaaggcagcagaaatgaggaaggaagggggatgcatatggaaaagatattaagagatagaattgttaagagttaatgtttaagtgtagagaccaagacagaagaatggttcaaagagtgctcagaatttttaaactctgggcaaataggaacgtggtaatacaattaaaaaaaaaaaaaaggaggaacatgttttggacatgggagcaatgagaatttttttattctgagtttggtatcttgagtttgaatcctaattttgattatctacttggagcatagtatagaatagcataatgggagaacagaaataattatagaaagggtcattaaaaagtttaggatagatttctgcttctcaaataattatattctaggtctaaggaggtataacagctccaccaatatttgcctgacattgatcctttaaagttccaggtccatctcctcatttgggatgtattatctcattggacacctaaaagtcttcaaatgcattacccacctctccctcacatctacttcatggtttgagggccatatttcatgattagctgagagacaagcctgtgtgattgacatgataaatgattacctttcttgcattattcttgttctggagaatatttttactctttatcagactaaatacctctccctcatttgccctcatctacaagaactgatctgtaaaaagttcattatggtccttttaaaaactatatttgcatgatgaaacaaaaactctccaggcagatgctttgatcaaccaaattgtccagtgtttaatctgctattccttcaagaaatgccctctcctgagcagtgatttgaccagattgtaaaacattgttgaacaagggtgctacatctgaagtgccccctctgaaactgagacttatgggaagataggcaaagtttctgtcttttgtaaatttaactttgatttagtattatagattggtaaattggtatgtaggtaggtagacagatccatagatggattgaatgattgaatgtcagaaaccaccttttaaaacattggtagatagagtgtacaggaaagctttgattaatagattcaggttaagatgcttccaaggctaaaattcttcagctataataaaatgatgaattttagttatccttgtatcacccgtcttgttgccaatatagctgggctctaacataagcgacagaaaatgaatactttaaaaaggacttctatatctaaatacatatatttaatcagagagtcctttggcttctgaaaataagttgtctaatgagaatttcacttgagcagctgtgactgaggaggtcaacaggcactgcctaggagaatatggcccagctggttaaatctggttgttgtcgtgatttaaatggtcaagtgctgcttgtaatccaggaccgtctgtttgtaaagggaagagtgagtgcttcagcataatgtacagctgttttaatctctctttaataatagtgcttcagccactatcatgtcttgtgtatcatactactaagtatatgatcctaggccgagggccctggtttgagtcaggttctggagtcatgtgagattgcaggaaaagggatacaatgataaaactctcaactgtctgacaaaataaaactaaattcctgactctatggctctttttaaaaacttattctttaggtaataattattgtgattaggagagagtgacaaagcttgtagttaggtagaaatattagaataaatgaactctctttgttagagccataaatgtaatggaaagtatgcaggctttgatacaattccataggacatacattggtcagaaattagagtatttgcccagtggaattgtgtgctttctgctatcatggtaataaaagtatgtggattcattttactgtgcatgtaagaagggacagcagcatttgagctttgaattcctggtgggacaggctttccaatggattatgcagctgtttcccagcacaagaatgagcatgtgtttatgtgtatatttgatggattattatcattgttcacatctctaaacaatcatttgtatttctacatatattttcactgaaatatatttactttgcttataagttgtgttttgctcctctgatagactttgctctactaaaagagatatatggtatagtttaaacaatgaggaaattcatttttaaaagtcatgtctttgagctagatctgagtttgaatctaagttttaatatttagagagacagtatagcctactgagtgtagactctggagctaggttgcctgtgtttgaatttcacttcagcatttcctagatggatgacatagagcatgttacttgatctctctgcttcagtttctcaaccaaaaaatgagtatctttacagtgttataaggatcaaggttttcatgaagatgaataattagttaaggcaactaaagcatttagaacattgccagctcaaagtaggtgctcaataaatgtagccagcattatttcctggttgtgtgactttggacaaattaatctctttgtgcttcagttccctcatctgtaaatctgtatgaatgatacctgccttgcagggttattgtgaggatttgacatattaatatatacaatatttagcttctgtaattataactattactagtattgctattataactactattgctgttattatttgaagaaacttttaaaaaagaaaaatattctaggaatctcattctgtaccacagacagaatcataggaaatgtcccatggtgttaagggatttagcatttggcagcaatgatgttcttgtgttctggaagagcaattcagtttaactctcttttcaggctatttggaaaagctgatactaaagtttccccactgaaagccaatcatcccttctgaaaaatatgtggaatgtgatggtgtcagtgagagaggttggtaaagccttggatgaggtttttagatagtagccagttaagagcaatgtgtttctgttaaagcaaaaaatctattaaaagcccatgttttttttttaattaacattcacaccctgtgagaacatcacaataatttttaaggcaaaatttgtggatattaggtttttaccactattctgattgaaagttatattggtgaagcacttataatatcccagatttaagccttgttttatgtttctcattaaaaggaaaatttggaaaggtttcgggtttttgcataagaaacactttaagtattcattaaaacacgcaaaattgttatttcaaataaattggaaatttcaagtcatttaaatgctgaagtttcccaggaccactcatacttttggtgcagaagcaattgggtattcagaacaatgctgatacaacttcatttaaattcattttttcttctctttaaaatctttcctcccaataatatttgtgtccttgctcctgttttaaaaaatttgtatcatattcatagtaaatacttacctagtaccagatagtttaaataaacaagtattttctgaaagttttgtacaatgatatttagggattatattgaggagctagaactattggtttttgaattatgaaaagaattatgtatagtctattttcgtgttaagtatatttgcattctatttttttttgaaactggtcttcctctcatattaccttaaaaaacttaaaatgagccagaattctgtgaactccagaccttctgggcaactcttcgttatttctatttgctatatgttttgcaacctccatttacagtttgggtaatatattatttggttgaatctttttcttaacttcaatttgtgtgtctctgccttgaaaatatgcctcagatttcttgctcatttctatctcctcagatttaaaaattcatttgaagattctttctctaagaatctggggaacagatgcaggcaattgtttctgatttttcctgttattgaactgtggagctagaaggtgctctcctggcattttgttgtttagaaagaggatgcagctttctgatggttttatgaaataagttatagtctcatatgattttgagcttgtggaggttgagtggatcattagcattttgcatttttctattgaaaattcattagactgacttctccagaatttattctgggagtctcaggaaataataggggacagttttgggatctgtattctttctccttgtacaatatatatgcaatatcaaaagaaaaaatgaacagaaaaggaagtggtaaatgtaaacatttatttattatgtaatatttgatatgtatattataaaccataaaggtaaaacaaacacttgtgaactcagcatccaactaaataaaaatttctaatactattgaatctacttatgttttcttcacctgtccaatctttgtttttttatctacatttttgccagaactttgttaatcattatctgccttttttgttttaaaatagtttccaatcggtcgctaaataatgattgtttagccttgttttcaaacttcataaaaatgatgtcatactgtaacctcttgtgacttgctttctattcttatattctatcatcagttttgctgtgtgaactttcattcattttctcttttgtgtaatcttccatatactattccatgctatgctatatagcagtatattctcctgtttattgtttctggacacttggactttttccagttttctgctggtgcaaacaataacatatgaagattcttgcacctgtcttctgatgcacatgtgaacaagtttcttctctagggcatttccccaggagtggaattgatattgacacatttttgtgttctttttccactctcttggaaaacattacacaaagaagttgctgctgcaatatgtgtgtgtgtgtgcacgcacgtgcatgcatgcgcctgtgttagaattcctgaaagctttaactgtctataccttttggttccaccttcctcaaaatgtctagtacaggcttttcttcatcactgagcttttcagaagctcagcaagagcctttgatggacccttcactgcaattttcctttttccttttgttgtatctgaatacaacaggctgaatgtctttagccctcctttcaactaggagcacaagaatatcgtcgttcttctactggactgtgattactaggtttgttaggaaacacttttttcccttttgatcctctttattgatgtttccagcacagggtgtggttttagaattagagtagttcctcatctctaattgcatcaggtttacaataatttttacttaaatacttacttcaaatgcaaaattacaaacctattaattattgccactgttctagccaaccatttatattgaaatagacatttttctggccaaacagtcgacattagctggaaaccttcacctctctctcagaatgtttaacttgagaatccttacagatattggcttgggattgatgtgcattcttatcctaactctttttaacttattaggttgtgtctaataattaattaattgatctaagcactagtttcttaatttataaaatgaggatgttggtctagataagcattaaaggacaatttgtaaaattctatgccattttgattttcttttacagtttgtatccaaattttagagtttactatcattacttttctcttttaaactattttcagttcaaactgaataaatctcatgattcattttctttcattatgcttgaaactgtccttttctatttccaatttcttctttctgatgttagaatttttacaaagatagagataaaagcttctatccaattttgatatctgaaactgtcattgtccagtgaagcacttacggacaaagccatggcttcaaggctgtggcttaaagctgaatatgtgtggtgctcagacctatcgtagctttcttagttgatgtcttgagtttaagtataactgagtagctgtacctagaactgagagaacagacaagtactctcacaatgaagtaatagaatatatgccatccgctagcattgggagtgcagaaattagaagactgtggattcccctaattgctctcaaataatgaattgaaaatgagtaaatacaaataggtggctagaaaaaaattgatgaaggtataatgaagaacaactgtgaaaatatgacaaaatattgaattatttgcaacagcaccattacagcggcaacaacagcagcagaattattatgctaatatatatactttttgaatgacagtaacctatagtcaaagggcagtttttaaagagtggctaacaaactgtgtgcactgggattccatttcactccagaatgcctttactagcttaactggagctttctagcttatcccccagaaatatctcttatcttgaacattttgcttatgttatggacaggggagagatggaaaatttaagaattaaagcataagccacatgttttggaactatttttctttgatttcaggtagaagaggtagacaggaaactgtcttatgtgcccaatgtacatagtcctaaaaattattccttggttttaatttaactcttaagccttgaccctgattaatagcagaaagtctggtctcacttctaggtaaatcaggaacttcagtatttaactttagtcatttagaattatgccccttttgcttcttattggtgttatctaatatccagagagtttaggcattttattggcattggagcattggtatctggctaatgatatcaatttctattatgcctagaataacattcattgcttaaaatcctaacatattactctggctttcaagccccattttatattactttactcttctctgccatggacgactcccctcctccttaaacatgtcttaggacctttgcacttgcgcaaacatataacttggacattccttagttatattagacacactgcacataattagaatttggttcctggagttctgttgtaatctttctctagtgagcattgtgattaagaaattcgaggatgtaggctgagcgtagtggctcatgcctgtaagcccagcactttgggaggctgaggcgggtggatcacgcggtcaggagatcgagaccatcctgaccaacatggtgaaaccccgtctctactaaatatacaaaaattagccgggcatggtggcatgtacctgtagtctcagctactcaggaggctgaggcaggagaattgcttgaactggggaggtggaggctgcagtgaaccaagatcgtgccactgcactctagcctgggtgacagagcgagaatctgtctcaggaaaaaaaaaaaaagaaaaaaaaaaaaaaagaaatttgaggatgtaacaatctcaggacaagatttttatctgttgagtcagcacagtgctgaagttgattagttatttagtccaacatacttcaagcttagtcattatccctcctatccagaataactttgtattctctccgtttattgaaattttccatttatccattttccggatcatacctaatcttctactgactggcacttgtgaatgtctcctcctctaaaattattaatactcaaacctgtacaccactgcatttatcaataaattataatcctaattatgctgtttgctcttttttaaattgaaatttttgttgagacaattgtagatttacatgaagctataggaaataatacagagagattctatgtaccttttgcccggtttcccccagcggtaatattttagaaaactgttgtataatagcacaaccaggttattgacattgaaacaattcactgatgttcctcttgtctctccatttgtactacattattgtactcagttgtgtgtgggggtgtgtattaagttctatatatttttgtcacctatttaggttcatgtatccactacaacagtcaaatgctgaacagttttgatatcataagaattccttgtgttgctcttttgtaaccacacctaccctgcttcaatgccagcatccctcaccttctataccaaacccctggcaactactaatatgttctttacttctaacattttgccatcttaaagatgttatataaatggaattatatagtatgtagctttttagaatttacttaaaaaaaaaaactcagcttacttccctggagattcatccaatccaattaatgggtgtcaatacaaacaaaattttaagaagttcatacttaaaaatttgctaagtgtattccatggtatgcatcatatgtataaatcacatatgtttaactatttacttgttgaagaacatctgtgcagattccagtttttgactattacaaataaacttgctatgaacatttgtgtacagggttttgtaacataaattttcatttatttggaattagtacccaagagtacaattgctggctatattgtacgttggattttataagaaactgccacactgtatttcagagtagctgtaccattttacattgccacccacaatgtatgagtgatccagcatctctgcatcttggtcaacatttggttttgtcacttttgttttaactgttcttataggtgtgtactgatatcttattgtagggttaattagcatttatgctatggctaatgatgttgaacattatttcacacgtttgtttgccatatatgtatccttgtaggtaaaatgtcttctcatgttttcggtctattttctaattggattgttttatttttgctgttgtgaaagttttttattattctaaatactagtcctatgatagatacatggtttggaaatattttctcccggtctttagcttgtctgttatcctctttacatgggctttcacagatgaaagtttataattttgatgaggtccaactgaacaattttttactgtatggatcaagtatgggcatcaagtctaagaatactttgcctaaccctagattctaaatattttctccttttttttttctgaaagatgtgtagttttatactttacatatatgtatataatccattttgagttaatttttgtataaggtgtgaggtttaagtcaaggctcatttcttttggcctatggatgtttaatttgctgcggcatcatctgttgaaaagactaaccttcctccattgaattgctttgcaaatcacgtgattatctatatagaaaattccaaggaatctaagtacaaaataaaacagaacaaaacaaaaaaccagcctcttagaactaatgagtcaacaaggtcacaggatataagacgaacacttaaaaatcattcacatttctatacaatagcaatgaacctatgtctttgtccattcaggctactgtaacaaaatactataaactgagtaatttataaataacagaaatttattgctttctgtgtggcattagcttctctgatattttctggatactgggaagtctaagatcaaggcaccaacagatttggtgtctggtaagggctctttgcttcatagatagtgccttgttgctgcattctcccatagtggaagccacaaactccctcagacctcttttataaggacatcaatcctattcatgaaggtggagccctcatgatctaatcagttctcaaaggccaccatctcttaatactaccacattgggtactgggtttcaacatacaaattttgggggagacacaaaattcagaacacagcaacatatgaaaactgaaattaaaaactcaaaacttggccaggcacagtgtctcacacctgtaatcccagcactttggaagaccgaagagggtggatcatctgagatcaggagtttgagaccagcttggccaacatggtgaaatcccatctctactaaaaatacaaaaattaacagggcatggtggcgtgtgcttgtaatcccagctactcaagaggctgaggcaggagaatgtttgaacctgagaggtggatgttgcagtgagccgagatcgcaccactttactccaacctgggtaacagagcaagaactccgtctcaaaaacaaacaaacaaaaaacaaacaaagaaaccccccacaaaactatttacattttctccaaataaaatgatatgcttaggtatgcacttaacaacatgtgcaggatctatatgctgaaattacaaaatgctgattacaaaaatgaaaaaagacctaaaaatatgacaagacatattgtattcatgtactaggagactcaacatggtaaaaatgacagttttcccccaaatagtctgtatgttttatgcagttcctttcaaaatcccagcaagactttcatatacctagacaaacttactctaaaatttgtatagaaaggatcatattctagaatagctaagaaaatcttgagaaagaagaataaagtgttaggaattattctacccaatactgtattaaggcatactatacagctgtagtaatcaaggcaatgtgatattggaagaaaaatagtcacatatatcaatggaatatactagagaatccacagataaaaccatagaaatatgctcaactgattttgacatagatgaaaagtatttgttattttacatttattgatcttgcctcacaagatgattttaattttcttgaggacacataccatatctttagtctatcttcacaatgcctgttatggatcttagcatataatatacattaacctaaaatactgttgatttattataaaagttttcagagagataaataatattatgattaaaaggagatgaatagctttaatttttagagaatgcctcttcatctaaacaaaacatacatatatacacacataacaacatatgtatacatacttaaatacacacatacatatgcttattaattccataatcatttattaagctttttcatgcagtattgtagtgggcctgggttggagagaagtaaaagtggagaaaagggtagaagaagatgaacagagataaatattgttttttagtagctcataatttagtaggaaacacatgtaaataaggtaattatcataagtacaatagtagaagaagctataaaatgctgtgttggctgggtactgtggctggccgggtgcggtggctcctgcctgtaatcccagcactttgggagaccgaggcaggtggatcacttgagttcaggagtatgagatcagcctggccaaaatggcaggaccctgtctctactaaatatagaaaaattagttgggtgtggtggcgcacgcctgtaatcccagctacacaggcggctgtggcaggagaatcacgtgaacccagcaagcgaaggttgcagtgacctgagatcgtgcactgcactccagcctgggtgacagagcgagactgcctctcaaaaaaaaaaaaaaaaaaaaaagaaaaaaagaaaaaaaaatgctgtagaagtatagaagaggaaaccataatttttttctagatctaaatagggatttattgacattcgagctagattttgataagctcatcatagtgaacaagagatataatggaatcccaggtagagagaacagcatgtacaaagtttcatggtatgaataaacctgtgagtttaatgaatgtgaagaagtttggtgtgactaggacaggagacacaactgaaacaatatgttgaagccattattacagaaattgaattttatcctttgggtagtggggagcagttgagaacttttaagtaggaggatgatcgacataattgaacacttttttaagaaaagtaactttggtggcattttgactatcagttggaaagaggcaagggcaaatacaggggaatctggtagcaggctattttaatggtccaggcaggtactaatcagactctaaactaaggcaatggcaggggaagaagagagaaggaatcagctgtttgaggtatagttgaggttgctaattaggagtggagtgtgaggttagggagatatctagctgagagatttaatggtggggctattagaatggtgaatatagagagttgagaaggtttggggaaaaggtttgcatttagatataccaagtttgagtattccatgaaggtggaatacatctagcaggcagaagtacgattgactgacttggagattagaagagatattggctccttttcttgtcgttttatggattgaatttttttttcttagatactcacttcaaattatcattgttgctttcaggttgcaacaatgaacattgttgcatcaaacttggtccatatgtggaaactccataatctatcattctattcatataaaataagggaagtgactatacctttagccccaacatgagtcatgtgtagcttatctgttcagatgaactcaattaattttgtagcccagtgtttctcaaactgtcagtagcattggcatcacctgggagcttgtttgaagtgcaaattcttgggcttcatccttgacctactaaatcaaaaactctgggatggggcccatgaacctgtgttttagcaatctctccacgtatttcagatgcacaccaacaattgagaactatggtatagtagatatactctactatattgttctgtaatatatagtccaagccatgtaatatggtagcattaaatcgacttctgactgggtaacatatttttagccatcttcgtgatcggttaactgtctaagaagtgttcaaataatggataaatttgtttgattaagaagtagggtgaaagtactagctacaggctgtatatgtcaaggagtaatagatattaccttctcattttattattctttctttaagtcttatttcatataagtttgtttctcacattgctagaaaatcaaattgatgtgatttcatgaataagaattaaattcaggactgccttagtggcttagtgactagtttagagtgatagtgttgggggccattgttagggaagaaaagttgatgagggaaaaaagaaaaggtattgtgtggtttcagatgtaataatctggattcagatattgtttctgtaccttgatcaaaggtatagcacacaggtcacagagtgatcccttatcttatcttatggtgcttaataaatattattggatgatgagccaaaataatgtgaaaaacaaaacccacaggctttaacatttaatggccaaagaaaactctgtattcttcttagacatgtagatctagaagtgttgaggtggcctaggtagaagtgaatttcctagttgttaaggtgaacagccgcaggtttctctggtgatgaacttcagttttcgttagccccacttgctctgccattcctgctgttttgcaacagggcttaaaagtgctttaagtgcttgtgaccgtggtaatgaatgaaaatgtctttccagcactgagaggattgcattagactgaatagtcacctcacttgtaaaagcactattagagtggggcagctgtaagtaaggataacgatttgtgtccactgcttatttactgaaaattgtcaatgtattatttattgagagctctccagacagtgcttgtcagaataaaaatgtcagctctgagcaaaatgttataatacataataaaaatgctaggtatgcattttaggaagacaactaattagacctgctttttcttaaggaagggacagtaaaaatgtctaatattgtggactttctccatttgtataagtccttttttttaatccctgctcagctcagtatttggtttagaaacttatcatgcctgagaaataatttgaacaactttgtattgtggccattagacaccccaagtactggggaagcttgctgaaggaggaagggcctcgcttgccatcccacagtgagcagccgccctcacctccatgttttgtctgaaattagaagatgtcacttcctccctgagcagtgctcgtggaaaactgcctccagtgtaaacaacataaaattattaagcttattcctcagccgtgctaattaaccccaaacaaatttcacattaaggaaacagaattcaatcaatgtaaatgttattgctgtgtattactgtaagcaataatatagtggctaaaataattaattattttggatttttttaaaagaaagtattcctttttatggtgttgcaaaatgttttgtggatatctcccccctttctttggcctttcctggtgtagaatataaaagacccatgtggtaaagcatgggtaatacacagttgttttttacacctggattgtaaaaagggaaaaacatattttgcagagcttcaggtttacttagtctaatatattagcaatacatacgcagattttgtctcctcttacctatcgtagttgactattcattttagcaatttcctgttctctctccttccagtcttaaatgaaaaggcgtgtggtgattttaaaaaaaagaatgttaaatattaaccagttcttagggaaaacatgaaatgccactttactgtatttcagattttgggaagcaattcccaataaagattcccacccctcccccgttttttataaaaaaaatctgggctcatataaggagtcaaattagcctcatcaagctaattttctaacatttttgaaaacaaccagctttctaaataattgcttggtcgtgcctgtgatcacttgggataaaatacattgttatcatcattttcttaatcctcaaagatctttaaagacacgaagtgcagaagctagagaatatgtaactttattttcgtgcagtagaatgcatatttgattaatatggaactgtttatcagtgataacatattctatggtatatggaacataaatcaaatactatttgtattaagattattctgaaaaatgatacattctttaaccaatatataccagctagtgttaattaactttgaaatttaaagtaatttaactaaataagtaacacaataaaagaaaatattgcttttcagaggtttaatacccaccatttctttgtaattttaccatcttcttccagcaaacgcaattcttgtatctcttcatcctctattagttcagtatcttatttcatgactactcttaattccttattcttctatattaaaactctatcttcatcttggtaggagtatttaatcttttaatcatatcttaaacatctaatgagcaggctgctactaaatatttacagtgatgccaaaacgaataataagaacataagtgttccaaggaatagctggagtatgttactaaaaaaaaataagtaaaactaattctttatataagagttaagaagaagttaaaatctcttcgaaggactgttttagaataacatctgaatggaccatttattcaattatatcttttggcttcaaatgatttgtttcagataatttccttagtttctatgaccagatagttgctttcttttttatttctttgggtacttatttttacttttccaaacaggaaacaactttgtattttatttatttgcatcacataggtagctgataatatgttctagattatgagaggctatattcagaatctaaaaaaaacacataaatttagacaagtttgtattgaaaaattccatacattttagacatttatgtctttaagtatattttaagccaaaggtttaaataatatgcattctatagcaaagaaaataggatggttaaatatgataactagaacttggctagccctctggttgtcaggacacttaaacaatttttaactgtataatttctatgactaatattcctggattttaaagttacactataatgccaaacgaataaatggaataaaattttaaaatgagggtcccagtcagaagaacgtatattagtatgttttaaaataagacgcaaagggtttgcatccagtattttattccctttaagactataattgacaaactgcagtaatcatgcttttatgtgtttttctgcctctactgaattcatttaaagaaaaagaaagtaaaaaagtgaaaaagagactccagaattttgaaacccagtggtcctaaagtgatgggaaaatagccaaggtgtcacagctaatttctgaccctgttttatgagttctgctgttccttattccccctgtcagcctgggaatccctgaggctgtgcaaactggctgaacatcactcaatccaagttttatatccccttttaataatgttgagtctattctgtccaactttgattcagacaacctgcttgtcttgaaaaagtgatatatttaatcagtgactctgtctccagcatagctcccactgcgtgtgactagagccagagagtagtgcagtggtctgtcatttctgtttgaatgggtaatgtggagcccatcagctgaaaagacaggagctggaactgcttgttaggacacatgatcaaaagccactctctgctttctgccaatcaaacctcatgtcgccttgtggggcagacattaaatagattttttttctgccttacaatatgggcactttgccagtttgacatgtgaactgttacaaaagatagcagagttttgaccacttgctgactgcttaaaaatattaccgaacacttgtcaaaatgaaatattcataatactatattatgataaattcagtgaagtattatttggtgcatttatgttgtaatttatggaattttttttgtggggcagaagaaacagtagacacttgcttcttgggtgaaagtaaggaagacaaaactgtaaatcagtccaattacaaagctatcacaactgtgtgacaaatagttttgaataagatgattattactttatgaaagtaacattagttaattaaatgttattttgcattctctctcatctgctttaaaaattatttacttcttgtaagtcattgtaggagagtggcttttgtattatatttaatacaaaaatatgtaaaacttttattttgaaatataattcaggatcttattccttcttcttattgagaagatggacacattttaaattcgaagacagtctttaatttgtggctgtcctgatgggtgtttttactctgccttttctttttcttatcctctgaagattccactattatatttctgcttcatctttgtgcccataacattacccagtaatgatagtggaatagacctaacttctaaggtttttaagagaagaatgagtacctaagtacttttgacttaaaaggtcattgaaatgggcatttcctaccattttcaaaccacccagataactgttctaaagctgttaaatcttagttggtgttttgatatctccaaacttgccacttgccgtttcttctctaatgatcattttaaaaggagttaaacattttcaccaaaacataccatggcaatctagtggaactcatttaaacagtgagctacacataaacagctgctccttcaataagccattctttataatacccttattaccttctagtgtctcaaattctgattagtcaacagtgctgattgctgtacagcattccgttgcccatcttccttctgctcagctgctcatgtcttagttgttatttgattacaacacaacttgtgcattgtttcaccaagttgctcttcacattgtgtcttaaaaactgaattatctagggaaactggggtgttgtgagagtgactttctttatacacatttaaaatgtctgagtaaagcatggtattaaaaaagacataactatggaattcttaggttggaaagaataattgtggcttaaaactcagtacttataattgaattatgaaacagacattaaggatgtggaagtgttttaaaaagcatatactattttacaaatttaaagagttataaaaatgttatattatggtgattaaatttcaatcagatataaagttctggaagaggtaattatgtatgtataactccataggaagggcctaaaggaccttcatctttgccccaggactagataattttagtccaattactgtgcagcaccagtgatgcctcactaaataggatagcctgttggtagtttaagttgtgatgaaataagtaagggtgggaaaaatctctataatgaagtttgaatttcagctattcctttgttgtgaccccctggaatttactcttagtgagtaggaaatgctgacacactagaaatgcaaccccagtaaaggccctaaatctgtcattgtgctctggagtctgctctgaaaatagcaaagctcttttggtaaattaaaatcggtgtgaatgggaacagatgttgacatgttttactttatcttcagggatgccagttaaagaggagggggtcagcaaggttagatggtaggaaatagagtaagtgtgcaaacttgttttgtgaagggagttctgttttgggacattagtcaatagaattgtatttctcttttgtagtccaggtaagaattatacctccattactatatctacaggaaagatgagggggggtggtatttatttccggatggctatctgcttttgatgttctcttgtgattgtgtcttttcttcatcaaactgctataaactgtctcagattgctattaggttttactttgcaacatcattttggcatagcttcctaaagtatttgttgaaccctagtgctgtagtagagtctttgtactggtatttgtcaaaaataatgaaaatggtttatgctctaaaaatgcacaatttatcaaataccttgtatagttaatttaaataagtctcgtagaactttcagtcttgatttgaaaaaatagcataggatgaatttatttataagaaccttaatagtttctctcaattccttttacattttagattaccttataattttctaaatctacatgaacaataatgatcaattttgtcagtattattcacaccttttattaatttaacatagatgaataaatgtgaatgttgtgaagagttgattgggaatagattttaaatctgacagttagattacagggtacctaagaaaaaatggctctttcactaggtacctagtaatttaattcttgtttgaaattattataatttattacagtgtgtgggtcctaatgaatgtctactattaaatgaaaaggagaaattgaaattaagattatgaaattcttttaactcatatctttaaatccccttaaacaattcagaagacattaataagctatggaggttatgttccatattctgtaatgacaaataaaaacaatttttttcagtgtttaaagaatctagaaaatgttgagtgtcattaaacttcaaagcatgcaatcttggaattttataaaatggttggtagtagccattataacagcattaaaactggcaacttcatttaaatatttatttggactatacatagatttttctagcatttgagttttccagaaatagtgactatttccttagtgttaaacacttaatgtaggatgatttgagatttcattgagctatgtaccacaccagattaacattttaaaaattccaaataccaaggagagttttaaaatgtcagtaaaaatttagaaataaaataacgatgtccaattgcccaaaggcattgaaagttgctacttactcctagatctaagtaaaagctggcatgtacacaaagtgaagctcaagacttttaaaaataataattcctgatattaatgtaataaacatttactgtttattacattaatgatgatatatggcaatttttctagcctgatgaattatctgaaatgtcatttgaagggtccattgagtatcttacctggtaagaagcccctcttgcataaatatggccatgcttatttgaaaatcatttaagaaagaaaataagcgtgattggccccttgaatttcaaaccattagcatgcttacctaaaacttctaaaattttgtttcctaatttctggagctttttttttaattgatgctgccataatgcatatataagccagtaattagtttatgtgtagaaagagaaaaagaaaataagcaaggtggtgagaagtttacatttgactgtagagaataatcctgctctgggtttttgacagcctcagaacagtgcaagcagaggagatgtagggcctggtcgtctctcactgcggtgacccccaagtactaatcttggatatgagaaataaaatgtgatgtcttcagagagtggctatttaggtagatttttgttggttggttgtaatttcacataaatttcccttgagactgtggaactgtgcttagacctgtaaaagtcacatctctattcttttcttttgtaatacaattctctaactccctctccccactcccacccctacttaaggatgtgttgccaaaagaatgtagtgagagtgctagctgtttttagatgggaaggtgatttgttgcctctgataatctgcttgttgagctcaagttagctctggcatctgaaggaaataaatgtcagaaacaagtagggcagtgctctcttagaaatgattactgatctctttttaaaatgtttacagtagttgtttaataaggaaacaattggacagaatttatgctgcctaagtttctataaataacaaagccttttctcatctatctgtaatgtccacgtggttgctgtttatcactgtagctagttccaacagttaaattccggtgtctctcatctactattacaaaaggctaaagtgggccaactacatcatggggatagggcaggaagataaaactttctcatattattcagtgtgagaacatgatggctgtactataaaaaactgctttaaaatatttttgctaattgtgattcagtaattttaaaatgttaactttggaaaaacattgacaatttacaaaagcatatctactgttagatatttaattagatttttttctcctttgtgcctatttaaactctaaatgaaagatggaaatatgtttgctctaaatatttgatgtgattgagatgagattaagcggtttaaatgatttaaaaattatatttactttagtgcaatctgttagattcaatgctaatctgtcttttggtttgctttgtggtacaggaaactaagcaccgagcgttaaactattcagtgcatggttagggttaaaaacccgggttccctctctgtaccagttaccaagttcttcagacaaagttgagtttgctgttcagacattagctgtacttcttagcgatgaccttgtcgggtagagaagcatggcacagtggcactttccagctgtattcagcctatccgtcggggtataatcatgctcagtcccagcaccgcaggcttggacatatgttgagttttatttctttcttctgacattaatcctattcaccagctgttctgccagctgccattcttcagtttagagattacattttgggggataccaacaaaggtctagttgaccactgctttctttttttcacttattctatagaaatgattggacctaggggttaagagaactcaatcttttcccactatcacctcacttttctttggattctagacattaacatgatttatgatcgctcttagtgtgttgtagataagccttccaaagcgccagattaccaccttacttataaatcccctttccataaaaaggttttaagtttacattgaaggatataattaatgtttcttatgctattatataaacaacattaattagtggcaatttcttttgatgtcctaaaacatattccagctgaaaatatactttcagttcttctttgtttttccccacaggtttgataacatatctgagttaagatgatacttttcctttcctgagctatggtttcactaatcttgtttgaatgggctattaaatctctgttacactcataatatatactaataagtagtatagatttctcactttgtattccagatgatctgcccataagcaggatgttaaacatctgtagtttaagcctctgggactaacaaatgcattaatgccagaaagaaatgtggcctggatgataaggtcacagaccatgtggtaaagaaacatccccaatattaagtctgcacataccctccattgttaatccttccattttcataaaggcaaaaaagactaatagacttaagttatcatcatttacagtacatatttattacattaataccaacaaatacacaaaatcccatatgtgttataattctcctcgctgatattttgaagtcatttaaaatgtgtacgcacatgcctcacaatagcattattttagccattaatttacctgcctacctaagaagatgacatcaatatatatttgtttatagacaaaattctgcttttgcctcttaactttgtggcatatgtaggtcctatattatggtaaataactcagtttaaatagcacctttaggctggagccattagaattgagaacaccctactgaaacacacaaaacaacaacaacaacaaaaaacgtaatggtgtattctgcaaggtaggtttatttgtttattcgttctttcatccatccatccattcatccatccttcctttcactcatttatttgtttatttatttatttatttatttattcattcattatattgagcaggatattacttattgagccacataaaagaaaacagcatcttgtgtttaccagacagcacaacacctcgtatatatatatatatatatatataaatttatagaaaaatgagaggaagtttataaattgcctgctgaaaaaactattgattccatattatccccctatcttctcccaaagctctgacagtagtgaaccccatttactaaatatgaacattctatttatagaaatattcatatttttattggtggccaaagcactgcttataggaaaacctacaggtgactaataggagttgctcactaagtggaataatgaatagtattaggtgtcaattaaatcaagcttccccgaggtgcaggtgctccacaatgtactgacacatttcaagtagcagtgccacttcacccatgcatatgaacaagcacatttgcatattaaaaagctgaaaattatttaactgaagcaaaagtcttttagagatgatggaggttattaaaactgttgacaagaaagaaggtaattgcctgaaaatgagagatgacattctgctatacacagggaacgttgtttttgttgtattgtgcagcagtgcctgggtgtataacctattacattgagattgctcctatgcaattagaccctttttgtcctcacttcaataaggctatgattatgaaggattgaagaacacttggcatattgaatgtctgttgtttttataacttcgtcagaaatgacaaaacacgttttgtgtcctgttttttctttgtaggcttattgattctgtgattataatattcataaaagacaatgtgttcatggttgaacactctgtcatttatacaggttttatttttttctgtctcagcatagtatttgtttgaatgccaaggtgttagtcataagatgagcagatttttaaaagtaaaagatgaataggtgagaagtttatcatgctaataaccccaaatattactattaaaagtgtcataaaatggatgatttcataggtttcagatggaaataattcaccaactaagaaaacttgaaagctattttatttactctttgattttgagctgtttattttcatcagattttttagtgctcttattgtgctttggttgtgtttgttagaagaaatgaagattcatggccctagaggaagacactttcttgatagtctgagagacagtacatctgggttgacttaactccattctgagggtagtaaccgaaacaagtacagtgaatatggcagttgaaatggaaacatggaaatcattgcaggtgtaggaaatttcagattttttgctttattaatattatgcttgttaaaagactttttgttaaaagactttatatctaatcatcttaattagacttcagctcccagcagaaccattgtagcaatacttgaagtccattttcatcactgtatttttttcttgaagatgagtattggtattctttgtgacgtagccattgtagtgtattcaggtggactttaggcccatgttaaaccacattttactctgggccaatcaacttctgcttttattccttacagagatttaaatcctggactggtttgtcagacacagaattgataggctgcgaataaagcccagatgcacctagaaagttttctaggagtttgtcatttatgtgctctttttattctttgatttggatgcatctgggctttagtaaatcaaaaggcacacctaggttttttgttagcagctgtctggtttatctaatctgacgtgttcatttctttaagttgaagacagaaaatgtctttaggcatagcaatctgactcttgattagaaagataaaagtgagatacctcagttgtttttgaacgcacattatttactgcctgctgaaaaccttagctatttaagagatgaaaatcctgaggtagtcatgctcaaagagtaggttatggaagctaccagagtgtgccagacttgtcagttacttcatatgcacagatctagtcacatatcctgcaccttgatttctattcatacaaccagggagttgtatgaaattgttaattttattccctaataggtcatcttgtttaaaactgttaagaaaaatcttaaccttacttcatgtaactgattttagtagggagtaataattgtttttaactatacaaatagctaatggaaaatttttttcttggtaaattaaaatttttgttttaattcttgccatttgttttggtgccattacttaatttttttctcaataaattcattaatatgaggacatcttgtgcccagaattcattatattattttatctgacctttgaataattatcagtttgtggattagaattttaaaaaacaaaggtcagaaattagctttcattttaatttgtgaaaaattgtatactggatatatttatgttaaatatgatttgtttaatggagactaagaaataggtttgagacaaatcaggattgtagatctctgaatgtgttctggaaatgaaagtattatataaaatactttctctttgtccaaggataacttctacatagagacatcatatagtactgagaaatcaaaggtgtactttttggtaactgaactgttatgaaacttcactatctggtatgtcattgacaagccctcataggcttatatatattaatagcatgtccccataaatgttagaatatttaataaatgaatgactgggctctaaaatatcttactaaaaagtatatttgaatgtaccaatgtttagcatttcagtggtttgaagaaaattctagctttagaacatatctgctttctccacttagatatctacttctgatactgctttttctcatatttagtatatctaatgcccttgtaaacaaacacaaagcccacaaaccatcctattatgaggatgggaatggtaaaaatgagactataaagcatataaaaagagcaggttcaccaggtcatgtggacagaagttgaataaagtatttaggtggctgatccagagtaggataactataaactcaaatatattgaaagaccaggccttagcatagtcttgagttgagcaagggtttgaagaaattgtatatgatgggaagagaatcttctgaatcggggttatttccagggaatactggacccttgagaattcacactgtactcctgccttttctctactccctctcttgaacatttttcaggtgaaatcaagttaatgaatagccagtgtacctgtaaagtatgaaaggcagcacaaagcctgaaggatatatatgaaggtgggagacaatgttactaggaagtttggctcaattccacccttctcttttttcaaaggcagattaaatgtatgtgagcttaaatatactttaaatttcatttacaacccatctttcttcttccctgctcactattttggagtcaatgggaaacttaggaaccacctgacggtacccaaagcccaacaaagcttcccagtgtggggtcaaatgtgtaatggcttgactttgttgtataaatgagtataccaggaattctctgggtctttgttaagttaataatactctaatcgtacatagtttacagtttgcaaagggcttttgcatgccttatttcagcctcataaaaattttgagtgtaaggaaggacagatactcttatgctattctagaaatgaggaaattaatgattaatgtattgaatagctggtaaatggggagctggagtaaaactttagggcacttaatacttatttcagtgttttttctattcttctatgtttccgttcaacatggtaagcacagtgtccaggtggagtacttgagtttaatggggccctttgagctaacttgcatttcaggcttattaggattgcatgaactcagttggcctgtactttacttgaccattgttaatgtcttcagggtatgaggaggttctttaaatacagcaatagtataggaggagcgtgtgtgtgtgtgtgtgtgtgtgtgtgtgtgagagagagagagagagagagagagagagagagagagagagacagagagaagagagattaaaaggagagactaacaggaagagatggtatagcacaatatagcatctctttgcccccaaatacctaatcaaataaactattgctcttctcttgagtgacgcttttcatcagaacaacaattttacatttcatagattcatctacataactatgttaacaacagcaacaggaaagtatatttgtgttttcatgttgctttgaaaaaactgtcaaatttaatttttttctagcatttttcataacaaacttcttccattaaaaaaaccttatggtggaaaaattttcaaacctacacaaaagtagagaaaatagtatgatgagcccttatggacctatcatctagcttaaacaatcataaatatttcatctgttctaccacttttttggttaaagtttaattaaaaaatataaatcatgaaatatgtcaaaaaataataaacccaaatttctgctactattatttaacagatattaatagtttaaatttatattccttatatgaaacatgagcacaggactgcaataattggaagatagaaaataggcaaagggcactgaaatagaagagaatggtaaaagcacaattttccaaaatatgtctgctagcatttcctttttataagacaccactacacataaaaattcatgtgactcataaatacctcactgaacacagtgatcatcatattaaaagatatcttagttatattgaagtatatgctatatagagagagcatatagcatatatatgctgaatatgaattgaaggatatgctgtatctcttagttatatattagtaatatcttaagacaatttggcctgcagtttagtaaatagaatgtccaggagcattcctcttcttcttgatatgtactaagaatttcttgctgccaggtctgcctgttgggaagtcagcaacagtgactaaaacttcagtagactctttaagcaatgacgttagtcattgcttagacacaaaactaagttgcatagatcccagtacacactgagatgcttttatctagcagcttattctgaatatcaccgtggaccctggaaatctgtaaaagacattctcttattcgagaaggaaatcctctccagaggcaagaaataagacaacaactggatattcattttatatggctttaaaaatcatgatattttgctttatttcaagaagctcagtttcctgaatttgtgagtacttttaccttggaacactgtatcttatcattttataaggcatataatagaaacgtattcattttatttttctatgccaaatatgtattctcttgggaaattctaacaatggaaaatacaaacaaatgtatattatatttgagggttcatcagaagactcatttgcttccgtatcaattgaaaacatttacagagactttaggtggttttcctgccatagcacatttgtattagtaatatagttgaaataacttttattgatttaggatcaggcaacatctcagaagtatctctgagtctttgtgatgatcataggatacagcataatagaaagtgtagaaaattgggtgaatttttcattcattcgttcacagacatttattgagctcttgttgcatattaagcacagtgacagtcactggcatgttgaaaaacaccctgacatttaaaattttttaaattccttctaaaaatatatataaatatatatacatatttgggatggagtttcgctcttgctgcccaggctggagtgcaatggtgcgatcttgactcactgccacctccgcctcctgggttcaagtgattctcctgtttcagcctcccgactagctgggattacaggcgtgtgccaccacgcccagctaattttttgtctttttggtagagacagggtttcttcatgttgatcaggctggtctcgaactcctgacctcagatgatccccctgccttggcctcccaaagtgttggaattacaggcatgagccactgcacctgccttaaaaatattttttacaattattctatcagtttaatattaaaacattcagttaattagcattttatttgttgtagtctagttatttgatattttaatgtcatttattttgttttttatatttaatgaaagaaaactggcaggtttgtttcatctgttgtccagttaggctcacttgactatactgcccttccaataaaacctagaaatagtctgttttatctaaaaaattataatttataatctaatttgcaactgaagtatatactatgtgcttttaatgtaccttagttatatgccaatggtcataaataagaagagataagaaagtgtttagaccttaggacatgtgtttcattattactgaaaaatcattcaaaataccaagcagattaaatgagcacagtggtaggcacatgggacaagaatttgaataaaatacagctttaccagaagaggctcacaagggaaatagtagcgggtgggtttggtatggacgtaggggtagactgacatacgtgggtttctattgcacccacacttcctggatcatagctcttctaaaacacatttgcatttgcttggtgatgtacctgtattccctagtaaactgatgctcaaccagggaagggcaccgtgtttgtttaattcacctttttcttcccagaacctagcatattgcctagaacataaaaggcgatcaataaatatctgttggggagtgaatataaaagattatattaatataatatgttaaactatataatagaagcatgaataagaagggaaatgtagagtaaatggtacgagaactaaaacatcttctttgaagtgtgtaaaactgaaaatattctatatccacgtacagtaaaactaggtttacttgtactctgtcagaacactctttcaacagatatttttgcctattgacaaatgacaataacatttgcaaattgttaaatcattcctgaagcaatacaaactaaattatgttcagtagcaaataacataaactctatgaaaattaatagcccatgtactaatgtagtaactcttttagttagattatttaattagcatgaacacccagttctctactataagagatatcagaagcagcttgatagacttgagagagaaggtatctgtagtcttaggtgattggagttaacattttagggttgaaaataacacttctttcttgctaaatattaatgtaagaagaaagaagtattctatctcattattaatagtgtaaacacattatttaaatattgatattagaaactgtgcataattatactctgaatttggtcatcttttatatttttcagcaagtctttctttcaagatttctggagtaccttagttattttaaaccataactgctgaaaggagaataacatgaatctagagaactttttaaaaagtaactgaaattatcgaacattagcagcattgaatagagtttcctctctgacataacaagaaaatatggtaaatataatcattctttgttataggtttgtttgtgtccttcacttgagataatttcttttgctatgtagtgcttaagaacacaaaataaaaataaaaatgttcttaataaggtttagcacctttaattgaaataaaattaaagccacagaagtaatcttttagtgttttacaaagggttttcttatgttagtgttgtgtgtttatgtatgtgtttctaacttcttttgaaaattatggtttaaagaaaattattttctgataaactatctagaggtaacttatttgggataatttattgtttcaccttttgaacataattttcttgagcaattttattgtacaacataaaatcatctactttttattatgaaagcattcaagaattctatgcaatgtttttgatatatatttctattttaatatttttaatcaatttattttttaaaagtaggttgtcaaattttcttgtttatgattgtttatagatactgaaaacagcctgtttcttgcatgaatactatttgagtcatctactacttgaaatgtggtttggatattgccattcaattgatatgaactgggtggcaccaaaataaatgttttcatttttatatttggctttgaccctcagcagagtcatatatatatatatatatatatatacaaattatatataatttacatatatatacaaattatatataatttacatatatatatatatatatatatactcacatctcatagggctccctttctctctctcaccaaataaattttgattctcccatttttaatatgggcaattatagagttgtatttgatatcttgccaaaatattgggcaaatatatgtgtgcttgtataatcacttcaagtagtaagaacattaattttaaaactgtggtttaaaaatatttttaattttcatagctgataaagtagtaatggattgtcaaaatgtatagttttttggcgtatacatattttgacaattgatatttagtttgaaatttctttaaataacctccaaattcatacctatttttgctatggtttaataataaatataattcaataataatgaattatatatcttcaaaatggcaaatagactttcaaaaactgttcaggatcaaatgttcttatcatggaaatgtgtttttttaaccaccatttaaaactgggcttaaaaatttaaaaaagttagtgggtatcaagaaacagttatagctggccaatttgatagagttactttgcatattcaagaaattcctgtattaatctctacttcacattcattgtgtatgtaatgttccaataattaaacttgtaaacattttaaaaataaactttattttgagtccagaaaacttaactactttcttgatgaaaagtaaaataaatgaatatctgtatttctttccaataaagactggcaggcatggtttcattatcctttcatcaaatacatattctttattattattttataatatttagtataagaattatttgattgcatctcttcacctcaatggaagggaacagatataaggcattttatttgagtttcatgactatatatttgactgagaaatgaatatatgaaaatattgtggtaaacttactgagatttatgagagaaagtatcccaaattaattttttttcttgcatctactgtgcattgtatgtcctgaatttcctaaatctgtattgtcctttttagtaaaagggtgtgtgtgtatatatatatatatatatatacatgattttatatatatgtgattttatatataataacttgtgtatataacttgtctaatattatgtaacttgcttttatgttaacgtttatatttgtgtgttcgtataactcagtgaaaatacacataataaagccatgacttttttggaatctgaagatatgaatttgcgttggtgtatcatcatgggaaaatcacttaacctttttgaatcttttataatattgggaagttattacctaggtgacaacattaaataacacatttaatgaagcttaaataatatagaatgtttaaatcacttgccagacttaagtactatattaacagatattaatatggaatctgttttatagtcaccatagggtctattaaatacgtatgttattgattactaagaatcaacaaagttttactaggtttggagattttgttccaatcacttccactattcctgaaagctttgattatgtctgacaaatacagtaggaaaaatgaaatacatctgtatataatgtgtggatataaatatttatgtgtgtctttgtaaagattgctctatcttgtgggaaaaatactcatatcttcaatggtaattcatgtgtctttcattcaaataaatgtacgaaaacttctttgacatagcattttggggtctctgttactcggagagagagagagcatgcaggcagggtagcaatgaccatacacatatatgtgacacatacacgaccaaaagcaatttgaaaagctatgacttctgaacatttgacatcttggatccaattttattttttaaaggggtttattctgttggtaataaagttttaggctttacttctgatacttggaaacttctttggaagggcagatgtagagtgaatagaaaaactctaactctcgtgtagctgcaaggaagtttatcctctttctactgtcctactttgttgagggctgactctttcagactgtagggatgatttaaattaatgacaattgtactgatctgctataactccagagtacattttgttttcaactaaaatggatttggtttctatcaatatgtagtatttatatgacaaaacgataattaaggcaaaggaatttattgaaatagtatgttatttatgttattacagtgtccttatatatgcatattgaatattcatacatataaccatacaatatgaacacctttctttgtttttaaaaatgcatgtctagcacataagtaattcaaccgtacacaagataatacgattctctttaactactggtgccattagtcatttggtgagaaagtagctcatggtctatagggaaacacagtttgatttggattgggttttaagaagtcattgttttgtttggaaaatgtgaaatcggtgaatgagcttgttctctttgtagaggattacaataacacacggaagcttatgagtgcttctgacagatgtgttggcggtttgccacaaagtgaagggtgcggccctgactgacaacttgcaattatattatgatgaatggttctgatgtgtgttcaagagaaaaccactttctagaaagtgaaagtcatgcatacggtttctataaaaaaaaaaaaagctcaaataaagtattataactttctattttatttaagcccaaatttggtgggctaaccaatttgagtcattcccttctcacaaaggtctctgtttttgataaatcaaggacaaaatccaaaatttttgtggggaaagcaaatttgatatcatttttggcatcaaaattactgtatctgcattttcgacaaaactgacatctccaaggaaatatttgactcttacgcatacactgaaaacatatacatatgtccatggttggccaataagactaatggagtcaagcattgagaaagaaatggccttttttgattaagtcatttcttgatacattttgttgtttgcttaccattgaaaaactttgttttcaaatgacgtgtggactgaagctttgggtcattttgaaattgttttcacccttttctgatttaatttatcttaagaaaactctgagtatagcatccaaatatagatttttcaagagttagtatgcctcattggtatacaatttaattactcagtaatcaagctataatgcataaaatatgtattaactaagctggcacttttgttttcatgaattaagaaaaagttgattttcaaaaactaaatcaaataaaaatgtgaaagtaggttttgggtgtattttcttgcacaatacttaaattgtgcaatttgtaactaactttcagcatatttacctagcatatcttatttaaaatactgttattttgaaaatgtaagttttcatctgattctctgatgttcccaaggcatattattattgaagttagtcaaggactctgtattaaaaatatttaataagcaacattgtaattgtgaagatgaaattcaaatacatgctgcaacatttagcatataaagaaatatagtcacaatagccaaactcttcagaaattgaaatatgaaagtgagatattaaatagtattatttttaaaagatagtctaaaaactggaggaagagaattattgatttaccctatatttctcaaaatttgtcatatgattttgccttgtataggttaaaatgaggtcatataaagtcttgatatgatccaaaaacaagtttcttaggaatttgaatgactttatatctcagttttatagtatccagtttttgtcctttggacttgttttcttttcattcccttggtaacatttagggtgtatccactgttgtatttcaatagtgggactttttcattgttactgaaatacattaagcttttcagagtaaaagaatggcagtgtggaaattacagcattcttgtgaaagtatcaagagtcctgcagtttcgttgtagacagaaattctaagaggaaaaaaagacactcacataagctttttagtgtttttgctcatttcacattagtcttcctgtacctattttttcctctgtggcatcaactcatcatttaccatttgaacctatacatccaagaataggaaaatgaaggcttgatcaactggatggttattgttttctttttgggtttctgtttttgaagccctctgaattttctttaccccattagatctaggtctatattctagcctcatttaataatctataagaattttctgtcatttaggatttgagtccttactgttaaagtgacctgtaggttttctcttcatccatgttcaagttgataaaatacattattttcatcttcaggttttctttcactatctaatttctttcttttttttttaatcaagctctaaacttgatgttattgttctggggccccaaatctttgtgcttgatttagttttcacttggaagagaaatagtcaccatctatttgcaggtgcaagttaaggcctgttagaaagcttggcgtctacgctatgagctctgagtaatattttctagtgtatagttttgatcagatgaagtgtgtatttgtgggaagaaagaagcttgtattgttttatgtttgtaccataggtcataattactgtattgtttataggataataaactcattaggcaattatgccttgttgggttatttgaaacatttgtttttaacttgaatgctctcaggtaggtaataattagatttcatttgggatcttttatttaaatgaaagttacccagaataaactgcattttttttggtttaaaaattaaaaaaacgttatttggcattttggaagtaagctaggctaaatagtagtagcaaaagaggaaagtcagtttttcctctttaaatggttgagataaggtaacttaacattttataagatttaggtaaaatttgcctggattgttcattgttgatcctatcaatcactaagagagaaatatatatataggctgtgacttttatcaagtactttctgtaataccaggcattggccaagtgcttttaatacatgatctcatttagtattcacaataactctatgatgtagatactattcttactttgtaaatgataaaattggcctaaccaaggccacaaagttaataataggcagaaccttactttgaaaccacgttgaataactccaaacccaatgtgattaattatcttgctatatattaaactataagggaaattgactgtaaagtgaatgctacacttccaatcccccagcaggggaggaaagaaagataaacgaatgtgggattttctatcttcactcctgatccaaagaaagtgtggagtctttggagcagctataggctgaggggtaaatggaaggttagtagcctatgaagatttatcttttgttaagtacttgtggaagataccagactttattgtgcagtccaattttttctttttattctatctgcttctttgtaacaggagctgatcacacagtgtttacagtcagcttggattccataacaaaataccacagacaggatggcttaaacaacagaaatttatttttcacagttttggaggcaggaaagttgaagattgaggtgttggcagatttggttccttgtcagggctgtcttcctgcttgaagatctctgtcttctccctgcatcctggcatcctcacatggtggagtgggtgggggcagtgagagggataagagggagatctcttcttctaaggtcaatagtcctgttatgaaggccccaccttcatgatctcatctaaacctaattacctcccaaagaccacgtctccagataccatcacttagagggtagggcttcagcatatgaattctgggggaacatagttcagtccatagcacagagtcctctcatgccccttaggtaatctgccttagagcaaggattcttcggtgacaatgtttaacatatatagcttctcccactaaagtgttctttggtgctaggcatggtgagcatttatgtcttagattaaacagtttttactagaatgctcactgcgtgtgaaaagctaagtgttttaaaaatgttacctcatttaatctttgcagcaaatgaagaaattgtggttcagttatacttcaggtgacaaaattattaggtgctaaaactggcattaattaggaatgttttaagatgcaagtatctacaacaaaagaaaacaaataaaacaaaatactcaacacactgtagcttaaagaaataggtgtttaattttttcacatagcaggaagtctgaaggtaagtggtttctggtatgggtacaggaggttgacaatgttaggacttgattgcattcctgcaaatcctctggccttccctttatcattataagatggtcgcagcaggcccacattctgtaagagggagcagtggatggtgcatgacgaagaattattctatttataccttttttatttgggggacagaggtaatcaaggttaaaaaaattcttttccagaagacccatagcaggctttcttccatgtctcattatctagaactaggtcacatgactaatgaccctagctgcaaaggagactagtaatgcaaatgttttgattttccagtttctcaagtggaaagcagttgaaggagaagggaatcatgaatggctttttcattgccaacctagtctcttacagggctacacttatagccaaggtctttaggtttagtttctacctttctggcagaatctctaactttgctgaggaaggacttgcacatatttttgcaaatctgagaagtcatatttttgtgtctctttagagataattttgagttacatttacagaaagtggtagaaataagtttggacttagactttctcggtcaggatcctacttctactatatattagctatctggacttgaggaagtttcccaacttctctgacctcattctacatacttgtatattttaatgcaattcatatatttaaagtacttagtttaatgtacatcatattatatcaagtgctatcatatcagatactcaaaaactgttatagtatttattccactataggtaaaaagagaagaaaagtctcccagataactacaaatattacaatatgaatctatttatatttttgatcctttgtaataaagtgtctaagatgatattcacttcctgatctgaggaaagctaagaagtacttgaaattattacatgtgataacaaaaagctagataagttttccaagaaaacaaatgcatatatggtttctatgtgtaagttgctactccaattccaactctattgctatctctgtctaccctttctgaaatgtcctattctctaaaatacctatgcttccttttcccttatcaaataggccctttgtataagtgatcttaggtgataggaggaaaaatatttgattaaggtattttaaattcgattaaaataattcacaataagatgttaataaccaattggcttaactccccaaaggaagaggtgtttttttgttttgttttgttttgttttttgttcttttttgagactgagtctcgctctttcgcccaggctggagtgcagtggcacgatctcggctcactgcaagctccgcctcccaggttcatgccattctctcctgcctcagcctccccagtagctgggactagaggcacccgccaccacacccggctattttttttttttttttttttgtatttttggtagagatgaagtttcaccatgttagccaggatggtctcagtctcctgacctcgtgatccgcccgcctcgggctcctaagaggtgttttgttttaaagatgagcttatgaaataattgcgaagaatccttactttgtgtaatatgtaaggggaatttaagaaaatgtattataaaactcaagtgtacaaaaagctagaaagaatgttataattaacccttgtatacccattacttagattctagacttttcaagattctgcccctctgtatccattagtcttttattcctttttcttttatttcttttctgaagtaatagggaaatttaaaaagtaagacatagctgtccaatgccccttgcctaggctacctgcatactattatacttaatgacataataataaggtgagaatttgttacacaaagccaaaaggcctaataatttatttaggggaaatctcttagttgagatttcacgtattgtctttgggttagctgtctgaaaatacttaagaatgaacaagtttgattgtgacctttgtatcactttctatgctgaggaataacttcatttttgggcagcatgatgaatacagcgcctttaatccttttgtttttaatttaacaaatgtgggaatgtgcaaagaggggaataatcatttgtcttcttgctacccagcactaaacatggttaatctctttgcatatttacctctgtgtgtttttaaagaaaaataattgttgtttttcttttaaagatccttttgagaaagaatcaatacagaaatgtatgaaaattaaaaatagaaaaattaataccaccacctagaaattaacatcattaatattagatagatatcattcttacacatttatacaaatggaaggataagtgagtgggcatatggatgggtggacaaatggaaaggcttttgtaaaaatggggtcatactgtagatgctatctaaatataaattgatacattttattttactttatagaaaagaagaaaccaaggtagaattagaggagttgctgaatcccaaatcaatgtttatttttagcattagggataatatttgctaaaagatttcccttaaggcttaaaaactggagaggagggacattatgaaaaattaagaggctttctcattatgtctagtttataaaagctacatatttatttttaaaagaaacagttggctttctgttttgaaagataagggcattatacactttctcccaaatctctactgcccacttctcagtttttgttaattattttacttttgcattgtttaggtttataacatttacattctttttgtatttataattcccatagttgttcaatgtttattctatatgtatatgaatttagtcatcactcctaattcttttaccacagcttctctttttctgactttttttcactttttcttttagttggcagaatttcattgttaagaacaaggccctcttcttacagccccctaagggcttaggagtgtagtattcccaaatttctataacatttgtatctacctgtttttcatcttcgtatgtgacatctttctttagcattatattcttgatcatgttttttttcttccaggatttttgtatttatttcctcctggttgcctctttgccttatctccttagaagatggagaaaattatttctcaggggtgaaaaaatattgaggtagatgtgggggagaactcagctgaggtgacatgtagcttttatttgggatctgagctgtctcctctgagattttgcaatttgaatggggatcagggtctatcattcattcagaagaatactttttggatcattgaccagatttattgtatagactagattatttacatctgtcagacagaaatagccctgtggttcactttccctatattatttttcttcttatttttcttttctactacagattgaaaatgaagaagataacaaaacttgttcagtttgcttctttccagatttggaaatattaatgacaattcttagtattttgttgactcacgcacatcatctctatttctttccttggttgctagtttttgaggtttattacatttagttattttgcttttcctgtttggtagctgttggtaattttttttctgactttaattttgtattttaataagtaattgacggagtgaaatttgtgagctagttttgatttgccttcataatcagaaatcttgcatctttaattcttgttggaaaagtataattcaataatacatctatctaacattttcaggtaacattttgacttaaaccatgagaagagacttgattgctaatattaatcccattttaaaatacatatatctcaaggccagcatcttcttcagggtctttgctactcaaaataacattgtgctagatggagtgttatagcacatctgctataaggctagatgaggttgaaagcagagaggttgaaaatgtcaggagaggacaggaagcaatacagagttctagaatttctcttgaatgtatatgggaacttaatttggtctcatttatttcattcattaaaagtcatttttcatctatatcttgagacaatgttttctagaactatttattattgagatttaaatcagatgacttattttctcatatctataacaattgcagtaattataaaatattgattggttggaaataatgaccaaattacatattttgctaaagatcgtgaaattactttagcccataaagaataagctttttaatgctaatgatactgcagtaattatatacactttatattctgttttgagactgtttatttttgctcctcaaattttggctaggtgggcaaattcagtgtagtgtagagattttgtagtagagaaattgaaagtgtttagaaacagaaattatttatggatttaatcatttgtgaagtggatagatgaccatcttcccccctttttttggtttctgtgttcttaaagtctgctaatcccagcctcgaactgttcttatgtagtttatagtttatatgttcttcacaataaaagagattgatgagattagatgaatgaaataaagaaactttgatcattaacacaatttaaaatcaaaggtctttatacctggaaattaagaaaagaaaaatttttactaaaaactgttaaataaaaggggaaatataatctgaatgttacagaactaaaaaataattatgaagaaaacacttcattttgaaatttatggaatacattttaaatggtgatcagaggaaaattctattttattaatataattaatcagtaaaattacagagtaaaataaatgaattaaattataagttaagaaaatgataaaaaagactcaccaatgaaccaaagaaaaaagcaaagtaataaataatgaagataaaaagcagaaattaatgtgataattttaaaacagtttaatcaaaatatagtttaaaaataattaatatgtaatacaaattttaactaaattgatcagtaacttgaaaacaaaaacataaacacgcaaaatattgagtgacaaaagtaaaatgacaattaaattacagaaaaatataaaaatcaaaagatcccactttttacatttatatgcaaataaatttgaaaaccaatgtaatgtggatcattttctagagaaataaaaataaccaaaattgactctgttaaagatagaaagcctaaagagattgatttccatagaggagataaagaaagttatcacagaaatactcttaaagcactaggcccagaaagttttacaggagaatgctatcatatcttcaaacaccagatagtcccagtgctccataaatcattccagagcactgaaaatagaggaaactttctaaatatgtttatgaagtaactataacgttatacctagactgagaaaacagtaccataaaagtaaattgcagaaattcacataaatattgatggaaaaatactaaataaaatatgagcaagtataatcaaataccacattaataatagattatacaaagttcaagtggaattattccagtagtgcaagcttggatattccttaatagaatatattatatttatggatctaaggaaaaaaagtcttggaataatctccaaaatgttgaaaaaagctgcaaaataatttgtaacacatttttgataaaatactcaaaatataaatggatgtattctttctctgatttctactgtggtaaaataaatataacataaaagttacagttttagccattttaagtgtacaattcattactcttaattacattcatagtttttataactatcaccactattcccaaaactctttcattaccctaaatagaaactctgtaatcagcaaacaataacttcccattccccagtcctgaaactccctggtaacctctactgtactttctgtctctatgaatctacttattctagatatgactaggtagaattatataatatttgcccttttgtgtatgacttttatcaactagcataacatgttttcaagattcatttatgctgtagcatgtgtcaaaactacactccttcttatggctgaataatattcctgtgtgtgtgtgtgtttgtgtgtgtgtgtgttattacattttgtttgttcattcatctattgatgggcacttggtttgtttttacattatggctattggtaataatggtgcaatgcacaacattggcatatatgtatctgaattcatattttcattcttttgagtataaacctaggaatggaattgctgggtcataaaataattccatgtttagctttttgaggaattgcaaaactgttttccacagtgactacaccaatttattcctcgcctcccccgcaatgtaggaggattccaatttttccacatccttaacaaacatttgtcatttttattttcttttttaaaaattatagtcattctagcagatgtgaagtcatatgtcattgcagttgtgatttgcatttcccaagtgattaatgatgttgagcatcttttcatgtgcatcttggccatttgtagatattctttggagaaatgcctgttcaagtcctttgcccattttaaaattgggttgtcttttggttgtcaagttgtagaatttctttatatattgctaatattaaacccttatcagatattattgattatttattaacaggacaaaatactctagttctaaagtgtacaacttacatatgaagaaatgctacaggaatttcccttaagatcaggaacaaggccaagctgcccactgtcaccactatattcaacatttttctgaaggtattagccaatgcaattatacaagataaatgaattagaggtataagaagttgtaacgaagtaaaattatctatattggcagatgatgtgatagcatacctaggaatgcttagaaaataaattttataataaaagaaaaattcttccgtggtaaaattaatatacaacaattaatagcttttgtagaaaatagcacagccaattagaggatataattaatggtagaaaaaacaccatttgccgtagcaacaaagaagattaaatatttaggagtaaacttaaaagaaaatatacaaatttcatatgaggaaagctttaaaataatcctaaaagacacagtagtacatctgaacaaataaaacgacatccccttttggtggatagggcaactcaacatcatgaagaagttagttatttataagttaatttataatttttaaatttttataaatttataatttataaatgtaacacattccccgaagtttttatgatgaggctagtcaagttgatactaaagttcatatggataaacaaacatgcaagaatagtgaggaatatacttaaaaagaaaattacaaatgcagggggtatgagaatagtcctaatagacattaaagcaaactataaagtctgtaattaaaactatggagtacagtaatggcaaatgaataaacaaggagaataaagtccataattaaacccaaatatgtgtggaagtttagtatataatgaagttagcatttcaaatcactagggcatagataaactttttaatatatggtatagccatatattaaattcaaatgcggtagccatttaaaaaagataacgttagatctatacttaatactatagaaaagaataaactccaaaatgatcagagatctaagggttaaaaaaaaaagcaatatattgcaagaaaacataggtgaatttctcttgaatgaaaggccttatgactcagaatccagagataataaaggaaaagcatgctagatttgaatacatacaaataaaagtatttgcatgttaaaaagatcataagtaaaaccaaaacaaaacctacaaattgagagaaaatatttgtccatatataaaaaataaaggactaatattcctaatatataaagaactctggaatttctgaaaatttgagggaaataaggacaaaaaaatctcaaaacaaagagaaaaggacatggatagacaattcaaaaaacaaatgtaaaaatggccctatgtagcctatgaagagatactattttcaattattgaagcgatacgactgtcagatattaagaaaggggtgttgaattatctgacttacaattgtgaatttgtcatttcttcttgtagttatatcagtttgtgatacgtatattttgaagctctgttactaggtgcataaacaattagaatgaccgtcttctctatcgtatcatcatatatcatatcatatcatatactttgccattatgaaatgatcctctttatccctgataatagtttttgctctaaactctactttgatatttatatagcaacatagtcttatcaaggtatatatgagttttgctttttatccagcttgactatctctaactttttaatgttatgtattgacaaattatagttgtatgtatttatggggtacatgatgatatgatgatttttgaaaatgatgtggagtgattaaactaacctattcatcatgtcaaatatttgacatttttgtgacaaaaacattcgtgatttactctcttagtgatattgaaatgtgcagtactcaattactagctatattcaccatgctatacaatatgtctaaaaaaaacacttatttttcttatctaactgtggctttgtagccattgattgccatctctccatttccccataccctagactctggtaaccaccattctactctctccttctgtgagttgagttgttttaaattccacatataagtgaaaatgtggtatttgtctttctgtgtttggcttatttgacttagcatgatgttctccaattccatccatgttattgcaaatgacatctttcttcctttattaaggctgaatagtattcttttgtgtacatatgccacattttctttatccattcatccattgatggacacttagcttgatattccataacttggctattgtgaatagtgctgcagtgaacataggcatgcagacatctctttgacatactgattttaaatcgttcaggtaaattcccagaaatggaattgctggattatatgttaattatatttttaggtttttcaggaacctgcatacagtttttcataatggctatactaacttacatacccactaacagtatacaaaaattcccttttctccacatccttgccaacactggttatctttggtcctttttatactagctattctaaacaggtgtgcaatgatatctccatatgattttgatttgcatctcccttgtgattaatgatttcaagctttttaaatgtatttcttagccacttatacgccttcttttgagaaatgtgtattcaggccttttgtctatttcttaatcaaattatttgtttttcttttataaagttgtttgacttctttatatattttggacgttaatcccttatcagatgtatggcttgtaaatattttttcccaatttgtagattgtcttcactctgttaattgtttcatttgttgtgcagaagtttttttttaattttaacgtaatcccatttgtctatttttgcttttgctgcctgcatttttggaatgaaatctaaaaaatcattgcccagacaagtgttgtatagtttttcctctatgttttcttctaggagttttatagtttcaagtttatgtttaaatctttaatctattttgagttgattttgtatgtggtataaaataagagtgagtttcattcttttacatacgggttatccagttttcccagctccatctattgaagagactgccatgtatatttaattgggattatctgtgtgagctttgatatggttgtatttaagtctatcattttgctcatgttttttatatgcatgatacagtctgttatttttctttcttttgatttttaaaataataccatgtatattttttgctggtttattagctatgactttctgttgcattattttggtgattgccttggagtttaattgtatacatcttcaacttacagtccaccttcaagagatgttcatagtatttacactatagtacaataaacgtatactttaatttctcttccagattttattattgttgttatacatttggattctacttatcttataaatcttaaaatacattgatattctttttgctctaaacagcaaattatcattaaataatatttaaataaaaagaaaaaattaaatatacacccatgttattgttatttctgttactcttaattcctttttgtagatacagatctccttcaatataatttttttgcttgatggatttcctttaatattccttacagtccagatctgctggtgataaattctatcagcttttatgtgtctaaaattttttatttcatctttttgtttgaaagatatttttgctggatatagaattctaggtagagttttattttttattttagtacttaaaaatgttgcacaattgtcttctggcctgagttgttttcaatgaggaatcagctgtcacatgattttagttcctctacaataacctgcctttttgggggattacttttcagaattttctctttaattcactggttctaagcaagttaattatgatgtacctttgtgtagttttcttcatatttcttgtgcttggtttgaatttaaagatttatagttttcatcaaatttgaagaaatttcagccattatattttcaatattttttcttcctctctccttatatttgaggactctagttatgcatatattagaccacttgatattgtctcacagcttactgatgctctgttcattttttttacattttctgtctgcatttcattttagatagtttctactgctatgtcaacaagattactaattttttctgcaatatttaattggacatttgatttattcagtatgtttttcatttcagacattttggtttttagctctagacatttgattaaaataattttttgtttacatgtgtttcatacctccatttaaccttttacatctttctactagcttagcaaacatgtaaaaaatatagttttaataactcttttaatgtctttgttaattttaatatctctgtcatcgttagttcagtttcatttgattgatagttctcctcattagggtcatattttcctgcttctctgcacacctgatttttaaaaagttgaatactagccatggtgaattttaccttgttggatattcctataaatattcttaggctttgtcttgggatgctttaagtttcttggaaacagtttgatcctttagggtattgtttttaagtttccaagcaggataaggcaggatttatctagtctaatgctagttttaccccacaactgaggcttctaaaagcccttctgaattttctgtgtgatgcaccaaatcatgactatttccacgttggctagtgaagataggactattcccaggcctttatgagcagctgggatgggtctctctaatcctttcagacaattctttttctggcttcatgagttttctcacatgcatctggccgtcgtactcagtagagcactcaagggacccctctgcagatctctggattcctttctctgaagcttgtcattcttcagtactgtgccatgtaatttctagccacctaagtctttttgaacttttagttcaatctcttgactctggaaaataggctttacctgagttcttctgccttgtactgtagcctggaaactctctccaggcagtaagctgggaaaatggtagggctcactcatttgtttactctctctcaagggatactgctctttgttgcttgatgagcaatcttgaaaccttatttctcaaagttttttaagcttctttttttttttttttttgcaggagggtaaattcagcctccgtcttggctagaagtgggtaatccaagtaatgcaaattaaaactatattgagatgacaattctagctcattgaattgttgaaaattaaagatgtgaaacacattcttctgtcaaggttgtgaagaaacaggtattctaattttggagggcatggaagttattataagtctttcagaaacaaatttcacagcatctgtcaaaacaacatatacactttcttttgatccagtagtcctcttcttggaatttaccctgaagatacaccttcagtgatatgaaaaaagatatgcaaaaagctgtttgttgacttattatttgtaattgcaaacaacctacatatgcatataggagagtgattaaataaattatgctgcagtcccacaatggagtatatgtagctataaaaaagattgaagaaactatctgtaatttggtatgaagtgatttccaatgtaatttaatataaatttagaagaatgtttatagaatgccatcttttgtatagaaggaagaagaaatgagataacatacacatatctgttcaattgtgcagaaagaaacagaggaagggtaaactataaactattgagactggttatctagagatgatgggtgcaaatggagtagaaaagatggggttggtgtgagtagggtagaatggatgggatggggattagtagttgagtgactacttttcatatatttgtgtatttcagaaccatactactatttctcatactaaatatacaaacaaacaaacatgaatgaagaacccaaatgattacacacagagacaaagggatttaactgtatttcagatgatataaccatactgagcatgtataggggtagtgggtgggactacctaaataacattggaccagtattttgactatgtattttaagtccaaagaataaaagtactaaaaatattgtactgtagagacagggagagatagagaatataaatgatagaatgagtataaactgttaacatttgaggactttggatgaaggatctgtaagaaatctctgtactatttttgcaattttggtatgtttgaagttaaaaaaaatacattttgaccatgagtttttatatgcaaaatgcctttcctgatgaacaccccaaaacaatttgaagcttacttttccactatgaattatgttaccatgaattatgttacttagacctggaattctgtcctgatattctgcaattactggaagtgccaaatgcccagtcactgttacttgaagactttgagaaaacaaatatataaactctcaggtactatggattatcctttcttccatatctgatgagcagcttacttgaaggtgtatcaaggattctattcaatggcttacaatagttccttgcaaaagtttaaaatagaaagcatagaatactttcactttctatagtacaaattgaagctataataagctgcatataattactcctggaaattttgttttggttaggaatgcaatgggagtgattaggacttagtattgtgatacagagtaagttacatctaggagaactctagggttctttgggaaactataaattaggatcaaggctattgttcttaagcaatttcaactcgcattggagtctcttttaagtttagagttcatcaccatcattgttattattaatatttttattactgttgttatccttgataaaagccacttgacataaactccctaattatcagaatgcttactttacctgcagatgtttaagttttggattttgagaacatcttacagtgacaaagacaggtgaatttgagggagaaaaatcatctggcggtggataacttggcaagttttgtgatgtttgagaatagagtagatattaaataaagatttagcaactaattgaaatggtagattttttaggtttggaactgtcacatagccatagaatagtatttctcagccactaactattttgctttttaagattcttacatcaaactcaggaaagacctaagaattcttctctgcactttgatctaaatgcatcattgatctgaactcaagatgttaccacagtttttcttcctttggttgagtcacaggggcatttattgcagtaaagccaatgcctatatatttcaaacatctgtatggaaaacataatttcatatgtaaaaagcactatgttatctggcaaatgcactctctaaggatagcacagctacagatactatcacccttgtgacagtttattggtatggtatgcagctctcttctttaaatattacactttggtttgtggctatagctaatgatttacagaacttgcactctgagacattgtctcttttaaagagcacacttttagactggcttcactattttcgtttgttcagcaatgttacatttcagcttcctaagaaatgtttctgcctatcttggcagtgattttcctcctcactttagttcagtatctggtctgtgtttatatattttactatatgttcctatattcatttagaccaataaatgtacacactccttgtatactaagagctgactggttttcaggactacattgttgatgtgcttgacttgccatttagtagtaagaagttatgttcgcacatttgatgctcatatagagccaaaactcatagatgtataacattagcctccaatttagtttatagatggattctctttgacactattaacagttgtcaaatttgaatagaggattaagaagaacatcaagttcatcatcaagctgtttagggagctgttgaaagagcctttgtgctttatgtaatcaaaagaactgctcagtgtttgaaatttttgcagaacagtacttagttgataatttgttttcattttttctattcccccctcaaaataataagaaaagggaacatatttagatttcgatcttgtttttggtgctgcaacattttttccttttcaaaagcatactttcagcttttattatcttttcacttaaaatgtaaatgttgaaaatgaatacaggttaaaattgatataaaattttgtgatagaagttttcaaaatcctggtgattacttaatttaccaccttaactctgacagaaatgattcttctaaagactaatggtctgacctagactgcattgaatttgtaagctatcactcatttgtaggtcatttttttttttcaaataaaagaagactcccattattaagaaaaactacacaaaacttcagtgctcagagtatataccccagaagaatttcctggtggggtgggtgggtttacacctgatattgtatttttccccctttttacttggctctctactactaccagtactccctttgaaatgttttctgtggtgctctaagcatagccaaccttttgttacattaaaaagaactgaagtctatggcagaaaaaaattacagaaaataaacattgattaaaacatagtattaaatttaagtgcacaaaatattatttgattgttctaaggatccagtaagatttactgcatgctaaatcttctgatcatttattttcattgattccacatatttttgtttagtgtctaccatatgccaatggctgtgcctgataacgatatagtagtgagcaagacagatggatttcttggcctcatagagcttatagtctgatagagaagattgatggtaaattaattataacaaagtatgacaaaagtcatgatttaggtaatataatattacaatggactgttgaaggcattattgaggaaatgacttttaaattataactgaatgaataggagttagttagatgaaatggagtggttgaatgtttcagacagagggaggagtatgtgtgaaggtcacaagagagaaggaatatagcagatagcagctggtgctttgggggaatttaaagaatttcagtacaataagactgtgtagtatgagggagagagtagagagtggtgagaatagctggagaggtaagtgggttccagaacatgggggaccttttaagctatatgaaggattttgggttttattctaagggtaaatgtttggatgattggaaattaaaggttggagaaactttgtacctttcctagattgcttcattcctaattccccagctacttgtcttcggatgataatggtcacatagaaggtgtcattttacttctagctagagcaggtagacagtgtgtcccttttattgaaccaagacaaaaatacatatatttttcagacaccttgagatcttataatttcagttttgttcctattctgaagagcatggcttgtccatagccaaatgtcagatgatctctttttggctcaggcaatagttgtgttgatctctgaagtagtctctagaggccagctaggttaaacattttacctcaacaaatggggaagtaactttaaaaaaatggtatttattttcattttcacaatataacatatattacttaaggatttgtgtaaataaagaatagtacttctttattttaaaatttgggacattggcccgggcacagtggctcacgcctgtaatcccagcactttgggaggccgaggtgagtggatcacgaggtcaggagatcgagaccatcgtggctaacatggtgaaaccccgtctctactaaaaaatacaaaaaattagccaagtgtggtggcaggtgcctgtagtcccagctactcgggaggctgaggcaggagaatggcatgaacccagcaggcagagcttgctgtgagccgagattgggccactgcactccaagctggatgacagcgagactccgtctaaaaataaatacataaatgaatatatatatgtatatgtgtatatatacacacacacacacacacacacacacacatatttgggacattgaagtataacatgcgtgtggtaaaatatgcaatcttaagtgtatctttcactaaatttttatatgtgtttatattccaccacatttttatgtgtgtaaccaccatccatagcaagatatagaacatttctagtatcctggaagactccctcttcctccctcccaatcataacccctgaaagatagtaactattctcactcttattaccatagattaattttgttttcttcttgaacttcatataaatggaactataaagtatacacttttcttgtgtttgactttttccactcaacataatgtctttgagtttaaatgttgtagcagatatttgttctattttgttctatgtctattggttaccattgtatcaatgcaagctatttactaactgtagcttcacaataaattcataaggcagtcagctcctttaattttgttcttactcaaaattttttttactgattatgggcctttgtgtttacatatacattttagatatacttgtcaatttaaaagaaaatacttactgggattttaattgggattgcaatgtgtttatatatcaatttagggagaatttacttcttaagaatgttgtgatttccaatgtatgagcagaatatgtccatctatttatttaggatttcagaaaattattaaagtaatattttgtagggttttaatggatgtatgtaaacaccctgtatattttgtagatttattgttttttaaaatttattttctattttttgcaaatatttgaaataaatatattttcatattagcctcatatccaatgatcttgctaaatatatttcttaattctaatactttattttaggttttaaatttatttctatatatacaaccaaattgtttgtgaatggtgaattttatttcttttctcctttacatgttttttaaaattaataaacttaatttttaatagcagtttcaggttcacaaaaaatagagtgcaaagtacagagagtttctatacatacatatatgtatgtgtgtgtatatatgtatatatgtgtgtgtatatatgtatatataatgtgtgtatatatatgtatatatatgtgtgtgtgtgtgtatatacatgtatatagcccgtccctccctctcagactcccctattatcaacatctcataacagagtggtagatttgttgcaacagataaacttatgttgacatcattatcacccagagtttatagtttatattatggttcactgttggtggtgtacattctataggttttgacaaatgtataatgacatctatccaccattgtagtattgcagtatcatacagaatagtttcactaccgtaaaaaaatactctgtattctatgtattcatccctcccccaatccctggcaaccattaatctttttaatatcttcatagttttattttttctagaatgccagatagtttggatattacagtatgcataatagctttatgagattggcttttttcacttaaatgcatttaagtttccttcgcgtcttttcatagcttggtagctcatttattttcagtgcagaataatgtttcattgtctggatgtaccacagtttatttatccactcacctgctgaaagacatcttgattgtttccaggttcgagcaattatgaatgaagctgctataaacatttctgtgtaggtttttgtgtggacataagtttttatttgagaaaaaccaaagaacatgattactagattgtatgattagagaatgttagttttataagaaactgccaaagtgtcctgtactaagttgtgtactattttgcatttccatgaacaatgaatgagcgttcctgctgatccacatcttcaccagcatttggtattatcagtattttctattttgttccttctaataggcatgtagtgatatgtcatttttttaaattcttttaattaaagagtgatatctctaataatatatgatattggacatcttttcatatgtttacttgcatctgtgtatcttctttggtggtgtctgttcaggtcttttaccattttttaattggattgttgttttcttattgtgttttaagagttatttgtatattttggctaacattcctttatcagatatgtcttttgcaaatatttttttcccagtctgtggcatgttttttcattatcttaacagtgtctttcacagagcagtagcttttaattttaataaagccttgtctatcaattatttctttaatggattgtgcctttagtgttctggctaaaaagttattgctatacctaagatcatctaagttttctcctatgttatctctagaaattttttagttttgtgttttacatttaggtctatgatcaattttgagttaatttttgtgaagagcataagatatatgtctagactcctccttttgcacataaatgtccagttttttcagcatcatttgttcaaaggattatcttttctcctttagattgcctttgctttatgtcaaaaatcagttgaccatatttatgtgagtctgtttatgagcgctctgttctgttccattcaacgattttttttcttttaccagtaccacacagtcctgattattgtagctttatattgagtcttgaagttggatagtgtcagttttctgactttgctgttcttcttcaatagtaagttggctattctgtgtcttttgcctcttcatagaaactttagaatcagtttgttgatatcctcaaaacaatttgctgcaattttgattgggattgcattgaatctatagatcaaatggggaagaatggacatcttgacaatattgagtctttcaatccataaacatggaatatctctaatttatttagttcttccttaatatcttttatcaggattttatagttttcttcatatagatttttacatattttattaaatgtataccaaaatgtttcatttcttagagtgataatatgaatggtaatgtgtttttcatttcaaattccacttggtctttgctaataaataggaaagtggttgacttttgtatattagccttgtattttgcaacctcgctataattacatactggttccaggaatttttgtcaattatgtcttattttctactcagatgatcatgtcatctgtgatcaaagacagtttcattttttcatcccaatctgtataccctttattttattttatttattttatttttaaactgcattagctaggacttccagtatgatgttgaaaaacagtggtaagaggggacatcctccccttgtttctaatcttactgggaaagctttgagtttctcaccattacatgtgatgttagctcaatgttttttatagatgttctttaccaagttgaggacattccctctatttctagcttgctgagagttcttttttaaaccatgaatgggcgttgaattttgtcaaatgtttttctggatcaatatgatcatatgatttatcattgttagcctgttgatgtgtgatgtattccattaattgattttttgagtggtgagccagcctagcataactgggataaatcccacttgattgtggtatataattcttttaacacattatttgattcaattagctaatattttcttgaggatttttgcatttgtgttcatgagagttactgatgtatggtttttattttcttataatatccttgtctagttttgatattaggataatgctgacctgataaaatgagttaggaaagattccctttgcttctatcttctgaaagaaatgatatagaattggcatcatttattccataatctgggcctgttgcttctgttttggaaggttactaattactgatttaatttctttaatatataaaggactttcagcatgaattttggcagattgtgtcgtttctcttgtgtgaattgttgcagattgtatctttcaaggaattagttcatttcatctaggctatcaagtttgtggctatggagttgttaaaaagatttctaattgtccatgggaactgtaatgatattccctccctcatttctgatattaccaatttgcgtcgtctcttttttttttttcctttagtctggctagaagttcatctattttattggtctttccaaaaactagcttttggttttattggctttcttttttgatttcctgttttcagttctgttgacttcaggtctagttttcattatttcttttcttctcttactttgtactcaatttgctcttctttttctagttttctaaagtggaggctcagcttatcgcttttagattgatgctgtatgcttccctctcagcactgctttcactgcatcccgcacactttgagaagttgtatttttatttcaatttagtacaaaatattttaaattttctcttgagatttcttcattaacacatgtgttatttaaaagtgtgttgtttaatcttcatgtattttgggttattccagctatcattctgttaccgatttctagtttaaaaccattgtggtttgagagcagacatattatttcaattgttttcaacttgttgtgttttatagcccagaatgtggtctgttttggtgactgttccatatgagtttgagaagaatgtgtaaactgctgttggtggatgaagtagtctatagatatcaattacatctagttgattgatggtgttgctgagttcaatgatgttcttactgattttctacctgctgaacttgtccacttctcatagaggggtgttaaaatcttcaactataatagtgaattcatctatttctcctggcagtttttgcctcatatattttgatattctgttattaggtgtatatatagtaaggattgttatgtctttaggagtatgacccctttaacattttgaaatactctttttattcctgataactgtccttgttctgaagtctgctttgtcttattactattgctacttccacttattttgatatgttagcatggtatatctttctccatctcttattttaatctatatttatctttatatgtaaagtggtttcctatagataatatatagttgggtcttattttttttgacccactctgacaatctctgtttttagattggtgtatttagacccctgacatttatgattattggtgtagttggattagtacctacccatatttggtactgttttctatttgtccttgtcgttcatttttatttttgctttccctgccttttttttgccttttgtggttttaatcgagcatttatattattccattttctcttattttgttaagatatcagttatacttcttttaagtggttggcctagagtttacaatattcagttacaattaatccaagtccgctttcaaataactatactgcatcacaaggtgtgcaggtacctcataataacaaaatattctgaattcctctatcccatcccttgtattactgctgtcattccttcacatatacataagcatatacatatgaaaaatgatattcttatgtataactatacatgtatgtaatatatatgaatgtaatatacctgtatatgtaatcaagtacattgatgctattattttgaacaaacttatctctagatcaatcaagaataagaaaatagagttttcttttattaatgctcttcctttttgtatgcacatctgagtttctaaactatataattttccttctccctgaagaacttcaacatctcctggcaacacatttcctcaatttttatttgtctgagaaagtcttcatttctactttacttttgaaggataattttacaggtacaaaatgctaagtgttttttttttcatcactttaaatatttcactccatattcttgtttgcatggtttctgaggagaagtcatatgtaattcttttctttgctcctctataggttaagtgttttccacccacttcctcaaccctggacttctttcaaggtttttcttttattttttattttctgaggtttgaatatgatgtgcctaggtgtatttttttggacatttatcatacttagtgttctttgtgcctcctggatctgtgtggtttggtgtctgacattaatttgagaaaattctcaggaattgttgcttcaaatattgtttctgttcctttctctttttcttttccttctggtattcccattatacatatgatataccatttgtagttgttccacagttattggatattctgggtttttttttccagtcttattttcctttggagatttctgttgatatatcctctagttcacagattcttttcttagtcatatccagtctactagtgagcccagcaaaggcattcttcatttttgtgacagcatttttaatctctagcctttatttttgattatttcttagatttatgtctctctgctcacattatgcacctgtgtctgcatactctctactttttctactaaaattcttagccatattaattatatattttaaaaatttggtccaataattctaaacattcctcataggactgctacatttgactctggctctgatgcttgttcagtttcttttttttttgacacggaattttgctcttgttacctacgctggagtgcaatggtgtgatcttggttcactgcaacctccgcctcctgggttcaatggattctcctacctcagcctcctgaatagctgggattgtaggcatgcaccaccatgcccggctaattttttgtatatttagtagagacaggttttctccatgttagtcaggctggtctcgaactccctacctcaggtgatctgcccgcctaggcctcccaaagtgctgggattacaggtgtgagccaccgtgcccagcctgtccagtttctttaaactgttttttgccttttggtatgtcttataattttttgttgaaaggcagacatgatgtactgggtaaaaggaaccgtaataaataggactttagtcatgtagtggtaacgtgtgagggaagggtaagaattccatagtcctatgattacatctcaggtttttggtgagcctgtgtcttcagactgtgaatttcatgaatgcttctcaataatttccctgcttaggtgggagaggatggctggagtgggctggagttgagtattttccttctcccaagtggaaggcttgagggggttggagttgggtatttcccttaccctaggtaggttatgctgtgataaaacagcaggttaggctctggaaaaatcgtttttcctgaaggcaggacttgttaaaaagaacagaatgttgtggtgtatttaaaaatgcttcttaatctcctccccctgctggaatcacacgggaattttcctctgacactctctgtgaggacctggtagagcttctggaggtaaaactccccaaagtgtggccatccccttttgactgggtatccttggagttcttaactctgagagttgtgcaccctgagcatccagcagttcgtagatcacagttccaaagttcctaccgacactggttcctgtggaggtttctgttcctgggtttctcctctggtaagctgtgattctctgtttttgcctgtctttctctggaatctgaggggcagcaatctgttgggtgacctcacttctctgatgaatctaagaagagctgttgacttttcagtttattcagctatttacttgttaggatgaagtgaagactgctgagttccttatatgctggactggaaacgggaagtctacgatatgttctttttgcttctttttcttatttctctaagatcaccaggataatattgcatagaggagtaatagtagatatttttgttttgttcctgagttcagacgaaagcattcattgttttaccattaataatgatgttttctgaaggtactctcctagtcttacattgctgagagttctttttttttaaaagaaaattacaaatggatactgaatgttataaagtgttttatttgcatcttatataattatgtgattttttatgtttattatgttatattgattggtgtttgaatcttcaagcaacttcgcattcctggaataaaccctcttggtccttttatatattgtcagattatatttgctaatttttttgagaatttttgcatctatgattatgacggagattctggaagttatttttttttcataatgtccctgtcgatatttggctggtcccctaacatgagttggatagtgtttcccaagtttgtactacattggtattatttcctccatgaatgtttggaacaattcaccagtgtggcaatcaggacctggagtcatctctgtgagagggctttacattatagatccaatatctttatatagcactatttctgttttctattttgatatgtatattttgcaggaagttttctgttttatttaaagtttcaaatttattagcataatcttcatactattctctttatcaatgtctgtaagaatacatatatatggaataatgtctcctttttcattattgatataaataatgtttttgctctttattacttgatcaatcttcctaaaagtttattaatttcattaatcttttcaaagaactatcttttagttttgcttattttgctctgtgagactacagtttctatttcactgatgctctctggtatttccttaattgttcatttttgggcgtttatttctttttccagcttttaagatagagcttaggtaattaatttttaacctttctgcttttgtaatatactaatttaaagttctaataactgcattagcagacataaaaatttgagatgtcagattttcattataactcagtttgaaatattttctaattttcactgtgtttatttttgccccatagattgttttaatcccaatcatttgagggactttctagttatatttctattacagaattctgttttgattccattgtgataaaaggccatacactctatggttttaaaatttgtttagacttgatttatcattcaacatgtgatctatatgagtcattttctatgtgcacttgaacaaaatgtatattttgtaattgttgagtgtaatgtttgatatatgtgaattagttaatgtaagttaatcttattatttaaatattctatatctctgttgatttttctcttattctattgaggcagctatgttaaaatctcaatcatgtggatatatcttatttttctttgtcagctttggtttatgttattggttttatgtaattttaggattgttggaattttcctgttattattatgtgatacttttctttattgatgcttcttgacttagaatattaattatctgatattaatacatctacatcagcttttttggagttagtgtttacatgatataaccccacttatcttgtttactttgaatattttttgtgtttttatagttaaagtttatctgttataaacaacctaattgagatctggttttcattcgctttttactatctttctttaatatgtcatgcttagtccatttatatgtgatataatttctaatgctaggttttaagcttatggtttcctattttcattctgttaaatctccagaagctcttttagccttgatattctattattctaaaaaaggcaaggccgtggcttgcaattatgttttataaaatttaatggcactcaaaattctttatcataaggagagcacagtatagatctcttgcatgtaccattcacaataaggttctcagtcctatgagaatcaaacgccactgctgatctcacaggaggcagagctcaggtggtaatgctggtaccagtaaggctggtaccagtccatggcccaggggttggggactcctgctttataaagtttggcttcccctctgcctctaaatgaaagccaaaatattatagaaacttagtggggaaacccctaaactgtcttttaaaaaagtaaatcgtagagaatcattttctgagacaacagccttttaaaaagtaatattctacttctgcttctggccataaagaagtaactggtactggaattaacctcgtaatataaacaatgagaacacttgatcaactgtatgaaataactgttttaagaaattagacaatagttagcactagactgcagtatatgagagaaggaaaataaagtaagccatgagattagcttggctttctacctggtggcatttatcagatcctggtactgggtctgataaatttatttttggtataatttggtaaatttattactggtacatgtcagataaattggtactggtagaattttgtgctgctacaaagatacccaaaaatgtggaagtgactttggaactggataacaggcagaggttggaacagtttggagtgctcagaagaagataggaagatgtggaaaagtttggaacttcctagagacttgttgaatggctttgaccaaaattctgatagtgatatggacaatgaagtccaggctgaagtgggctcagatggagataaggaacttgttgggaactggagcaaaggtgactcttgttttgcattacaaagagactggcagcactttgtccctgccctagagatttgtggaactttcaacttgagaatgatgctttaagatatctggcagaagaaatttctaagcggccaagtgttcaagaagaggcagagcataaaagtttggaaaatttgcagcctaacgatgtgatagaaaagaaaaacccattttctggggagaaattcaagcctgctgcagaaatttgcataagtaacaaggagtcaattttttttttctttttcttttttttttttgagacagagcctctgttgccgaagctggagtgcagtggtgcgatcttggctcactgcaacctctgcctagtgggttcaagtgattttcctgcctcagcttcccgagtagctgggactacaggcatgtgccaccatgcccagctaattttctttttgtatttttagtagagatggggtttcaccgtgttagccaggattgtctcaatctcctgacctcataatctgccttccttgggctcccaaagtgctgggattacaggcatgagccaccgtgcccagctggagccaagtgttagtcactaagacaatggggaaaatgtctccagagcatgtcagagaccttcacagcagcccctcccattacaggccaaaaggcctaggagggaaaaatggttctgtgggccaggcccaaggcccccctgcactgtgtagctttgggatatgatgccttgcattccagatgcttcagctcctgctgtggctacaaggggcaaaagtacagctcaggctgttgcttcagagggtgcaaggcccaagccttggcaactttcacgaggggtaggatctgagggtgcacagtagtcaagaattgaggttttggaacctttgcctagatttcagaggatgtatggaaacaccaggatgtccaggtagaagtttgctgcagaggtggagctgtcatggagaacctctgatagggcagtgtggaaggaaaatgtgggattggaacccctacacagagtccccactggggcactgcctagtagagctgtgagaagagggccaccattctccagacccaaaatggtagatccaccgacagcttgcactgtgtgcctggtaaagccacagacactcaatgccagccactgaaagcagccaggggttgggctttaccttgcaaagccacagaggcagagttgtccaaggccatggaagcccaccttttgtatctgcatgacctggatgtgagacatggagtcaaaggaggtcattttggaactttaaggtttaatgactgccttattggatttcagacttgcgtggggcctgtaacccctttgttttggccaatttctcccatttggaatgggtgtatttacccaatgtctgtacccctattttatctaggaagtaactaacttgcttttgattttacaggctcataggcagaagggtcttgccttgtctcagatgagattttggacttagacttttgagttaatggtgaaatgagttaagactttggggactgtgggaagggcattgttgtgttttgaaatgtgaggacatgaaatttgggagggaccaggggcaaaatgatatggtttggctgtttccccacccaaatctcatcttgaattgtagttcttatagtccccatgtgtcatggaagggacctggtgggaggtaattgtaggtggtttaccccatgctattcttgtgacagtaagttctcataagatctgatggttttataaggggcttcccactttactcagttctcattcttctccttcctatcaccatgtgaagatggacatgtttgctttcccttctgccatgattgtaaatttcctgaggcctccccagccctgcagaactgtgagtcaattaaagctgttttctttataaattacccagtctcgggcagttctttacagcagcatgagaatggactaatacagaaaggaaatcagtatattgagatgtctgcatttccatatttattgcagcactactcacaatagccaaatacggagtcaacctaagtgtctatcaacagatgaatggatataaaatgtggtacatggcacatatacacaataaatattattcagcgataaaaaggaataaaatcttgttgtttacaacaacatggattcaacaaaaggatattacgttaagaaaaataagccagtcacagaaagatatttgtgacatattctcactcatatgtgagagcttaaaaaacaaatgaactcacggacatagatagtagaatgatgattaccagtagctgggaaggataatggggagcaggggataaaatggggatagttgatgggtacaaaaatatatataatgaaaaagagctagtatttggtatcacaggagggtttctatagttaatgataatttgctatgtatttaaaaataactagaagaatagaactggaatgtttctaacacaaagaaatggcaaatacttaaggtgatggatacccaagttaccttgatttgatatttacacattgcatgcttgtatcaaaacatcacatgtacctgtaaatatatacaactattatgtgcccataataatgaaaaattaaaaataaataaatttgttaaaaaatataatcccttagatccaagaagtataaacacagggaagaatgtataccaaagcacatcaaaatcaaatggctggaaacaaatgaaagagagtcttagaagtagccaaagatatgttatatacagtggagcaaagatagaaatgattcctcacatcagaaacaattcagttagatatcacaatgacatactttgaggtcctaaaaaaattgcaacctacaattttataattagaaaaaatattcacatctgaaggtgaaataaagacattaaagaaaaataaaagttcagacaatttattgctagcagattttaattttaaaaattttaaaaaacttcttcaggctgaagaaaataatactagatggaaacttagattttaaaaagtaatgaaggttactgtaaatggttactctggaggcaaatatatgacatttaatttctaatgattaatttacttaaaatatgattgattctatagaataaacaataaccatgtataatgaggtttaaaacatatggaactaatacctatgacagcaataatacaaaataaaggtgttttaaagttccttacattgtatttgaaatggtatattattgaaggtagactgttgtaagttaaagatgcatataataaaccctggatcaatcatttaaataatgaaataaagaggtatagttaataaaccaacaaaggagataagtagaattctaaaaaaaataataattaaaaagccaagaaaagaggaacaaaggaacaaaggacaaattaaaaatagcaagatggtagacttaacagttattacattaaatctaaatggactaattatactaatttttaaaaggcagagattatcagattggattaacaaaaaacaagacccaattaatatgctaactacaagagacataataaatataaagatgtaaatatgttaaaagttttttgaagatgtaccatgaaaacactaatgataagaaggcttaaaaggctatattaatataaaagtagactccaggagaaggaatattatcagagataaagaaggacatttcataatgattaaaggttcaattaaccaagaagacataatatttctgcatatatacatgtattaataataacagagctttaaaatacatgaagcaaaataatgacagaactaaaagaagaaaaagacacagccacaatctaattattcttggtgattttaacacacctcttttagaatatgataaaacaagtagacagaaaaatctgtaagactgtagaagacctgaacaaaattatcaacttaacctaactgatgttgctagaacactacactaaaaaacatctggataattattattttcaagggaataaggaacatccccaagataaggcacatgctggactataaaacaaatctcaaatgtaaaatgaatgaaactataatgggtatattttctgacatggaaatgaagtacaaatcaataacaatatgaaacatttttaaattcaaattatttggcaattaaaccacatatttctaaataaaccacttaccaaagaagaaagaacaaggaaaattgtaaagtattttaaactaaatgataatgaaaacccaacctaacgaaatgtgtgggatgcagctaaagtaatacttagaaggaaatttatatctttaaatgctaatattaaatatagtcttaaaaattgcctgtaaattcaagacaaattcaatcagaattccagaaagtcttttcttttttggtaggcaaaccaattctaaaatttatctgaaaatgcaaaggacctagcgtagccaaaacaaatttgaaatagaagaacaaattcttattccacgtgatttcaaaacttattataaggctgcaacaatgaagacagtttggtattatagtgaggataatgaattgattaatagaacagaaaagaattaagaaatagatctacaaacacacacacaaacacacacacacatacacactctatacacagtcatttgattttcaacagttaagacaagataactcattgggaaaaagataatctttttgaaaaatgttgctggaacaactggatatttatatgaaagaaaactgactttatcttttacctcatgccatacatacaaaataaattaaaattgatcatagacctaaatataaaactaaactctaaagtttctagaagaaaacataggaaaaaaatctttgtgatattgaaaagacaaaaatttcatagagagaatccagaaaatactagtcattaaaaaattgataatcaaatcacattaaagtgaaaactctagctcctcaaaagacaccttgtgaaaacaaaaaggcatgctgtagactaggtaaaaatgtttacattacatatatttgagagacgacttcacaacccagtgtaaaaatgggcaaaatatatatgaatggtcaaaaagcatatgaaaatatgctcaatatcttagtcattaaggaaatacaaataaaactacattaaaataccacttcttatcctctgggtgacaaaattaaagtgctaacactaagacatattgttgaggatatgaaacaactagaacactcatacgttgttggtagaagtataaaatggtgcaaccactttggaaaaccttttggcagtttataaaaataaagtcaggcacatagctccccaattttacaggaaattcaatttttaagggggaaaaatagatatatattcataaaaagacttgtgaatgaatttgtatattagttttatttctaatacatctaaactgaaaacaacccacatgtccatagacagatgaatagatacacattatacacacattatgtggtgtgttcataaaatggaaattaataaaaaggaccagactactaattcatgctacaacaggaatgaatctcaagaactttatgctgagtgaatgaatccatatccaaaaaagaatatattgtatactttcatttttatgaaattcaagaataggcaaaattattttatagtgatagaaatcatatcagtggttgcctgagtccaggagcatggatgattgcctggaaagggagcataagataactttttagaaatgttctgtatcttctttcgggggggtggagctacatgagtatataatttgtcaaaacttattaaatttatattttaaatgggcgcattttattatatgtaaattatatatgaatatagttaattaaaaaaactagttttatagctgcttgacacacaatagtcttgatctttttatgtatatcaaggaattagttttagcacttattatgtgcagagctctgggttaagcattatggaaaaacacaaagtggtatcagaaacattccctgaccatcaagaaacttaatatgtagttatcatattgtggtataaacttgatcacataattaatcagatggtggtaaaaattgataagtactagtggtggtagatgtaaaaggagtcatgaaatttagagttaaattagttgattaatacatgagaagaatataaaaaatacagtgcctgacagatatgtgctcagcaagtgttaattattttccttgaggggacgagaatttatgtttgaagtgatgaatcaaggcataattgaggagttggcatttgatgtaggcacagtagaataggagggtttttcgtaagtcaaaaagtggggagacattcaggtcaggaggatgtggtgatcaaagaggggaagtgaaaaagcacaggtatgtacagtggagataggcatgcttggtgtactcatttggacaaaaagaagagtttcaagtaaatagaataataggaacttaatcagcagggtcaaactataaagggtccttaaaaccaaattgaggactataaccttgttttaaattgatcttttgtggattgccaatatataaagtaaaatagataaaaatggatattttatcagtaaaaacattttataatttaatattatgacattaactataaagtcaattaatcagaacagtgaagctgttttgaacacgtaactttgaaattagggactgctgatctcagaggaaaggttttttttttgtttttttttaatgagcctcagttttcacttaatttctggtgtgttttcttttggttgcatcatgttgagaaagtcctaatttatatagacaagttattgtaagtagcaatgctttaaacatttaccttaaggtctttgtatatctttcaatgaagcaagaagtttgtttcaaagcacagtcacatgtcgcttcacaatgaggatacattcagagaaatgcatccttaggcaatttcattgtcatgcaaacatcatagagggtacttacacaaacctacatggtatggcctagtacacacctaggctatatagtataacctattgatcttaggctacaaacctgtgcagcatgttactgtactaaacactgtaggcagttgtaatacaatgataaataattgtggatctaaacatagaaaagttacagtaaatatatgacattatactcttatgcaagactaccattgtatgtggagtttgtctttatgcagctcatgactgtatacataataaatatttcaatgtggtagtacaagttaactctttggtggtttccagatggttaaaatttagaatatagcacattcgtgtatgtatgacacttttggttatggttttcataatgtttagatttttttaagttgcaacttgcagaaacccaactcaaattaataggaatgtattggcttacattaccaaaagcccaggaataaaattctgttttatctattttgggatgtaagtatgctaacatgaggtaaagatttttttctgtatccattcttactgctgctccttctgcttttctttctatttttggcttcattcactcttattgcaggcaggctctatctatgtgccaggtgggatggtcatgactgtccacatgcatatagcttccaacctgagcatgagagagcctttagatagttccagcaagtaattctgattggattgaatttgtctttgtgtggcaagggggagcagtagaaggcaagcaacacagaactatgattgaccactctcatcaagacaacagcagtcagaaatattttcccaaagaaaccaaaataaagaatataggacacactggatacagaaattattatctccacagaaattagaatacagttttaaaaaagtgaagtatgtattttaaaaagtaaaaataaaacaaatagttgtagaacccaaaaagcaggagcagaaaataggggatagagaagatgtcacgatgagtaatattttagcaacatggacagccatagtttctaatggaatgtttttattccattaaaattgtggcacatctgaaggcctcctgggcaataagatacagtgaaaaaccaaggcttcagcctgcacatgtacttctgatagatgaaaataaaacttaccttggaaggaattaccttatgagttcaacagtaattttaggaaactgttacctattcattagtggatggtattcagaaaaggagagcttttaattcaaacaaaataaagcattatggaaaaagaattgtggaggaaaggaaaaccagcataagtgagtgtgcataggagaactggcagttgaccactattggttttcattgcaatatgcaggattttttgcacccctctccaaagaattagagtgtcttacttcatatctgaagcaaataattagtaatttttttatttttcacttttggatactacattgtggggacaatcaaacctatgttcaaataatgatttaaatagtcatgtcagcaaaacaagcactgcactgtagttagggctctgtcaccaacattttgacattggcaagacaggtgacttccttatcttgactctgttttctcatttctgaaatgagggtattggtctttatgatcattgaagtcttttttagttatagcagcaggccataggtttctgaatcatccgctgtatgtttccctctttttctagattggcattgataacagttgtgctttgaaggaaatttcagaagttgcttttgaacaatttctgttattgttataggtgttaggcagccttggaaagcagataaaagagataactcttacctgcacctatagaacaatgtgactttcattgacgtatgttaagtactggttttaaggaatgcctatgaaaaaaatatctaagaatttggcagataaaaattgtgtatagagagaatattgtaccgattatgatgatgtctgtatgtgtatgtacaggtttcaaatgtggtatggagctttttcttccttatgagcattccaaaatcttgcatctaacagttctaattacatttccaatagcttccactgccacacacacacacacacacacacacacacacacacacacactatattatctagtaaagtggttttggaattaacatttttcctggaaggaatatatctgatttaatgaccaaatcgttttaaggcagcacaacagaatttcacaggaactaaatctattttttcacaccgatcatgcatgttttactcaagcattgagtcattagcatgtttataatggttctaatttagcacaacattttctgaattttatccttgagtcatttacaaattgttcatattgagtaaacaaaggaaacagattgcattttatacttagtaatttatctgaaagaagaggggagggttaattgttttaaagttttggtctgtttggggaagtgagcctgctttttcattgctaggcataaatgccatttctcatctttttggtaatgggggaggggtgttatggaggagtaaaatgaaaaattaggaccaggacaagattggccactcccagaggggagtgtggagcaaaaggggagctggcacgagattatccaaaacagttggtgcattccttaatgatcaagtgcttgagaagtccagctcctcctggcagagcatctgtgttgatgtttatatcattgccctgctgtatgggaaaggcatgctttctcttgctgcttggctaaaaataggacggaatatagtattgtatgagatattttaagatagcaaaaacatttaagaggttaaaggtttgacttttggatcaaaaaagatcagtaatataactcatggtgttacttgcagactggattttatctagagtttgttagtgattcgtactcttggttagggaagttattctaggtttatttggtgtagtctgaaaaacccactccgctgtctttctgtcagcttcccagcgtgaagagcaggcctgaaaacagcctctatttatactcccttgttcttatttggaaaatcagttgtttcattggagagagagggagagggggagagagagagaagagcatgagcagtcgtcagggagtgtgctttgtacgttatagtgacttcaaaataaaactggcacattttagtgtctaattatttttagtgagcttggagggttttaattaaaatttaagagtgctcttcaagctctccaagttccaattttatcccactgtattgtggagcacttgccactgtggaaaaatgtacagtaactggcatgtgcaactctgtgtttcctaatgaaaaatgtgagatggataatcagtggggatataaatatattttgctggatttaattgtaaaccaaggtcatggatacttttgataagttatcattgttcttgggtaaatagaaaaatttattacatttgaaatttatgattcctatggtaaaaataaaaggaattgctttactattttctcaaagtgttaataagcaacagaaaatctgcacatagagccagcagtaattgttctcctcactaaaatattttgaagatattttttatgttgtttctagtgttttagcatttctaagtttaaatatcacgaggtaaagggaaaataagtgtttgcttataggtagattgttgtaaagtgcaataaagatttgtcacattatctcttcctcttccccatgctgtaagtttaatgacaatttgtttatttatttttgatctatctgaaatacctttattttgtacagtgtgggagttaatactgctgcaggtttgtctgactagaagtaatttaaaattgttcccaaaatatcaccacacagattaggaaatcaatatctcacatactctttcttttcatttttcttacatcataaaattaattactaagttaattagcgaaaacattactcagctgtgataaagcattcttgacttacctggcccgaaacctaagtacttaggaagcagaaacattgctttgtaatttattatgcatgatattttaaaaacaaaatagttctgaattctatcttccttttctctcaaatttcttgaaagagaaaagctttaatttgaaaagggaaagaaaaaaccagaaacaatgcaactgataatttataatacatcaaaacgtttacatccttgcttaaattataggtgagaactgaagtccagctcgcgatttttgatagtactcttttaatcattattatttataaaaattagagaagataaagtcctgcatttcattgaataaatattggttaatggaaacagattctttcaaagtaagaggaattaattttggcattttctatttcaatacgactttagcataatgctactttagcattatgacttacgttcattttttaaaaatatgtacatattatggtgacatttttcatgctgtaatgttgtgattctttatttccatttccaaaaagcatatattttctctcctgtttttcagatgatgacaacttaaagacattaaacttggaaaagtcaaagtcagataataaatttactgcatattgtttaattgttttgaggatggtggcagcattgtaactaattagttaattgttttcaaattaatttgtaaaatatatttatgtttataaaataatccaagagtgtcttggggctgttcagtcctttttttccatttggaatcttacatgattactgtgttaaagccactcagtgtgatcttattctttccatgtacataatgcaaacaggccttctttgcttatttttaccactttgatttttgcatttatgcttgatcagaataggtcaaagtctgatctgatcaattgcctctgtaatactaatgtcccattaatgtagttgaggaatgtggcacaaagggaatggatccttacttttaatttgtacccatacctggatattgttttgagatagaaatttgaaaacataaattttatttgtaactttgtatcaattacatattttctcatttcaaatcaggaaccttttggtggtagcagtagtgtcttctgcttatagagtgcttagtaacaattcacttctgagaaaaaatatcatcctacttactttatattattacgtggagaatgcttagcaccaattgtggtatgcctctagaggtttggcagtcagataatggggtagaaagcagtcatttgtcaagagactttcttacaggttcgagtcttcctggaatctcctagtcctgagattaaacattgataagcttgtatgtactaactttcattgtcctatagataaaggcaatcagtggttgctattaaatattttcatggctgaaaatgtagatatgcaaaggctgctttattttttccctcaatttcttctactgaaatgggaactcatatagctagattaactgagcattgcagtaaggattaattttctaataggaatgcgaaacgctttgaagttattagccattttattaatgagtagcttttatataaagctgtgtccacatggtttaagtgtgtattcctgttgttcatatagctctctttttctcccatgaagttttagcattcttttcttggagctctaaaagatttcaggtctatttatagaaatgagagacatattttagcctgttttacatcctaaaatgcatttaatcctagtatatggacttgctctgaatttgttattattacaaataaattgggcttttatctttgactactatactatatgctctcaactcaaactttagctaaaaaagttatgcttttgtaattgtatcagtaattattagcttagtgcactgatataacatatgaaaggctaaaaaaaacagaattgggtaggatattaaaataaaaactttttgttgactattcttatccatactctaacgttatatcaatctctttcagaaattcaaacctgatttgagaaaaagcaatctgtgacaggcatggatttgaagaattgcttcctaactcttaacttagtattatcatttttatgactttagcataaaaacaaaataagtatagaacaaaatatatatctcatttctgaatttgaataaaaaatagtaagaggctatttaagcaattaaatgcaacccgaacatatgcatctgcatgtaggctccattggaacatcactcagaatccaattttgaagcacagtagtagatcatttgttgaagactgagaaaataataggaaataatggaataaagaaagaaggaaggtaggaaggaaggaaaacgggagggaagaagtaagggaatgggcaaggagctttcatttaataaaatcaagctgacttctatttagaaagaacttcagctctgtgatagccagttcggatggttgttcttcatcagccgtttttacaacacactgatctggattctatcccttccttgattgattgatagtgtcacagacaaatgttaattgttttttcaccaatactttctaaccatgcagtggtcttctcatctcttagccagggctcatggtctttttctgaagcttatctagcttctaaagccctttagatccatcttgaccttactgtcattctgaaaaattcaaggaggatttagaagctggagaaaataaaaaatgaaagggaaaatactaaagagataggtgctgatacgagagagaaaaggcatttagaattggagtaactgttttaaatataattttaaaaggaagttatcagaattttgacacttggaatgttaaagttttatgggagtatgctttgcactaaggatttagtatttaaatctgcattcccttttggaaacatgacctatttgttaagatttgaggcttaaaagatacaaataaatagtggtaagcagtagcgccagttgcaaatccatttgcatagagagcagaaataactcattgagaaaaatttggtaattatcaagacattctaaagtttggatttctgtagtctttatgaatcttgataaaaacaagtgtaattactccctgtattttagtatgctatttagaaatacagtggggcaaataataaatggcatttatataggtatttatttaataaaaatatgtatcagtttttacataagagaaaaattttagcagttttattactaggggtcagagaacatcttaatttcattttcttcttgttttgctttaattggatattttataaaagttagatttcttttttaagaactaagtggttacagattgattgggctcttctctcttgattatctgttattgtttcttgcacagcacatacattttgcttggacttaaaaaatattgcctggattaaaaggagtatctaatgttaaactaataggaaagagccctcttttctgtactatcagtctaagaaatgacaaatgctgattgaatattaatagaattataatactaaaacagattattgagcattatcttttttctcttagatgatagtttaaataattatctggtaaaaataaactttgtggtggtattttataatacacattatagaataatgtaattttctatatcctggggttcaagctacagcaacaaaaacagctttatgcattcttaaatgagaatttccccataaactgactttctaaatttgtaataaatatatatttttaatacttacttttgtattttaatagattcctcctgcatggaaaaactactttcaaaagattggaaggaaaaaatggaaagactaaataccagtgaacttcttggagaaattaaaggtacaacataaaatatatcgaacatgtcaatgcagtgatgtgatgttattttgtataacaatgtatttgctgatcttctgtactgtaacagtaaatcttacatgtaacatttgattgtacatgagagggtgaatattataggtttctgagcttttattccttgcaatgtttacaaactgaaaaatttccccactttttgtattagtctataaacatataacttataggatatgctgcctcattaatttacttcacaaaaaagtataaaaaccttatgttaaaagatgagcaaattaagctaaagatagtcttagttttccctcttaaaattataataatagcttaatttatgaatccaaattattttgaatttcttctaatcaaaatgggttgcctgtagcacctttaaaaatgtttatagaatgtgctgtacataatggtttattgggggattctgaagcttgtttacgttggttcaaatcctggctctgtcactggacagagtaactttggacaagccactgaagttttctttttttctttttctttcttttcttttcttttttttttttttttgagatgcagtctcactctgttgccaggctggagtgcagtggcgtgatctcagctcactgcaacctctgcctcccaggttcaagcgattctcctgcctcagccccctgagtagctgggcctataggcgtgcaccaccacgcccagttaatttttgtatttttagtggagaggggtttcaccaggctgaccaggatgttcttgatctcttgacctcgtgatctgcctgtcttggcctcccaaattgctaggattacaggtgtgagtcaccgcaccgggcctgttttatgttttataatcctcatctataaaatgaggataatacaagtatttccttcataggctcattaagaagttaatacatgtatagttcttagaacagtacctggcacttaagaaagtactcatgagtttaagtttggtggttattattaatatacacagacgatcccatgttgataaagctcaaatttcatcaggtttagcattttgtggtctctgactcagatgagaataaacatctttacttttgaatatacgtgattgatattattatttttagacatgttaagaagtggactatcccaatccattcagatagtaagttaccttatcagttgagagttatactttttgcctactaaccaaactcttgctgattcatttatggagaagaagtgctgtattattattatttttgcattatgaatgaaattcatgatcacgcatcaactctgtcaatccttacggacagtcatcactgtgatttgcactaacaatttgggtacttagttacattagttttctgaatttatccaacaactttaggtgaatcttcctattggtcatggataatatctgagttaagatgaaaatttgataataattatctaatgtaaatgttattttgaatttactacagaaaatttcctagttttcaggcatgtcatgttcaattcaagtgaagagaaaaggaagtcatcttttttcccagcaaataattaataaatcattgcattaactaattatgtatcgaaaccagtggaaattggatattattttgagttcccctacttctgttttgtacccataaaggccatttgctgtcttggaaaaaaaaagaaactcaacttattgatggatacaaagaaagtcattagtgacatattctctatccagctgcaataacatggtgtttgctactttgcacgtcattctgtgttttcttccctttccaaagtcattcctttttataacagtgagaacagaaatggtttgtacaaaggcaagctttttccagcatgaaagatgagggtcctgctttctcttagtaatgtgaaaactaacattttattatgttataattcaacatggagtttttgtacttcagggtatattttctccccccctttccgtctttctttatatttaagtctaattttgaattcaaaatttaaaaaatgtgctagtcttggatacttggaatgtataaatcacaaaagtgaatcacatgaaaaattagccttttcaaattctttaacctttttttctggattctttgtgatatgtgaactttcatttgtgtgttattctgagtttcttatgggcataaaatataagattcttactaaatttatctttatttattctccattatcatctcttcatacatcctaatatcttttacagaaaatgtaccaagaatatattaatttaaaaatgaaaaaatcagttaaaatagtattgaaatagtttgagtaaactgctaccaaaactcaacatacatttttattctggtggaaaccaggccagttattatccacctaaattacttctcattttcctgaaattttaaggtgacctaaattatatctttgaggaatacatacaatcatgggttatcagtatttaatattatatctcaagcattgtgtatttttgatagctcttatatttttctgattataaaattcatatgtatttatctgtaagaaacatacaaaaaaacaaaaaggtagtgaaattatcttttaattctacttgtatcttattgtatattctttccattttaaattatgcatacttatgttaattttccccacaaaattagaatcatcccattataatttttttgtaatctattttccccacttaatgatatattatgaattttcctgagattgagttatcttctaaaatattatttttgttggcagaaagtattgcataaaatgaggttttcataatgtaactgggccttttcttcaacatttaagttgtttttattgtttgttggtttaaagagcacctattttgaaaacagaaaacatttttattaagacttatcaacttattagtggttatttaggttatattcttgaaagtgaaattcctgggccaaagagtttgttctttttaaaaagacttttgattcatattgccagttacccttcaggaagagtgtagtattttgtgctctcaccagtaatatctgcaggtttttattctcttgccctgaataacaagtattattaatttaaaaatttcttgccatttttataggggaaaaaacatatcattgttgatttaatgagttttttgactattagtgagaatgaggtgttatatctacattaatttgcaattaaatatctcttcctttgtgaactgcatatgtatgttggttgcccattttttctttaaaagacttgtccagttctcagtgttttctaagaactcttaatatatgtttgaatagtattaaactttatttgtgatatatgttgcattttgtcatttgctttattttctggttttgctgtcaatctttccatcccttctttaatgcttttttctatagggggtttgtttagaaaggcttcttcatcctgaaattgaacaatattctgctatattttcatccaattagttggctatatttttaaacacttacctatataatacatcttaaatatgttttgatgaataatgtcaactagaaatataacttaattttattctcaagcagttaaccaaatatctatactgtttattaaataatccatcttacctcctctgacttgaaatggcatcttttattacactctgattacatatttggaaccatttatcagattttggttctattccattgatttttccatctaaacttttattagtactatgctatattaatcactgtaactttagtatccttcaaaagtaagtattgcaagactacactcataatttttctttaaggtgcttccatacttctttaaagtttatctttaatttattttatcaagttgttaattaaaattccaaagtgattttttaaaagattatattacatttatatgaaagggtaggatgaactgacatctttatactattgaattgctccattcaaagtcatttattcagttattttatgtctctcaataattctgcacatttgcacatttcctttgatgttttcttagtatttaatatttttgcttactcttgtgaatgagatatttttcattctattttccttttgttatatttagggatgctattgaattttgctggttaattttgtaacttgcctctattgacttttaggtgtagtcatatttcaatagatatgttttctcttcctttttggtagttatatgtctctttgctacccactcccacccacccttcatacgttcattgccttgaatgccaagaataatattaagtaatagagaagtaatacagatatttcagtgtaatttttaatttatggaattgtttttaatatttcatattaaatattctattgacttgattaaaatatcctttttcatttaaagatattgttctagtctactaggagtttggtctattaaaataacttgcattttatttcatggaatatcttattaggttttgtttttcaaatttgtcattgaaataaaccctgattagtcgtggtatagtcttgtttaaatgtactgcatcattttatttgctcatattatagttgttatagttatttttacaactgtaattataaattgattagagttttccatgtttatattacttttgttaattttttagtagcagtgttcatagttgaattgaaaaacttttcctctttttcttggttatgtaaaatgttgaataaataacatgaactacttattccttgaaattctgaaaaatattctcataaaacatctaggcctagaattttctttggagatttctttttaacattttctacttttcttttaagtcagttttgccataaaatagttttcctaattaatttttaaagagaagaaaactcttacagaattgtatatctcatgagattttcaaatctcattgacttcatatacatattttatttttagttcttccatttatttgctgttatagatcccatatttaattttgcatatttgttttctcttttttgttcttcaattttacttgctagtggtttttctatttattgctctacctcccccaataatccagtttttggatttgtcaattctgctgcttttcaatatgcctattaattcattttgcttttacccttattatctctcctttcctgttattcttatgctttttcttttgtttgttttttggtatcttttaacttgaatacttcacttaacaaatttttatttaatgataatggtacttttggctatgaatatatttctagaaatagctttattcatcccataagtttgtgcttttagaactctgtcattattttctaaatattcaacatttatattattttctagctgatctgtgtttatatatcattcttaactgcacatattctcttagagtcctagagtgtaatgaagctgggaaagggagagaactcagcctttatcactgccattggaaaattctatgtgatgggtaggtgctaggagagtcaagtgtgagcagtagaatggataagggcaatgattcttcaactcagggagcttaatatttttacatatttaagaaataatagattattattttcccttttagattttacttaaaaaaccagtggtttctcataaaattttatatctgattaacgtaaagcaatgtttctaaaactccttgataggagttggaagactgctaaaatctgagaaacactgaatcatagaaatttgtatgagtatgtacctgagtcatgcctaatattctttttttattgtctatatgtaaggtggacagcatgaagttttgatatacatacatacagtgaaatgattactagtcaagcaaattaacatatgcatcacctcacatagttaccttgttctgtgtgtgtggtaaaagcacctaaaatatactctcctagcagatttacagcatgcagcacaatattatcaacttcagtttttatgttgtagagtagagctatagacttattcatcctacatacctgcaactttgtaccctttgacctacatctccctattcctctctctctcctacccctgttaaccaccattcataatattcttaaatagaaaatctctccttaactccctaccattttttcatatgtagcctcctttctagcattactgaggatagaatgctataattggcataaatttaatagtagtcatctaaaatcaggattcaaaccaagttaatattattacaattattacaaaataactttattattaaaactttaaatgaaatacagaataaaatgtttacacttttactttggcctgggtgcatctgaagtgttgtgtcccagttggggtctcattttttttttttcttttgagatggggtcttgttctgtcgcctaggcaggagtgcattggtgcagtctcggctcactgcaacctctgcctcccgggttcaagcgattctcctgccttagcctcctgagtagctgggattacaggcatgtgccaccacgcctggctagtttttgtatttttagtagagacagggtttcaccatgttggtgagactggacttgaactcatgacctcagctgatccgcctgccttggcctcccaaagtgctggaattacaggcatgagccactgcacccggcctgggtctcatatttttaagagatctattgttacattagtatttatcagaatgactagaatagtaaagagttctgaacatttagtgtgaatagtaattaaagacctagggaagtttggcctaatacatattatttgacttgaagttttattggatagaagaggataatatgtgttttctgctgttttagggggttaaggtaatagggaacttgttcttaataaaaaatggaaattaagaacttatagctgtgacattgataagattggactgcattagtagagagtgcctcaagtataagtagatgttcaataaatatttgttgaatgagttgggcctggtgaggcgcacctttagtcccagttactcagaaggtcaaggcaggaagatcgcttgaccccaggaggttgagactgtgattgcaccactacattccagtctgggtaacagagtgagaccctgtcttgaaaaaaaaaacattaaaaattcagaaataataaatatttgttgaacgaatgaatcaatgaattaaaggatgaattaataaaataaatgaaaattgggttctggaaaattttaagcagagatgttgtacagggtatccccatgctggtggaatgttatcttcatgatctcctaaggttcctttcaaattaatactacagttattatactttcttaattagaagactgactttcaaaatatgttctgtttcctgtcaataaataatttggtaagtaacttttgtaagacatcttattgtttacaaagtaaacatctaacattattttatttgagacatataacaatccagtgtggaaaatattattatactgattttatatatgagtaaaatgagactgagggaattaggtatcttgttcagggtcgctcagaaagttgtgaaagtagggtttgaatcttggtctctgaatactctgcttaatacaatacaaagtagttattctttaaagactttgaattctgcagtgggagcaagaaaaagatagattatgggctgttcctccctcccgcaacccacaaacaactaaaataactccacttttacccttttctatgtaaattaggcagtatggcaaaccaggagtgatatagataatacagttctccatgtagtagtatttatcttgatctttacctgaatgagagacaggggtgaagaaatatggtggaaggatacagggtaagacagaactactggtagggcccataacccatctgtatctatgtttgagttatactaaaggaatgaagatgccatagttatttatgagatatttctaaatgcaatggtgacatactacatgatgtctagagcatgaggattcattctctgtctccctgagtgggtctaaccttcatggctgagatcatcttagtcagcctgcctgttttgcacacatgctcctctgtgctgtgtctggcatttcctccttagtgtgaaggtgcctccctgggcaatgtgccagggacacagtaatgttggttgtttgagttagcacaaactgtttgtgcttgtgtttgacaaacacacagaagataagagagaaaaaaaaaacacaattatgtgatagcaaccaaataaggaaaatcgtgttttctttccttggtcatttacgattaattatttcaatatttacatttagggatcaaggtagatgttcttgtaggtatactcttctttagcttagaaaaataacagtctcttctgacagaaaaaaaaattgactaaacagatactttttgatggaaaattctacaaatgattcccaatgtttttcaaaggcactgttgaaaactgttacttattacagttactcaactaatatgtctgaaaagtttggttatagaacctaaatactatcattatagttcactgttaaagactggaagcattactccctgttactttattagggttttactaaaagaagtaaaattaggaactgcatacatcaaatagtacaagcatattatggttgggtttggtgcaaatactgaattaaaatgcaaatttattacaacactgctactaagtgccactgagggcctggtttcatttttagttttgattgcaagcataaatcttcggaggagtgcacagaaacacaaaagtcatggtttttttcactgcatgatagatctttgaagatcaaatagtgtaggttattcttgaagtaacttaagcagtgctgttatcaccaaagggtcaggatggatctaacagcattcccatagaattagtgttctgcaacacaggttactatcttaaaatccagttctctctcctagtttgttcatttctatcataaggccctaaagtatatgtaagtactttgattgcttattccatgcattgccttttctacagaatactctgtttttttttttttttgaatagcaattcatagttactacttttttctgttttaggcaatcacagaaggactagagtggttttacaagagctatggctgtaaactttgcatatttgcttatgaatgaatttttattgaatttctacttacaaatttacagcaattgttatatctggtggaacttaaaaaaaactagaaatgcttagagattaatcatctgccacttttcaactctgataaaatttttaatagcaaagttcacatacctagggatttttgctgtctctttagaaaaaagtatcaaaacagtaactatcaatgttcagattttatagattttttaaaatataaattgttatttctataataattaaacaaatgctatattgatctagagactgacttgtaaaaaagattgacacaacagatgtttttccttttccagttttaatgaaataatgtttgccagtattttctgtgtatgtctgtgtaattgtagaacttcagagtaatatctagaatcatagaatctccaaaagttagagctggaggtgctttgtgttttgtgtaatccaacttcttacttttcatataaggatctcaatatccagaagagaaaagtcactgctctaaatcatatagtaaattactaaggtggaaacttaatattcccccaaaatagcatgtttagtccattttacatagtctcttgattgttttgttatcaatagtgagtaattattgcagaacccatggactctttttgctaacaacaaatgcatacagcagctagttttataaatatgtatatacattatacagcaacacccatagttttttttaattataccactttgcatgaatgtagacatttcaaagctctcctttgtactctctgttatcaacatcttttacttcttttgaagtctgtgtgatatacataaaagcaattaaaacctccccccacttggggttagagacacaaggtcttcttaattaaaactcaaacaaaagctactggaaagaattcctaccatatgattaaggtctaaagtattatgatacattagaatcattgttaactgttgggattaaaagaaatcaatatgttggggaaaagatcagttgaatctaattagtgaaatcaatgtttatgtaaaagaaaacactgaagtttaataacaggttctgattataaatataatactggctaaaattgttctttgttattgttacattgaccacataatcatattttatattcactgaaaaagaatctgaaacttattgtttgtagttaattattataattaaaagtgtaaaactaaaaatcatacctggtttcaaaattttcaattataaaatgttcttatatgtgaaaatagtcaccaattataaaatatttctattgattttgtttttaaaaggctaattttaggaatagctacagcctagagtagggaaaggaggcaaaattggtttaaagtaaaatgatccaaagtattcttacacaattatgattatattaaatatgtattagtctatttggtgacatattgaaacaaaaaaggatatgttttgatataatacaaatacaagacattttacttttttcttccaattgctatgatgaaaataaacatagctaacatggagaagaaaaactattactaattgaagcctagattttaagtaaaatgaaggtcattagcaatttcctggaagccattcagattgcttaccaggaaatggtggctagcaggacatctgtaatcgccctgtgtggaattagtgaaaacatactggagcttaaatgatgtgtgttagatttaggctgagggggaacctttctctattaaagtagctagtattctttgaatacaaacaatttttgtttcagtattaatgtacaaacccagaactgaagacagccattaacatctatatctacatctatacatccatacattaatacacacctatagattggattatgactcatagtggaatgagagatgacagggtaacatcagaataatatgaatctgagagtgaaatgtgtttaggtaaatcaaaagaacttctataacttagaatgctgatttcataacattttggggtggtaaatttagtcccatttttgtagcattttcttatctcgataaagaaatgagacaagttgagtgttaaatgaaaatgcctccgaggacataaacttaattctcacttactctgcactgtggtgggagaaatggggtcactgatttagagacttttagcccagcatctctgtattacctgaatgattggttggtttaatgatgattaacatctctggaactattaaaaatgtcagagaaaaactgaggagagtattctgtgcatcaatttgtgtagtaaattatatatacctagaaaattactggaaggatatttagtaaactgttaacagaggttgactgtgcagtaggaaatgaatggtttagggtggggctgatttttaaattttgtgctgcatagttcgtactgtaggacttttaaaaacgatgcgttatgcattgctttttgaataaaaaatattattttaaaaaagactgaataataaaggtgaaagggattagttttcttatttgtacaaaagaaaatggatggtactacctacttagcttctgaattttattgagagtgttagagagaaaatatgtactttatagggtggcatgaagtagggaatcaataaatgctacagtaggcaacaacacatcatattttagtacttgcaactgaaaatatttaatagaatgactagaaatgaagtgctcaaatttttgacaggagacatttgcactcttacatttttattgaggaccccacaaagcttggtttgtgtttgtttgtatctattctgtagaaattaaacgagaaaatttaaaagtacttactaattcatttagaagttatgatattaaaccttgtacgtagggccaactgcagtggctcagacctgtaatcccagcactttgggaagccaaagcaagaggaatgcttgcagataggagttcaagaccagcctgggcaatatagcaagaccccatctctacaaaaaattaaaaaaagtagctgggtgtggtgacatgtgcctgtagtcttagctactggagaagctgaggcaggcagatcgttttagcccaggggttcagggctacagtgagctatcatggtaccactgcatagtaacatgaaacaaatttttatgaaaaatagctgtaaccaaatagctaaacaaaaacaaattagtgagaagagtggcattggtttacatttttcagatctctttaatgtatgggttaatagatgttggactcgtatctgtttctgcatttagtcggctttgataaatttttgattgaagtgtatgaaggcaatctgacctcattttgatatggagttaaagagaggagtattttacaaccttttcgtgctattgtgaatattcttctttgatacttcaccaaatttggcaagtggcagtttcttaaaagttaggtccagtagaggatctgaaaccctatcaatggacttttcatacttttatattaaaatctattggtttaaccttaactttgaatgaatcttttactccatgcatgattttgtaacattgtgtataactcttttccttatgttgacacatttcattatgtaatatcagaaaattgcattcattaatatcaccaccaatctcatcagaaaagtctttaaaagtatttggaaactgtcatgctcttgatggcagatagaagttttccaaaactgtcattttcccttgaatgaattattttaaccaatactgtcaattacttttacttttcttgaagtgacaagcctcacttgccaaatattgaggtctgaataataatattttcttagttgttatttcaaatgaaagtgttgctgtatacaaatagctttgataaagttcagcttccaatgccaataaaagcacaagtggtggttttccttgaaacaactgttatacttatatgtgtaagagaagtgcttctcatttcatcacatagactattaaaagtatatgtacttaaaagtcaccatttaataaaattaataatttttattggtttcatcaaggacattcttaagtgacattagtttttttgtttatttacttgttttattacaagtgtatgatggtgaagaatacaatgactacaaagtttggttcctttgattcatgctaagaaaccagtggttttactcactattttatttgcataatcaatgcaaatgtcatcactgtaacatgcaaataatgtcttagcattactataaaaactatgaaaattatttcagggacaccttgaatagttctctgggattcccagggatctaagaaccacattttgagaactgctggactagaaccttagattagcacataattaccttgacaataagttaactactcagtaataactacaaagcaacttagtcacatttaagacttcagagattctatgaaactctgaatgaagttaatggcttaaagaaattagttgctttcttcccctggatctgcgcctgtgacataataaacatgaactgtggagttgatcacatgtgggtttgattcatgataggtataaattgatctgtttatttaacctattttactctcaacttgctaacctgaaaagtggttaaaaaacaacaacaacaacaaccatgcatttcaggattaatgtgaagattagacaggtagttgtaaagtgactgacaagatagattcttggtaaatagttttccagtaggaataggaacaagagaatttggatatgtgccaccaatagggacctggaactgtcattacctcttgtatcacaaattatctcatgggaaacgattaaacatgtataatattgcaaggaagccccagaaattggtataatcataaatgtcaagtttacagcgtagttcatgtcaccaacgtttgctcaaccaaaaatgatattcaatttattgataattaaaacatttttgaataatctaggcctggtaaatactagcctattcagcttcattcccgtcttgtaacaggtagtttagctattatatgactctcaaccccttgcagtattattaaatcatctggtttaagtacaggccaaattattttacctaaaatgttgttttctatataattttgcttctggtattttattatagtggtagctaaaacttagagggcttcctgttaaaatgggttattcacatgtaatatttctgaacacacagttaatatggatatttttagtgtaactgtgatagtgagattttaatatatatacacatttattttaaaagttacaatgagatttttataatgtgaattagtgaacacaaaattatgaaaaacattttaaaagattttactattattaatttgctttatttcactttagccttttatgtttgaataaacatatagttttaaaatggacatttgtgataatatttatacatagctggtttttgaaagaaaaatgcatgggatcataattaatctccatctccatgctatttataggcccaggaatgctctgtgcctagcaccctaggtactaggatgtgctctgggtatatctttagtttagagtctgttcttaaccaaagtctcaagggatagctatgtcgcattaggaactggcccatagtactagacctcctacatacttagtatttaggtcatttgtctgaattttaaaaaattactgggctaaccacttaataaaatatgtgtattttcatccaaatggtatttttatgaataagggccttgaaataagcataaattgtacattattctctacatttttaaatgtgttgctactgttagtaattactactgagtgcatatttaatgcactgaggaaatttgagcaattattccgtttacttgtgattccctttcaatccaaatgtctgcattaaaatactgaaaaagaaaactacagagaatttaggtcatttaaaaaatgcactcattcgtgtactctgctagtaaacttctattgcactaaccaagataaaattagaatgggcctgacatagtaaaggatagggttccaaaatttaggtgattttaaataaaattaccttttaaatataaccttaaaaacgctgagccaattgcaaggcaacttccttatggaagtcaataagagatgaatacaactgagctcaaaatttagctaatttaacttcagacaaattatttttcctcaagcctcttttcagcacttaggatttgattatacctggaaatggactgaggagacacaagttggtagctcttagaaagtctatacaaaatgatagaaataaccgagtaaaggtctaagactctctcttccatgagtgcctagcacgtttttaaagctcagagaatttgggtactgaaaaagatccctaatgctgaaaggttctgaaaataagaagagtgcaagaggggtacagcttttgtaaacccactttttattttctcctttgatcatgaactggtaagaaaagtacatgtttcacggaaatgattcaatatcatgaaaatggtttggccagggaatagagtaaggtagaaaaacccaagtattaaatgaaaggaggaactccacatccattttgttcgatcgacatcaccagtgttagttttctttcaagttaatgtgcgactatttttatacatgttttaataatattcttaaatatctctccatgaaagaggggagatttaaaatgagatatttttcatagctttaaaatatgttttttcatataatagtaatgagagacttgtgttcttatgcttaaagcaaagagttacattcctattaacatttgtttaactaggcttccatcacaacaggtgcacaattatttttatgagtaaaatattatcagccttcaaaattagccagggcaaaatgcaagttgtctgattaaataatcagagctgatacttaaaatacatttgatttccacaggaattttaaaatgttaagttctaatctcttattctgatgtgcagagagagttgcaattgtttgtagtatgtaagtagtagcttgtattgtaactagtttgatgcatttcatataattcaattgatattatgagacaaactactaggttatttcttctagtctaacattttaatctagcaataaagtggtagtatgtttcacattaattcagtaaaaaaaagtggccctttccatttgaagactattctgtattcaatttaaaaaggcacatcagtttagaaaattaaaatccagtctgtgcttatttaaatttaatttgcgggggttaaaaataataaaaataatgtattttggtccataaaatgtatatagatcatatgtactgaatatattgatgaacaataagaaattcttcatggtaagaagcaaacataaaatcaacacccgctaaccccctactgaagtgaacaggaaacttatctaggaggcgacttcaccatgttttagaagtgctacagcagtgcagctgttataaaccaattacaggcaggtaactgtttattttcatagctgaatctgtttgtcaatcatgggaatgcaatgaatcaggagaggggacctcaaatacaaaccacagagtaaggcagagcatctggaatgggttcaagccacaagaattagggcaggagtatagatcgacttgaaactgtacatatgcacatggctcctgtctttgactatactcttcaaatagactcagaagtagagattattagaaataaaatgttagccttctattggaaacagtctgattttaaagttggctagaaactatatggttacttataggagtgtgattgtaaaagaaatcttctgtacatctttatgactgttaagacatttttaatattggctcataatcatcctttttaaatgaagattttactttattttttattttagaagtacattgagatatacctctgaccatattataaataggtaggtttttactactttgatattcatcgacagcaatttctaacttatataactctttataaagaaactttagttttatctggacccaggaacacatttttactcaagttagtaaaaccacctctactgttcaaacacgtagctgttgtgctcaggttgcaggatgtcaagagacagtaaagtatacaaagagtgctttacgtaagtgtatagggctagaaatttttctagtctaatatgtgggaaaacctactgagaccctgaagtttatgtccgtaacatcaagggagcataaatagaagtttattaagaaagctaaagaaaatgaaatgggcacgaccatgctgtggttttgcttaaatacaggctttcacatccattgagcattctggatttcttgttaaccggttactgaaaggagctcttttgtttttccaatcatagttttgtgccagtaggcatttgcctcaaagcatgatggctgttctctaaccctcacagttgactgtgaatttctcagccatggctatcatggtttactgttgccctcccagatggatgttgagaagcattttactggaatacttgttactttcccaagtctctttctgtgtactattcagttttgatattaggaagaagaagaggggaatcaccactatctgacatggctctctgtacctgggccattttttgagtatttacaaagactcatttgtgatggaattagaattaataatgaagaaaaaatgaataagaagtgatgattgaatgagatgacatgaaatactagagggaagagttatgattttttttttttagtctgaaaagaagaatttgcttaagagtgcaggaagggttctgaagagactctctgtattatatttcataaagaaaactggaagtaggaccacaaaaaatgccctttcctctctgctgatgaactgattcttattgtggttgacactaagaaaagctttttggttggaacattaatctcagaaccaggaagggatcttgagaattcatctcatccatccttcttttcgagaaggaatgcatttgtagaatctcagtcactccacaaatctttttaaagtgcttattatttgcccatcattgtgttaggttatgtggggtttatgtaatttcatattttctaccattcagacatgagaaattcctatttttaaagtcctaccaagaagtgagagagaaagcgctgacaaaaacaaggactaacattttttgggcaaatactttgtatcacagtgattttgtgtattttatctcacttaatcctcaaaccagtgccatgagatgggcatcattgtcctccatttccaaaagagtgaacagaggctcagaacaatgacataattttgttcaagacagcaaaatagtggctaaaccaggatttgaattgaggactatatgatgctaaagctcctgcccttgtcaccaaggcatactaacatctactctagacattattggaacacatttcctcatgcacttttcaaatctttcatactactctttgacctaaacaaacagaaaaacaaaaccaaaatcaaacaacaaaaacagtgatcatcctctatatgagaatgtcatattcttaactgtgaaatttacttctttttttgagaattgtgggactagaattacagaaaaagcctataatttttcttttcaaatttcccctgtaaattttcccttttaatttaaatttttcaggtttgaggatcttctcctttagtatagcatggcttttctaatttgctgtcaaggattatttcatattattctggctttctaggataatgtgatctacaacgcaacagtgaatcatctctggctattagacagttgacagggtgcctagataagtcatgagagtaattatagaatataagctttggaaactggatgctggctagacttctgggattcttacattgttagcatagtggcatatgtatttctgtgtttactgcaaaaacttatgaatcatgaatagaactttaataacaaattgtggtgtggttaattattaaattaaaactttgagaaatagttaaaggaagattgtcatctctcttataatgactccttactactattcccatagcctttatctcaccctgaaatctattaattgcttgattgtcttgacatctttctattcgtaccataattttccggtattcctgaagatattttagggagtcagctttgttctcttttgctcatcatgatgatgaaatagctagtactcatgaaatgacaagtgttttgaatttgggaatatatagaggacattattattttgaggattaagtcatcaaattatcttaaacaggttctacttaaaaagttctaggctgggcgcgatggctcacgcctgtaatcccagcactttgggaggccgaggtcagctgatcatgagatcaggagttcgaggccagccggatcaacatggtaaaaccccgtatctactaaaaatacaaaaattagctgggtgtggtggtgtgtgcctgtcatcccggctactcaggaggctgaggcaggagaattgcttgaacccagggggcggaggttgcagtgagccgagatggtgccacttcactccagcttgggcaaaagagcgaaactccgtctcaaaaaaaaaaaaaaaaaaaaattggttccagtgcttgagggggaagccaagagaaatcagacccatgagtatacttaaaaccatatgttagacagatactttaggtatggctaaagtcatgaatggggatgtgaatatggcatctccttatagagaaatagagtttagacaatcaacactgacagtataggagcagcgggtaatggttattttagcagttgagtcactctaagggatcagagaggtccaagaatgtaagttaggagaatgaagaacataaaggcagttacccaagcacctgtgcattagataacaagtgtcaaaaagtaagctctgttaaaaatgagtcagcgtataagatgcagaaggactaggtagtaagtacccagtaattcagcactgacagaagaagagaaataggtcactacaaatagtacttgagagtgttgtgacctttgattctagggtgagattgtcctgtcctagttacctgcttagtatagttatagactaatgtttatggctagatagaaggaaaaattttctagactattctaaacctgtgttgcccaatactgaagctattagccacatgtggctacttaatcaattcaaatcaaattaactaaaattaacatcagttcctcagtaacattggctgcattttaaggcttacttaacataccttgttatggctatcatattaggcagcatagatgtagaacatttccattatcataagaaagctctattggacagtgttcttctatattataatagccataaaaggctaagtcttttggggagttctaatgctatcaaaatgtagaatctacaggtatatataacaagacgtttctatgataccatactttaaagaagccaagaaataatattatgtcaaatttagtgagctttctgaaaacaagattttgatggaagaattctattaaatgaagttagttttgaaattggtgttcataatttttttttacttatttgtatattgttgcaagaaatacagacttttttcttcactgaggaagatgtattaaaatcctgtgggaatggatcataacttatatacagaaatgctgaaattatattaaaatctatttttctcacatgtatactgtgtgcttggtggagcatatcagcttttgtgggttacttgaaattttctcatctccactgatggctaatgggaaagctgatccttctatctttccttcatcaaactgtcagcaaggcagcttcctgttttgagtggtatttttcattgtatttaatactcatgtttttatgtatgcattcttcattgtgtttaatacagattttgagtgtttaactaggtgtcagagagatgcaaaaacatatacagggaaagacagggtgcggcagacagagagatttagacatgctaaggaaaatactaaagaagaagaaaaatattagatttatcctttcaaagtaaataaaactctaagagaaaaagagagaactatttgcatttataattttgtatctagtattttccctgatatactaaacccatgccagctaagctttctgggcataacattgagacacttttagcactctgacaccttcctagtatccagctccatgtgccaccctagagtcatttatcctagatttgaggtccaggaatcaaattaaccaaaggtacaaaagttcaggattaagatgagagggagattttaacaaagatgacctcaaggtctcctgagagtcaccactgttaggttttgtggcttctgcaaggaaaactcaaaattctctttgttcagagtactgctttttggctttggcatgaagatacttgaacagacagacctggcctttaacatcatggaaccaaaatccatgtgatagacatagcttgtgagattcaaacttgctcaaaattaaataggcaatttgcagaagaggatgtctgaagaatagggaaatgcaaattaaagaaaaaataagacgccattttgcatccatcggattggaaaaaaattaagtgtgaggagctgagattctcataaactacttgtgagggtctaagtttatatatctgctttgagaaaagtttagctatatctagcaaagttgaagatgcacatactctatgcattaacaatccaacttttatagttatatatttatatcctaaagaaactcttgcacatatacaagaatgttcattatagcattgtttataatagcagtcaaaataaagaagcagtcaaatatacaatagcaatgcatatcaacgtgtgaatttaaaaacataatattaaatgaaagacataaaattatatatctagtatatgataaaatttatataaactgaaaacatgtaaaaataataccgtagatattttcttataaactcatatgtatgtaatagtataaaaatattcattgaattgataaacactaaatttagtggattaaatgttaaaaaaataaaagcaagctctgcctcagaggcacaggagactgctggataaatgtgatttgtcatcatcttctggtattagagctaacagcttttctcagactatccatgccactctgcttcaccaagagaagttttctaacttgcctaggcctcatatctgtttacagtgtatctgttggcctttttctgacttcttgtcacaggatgggtgagggtaccaaagccttcagtcaactggaggaggttctttttttattttctactgtacatttctacctgaaaactgtaaacttttaatatgtctaaaagagaactcctgattttctttccaaaatctaccacacctaaaatctttctcatctcagtaacggcaactctgtgctaggtgttcaggtaaaaaacctggaaatcaactttgatttttcactgtggtacatattttccatttgcttctctcttaatccttctaaacttgctctgtgctctgggagttcaacttttatgcaccatgttagtgatttccctttctctttgacttccagttgggttcaaccaatgtgagacactgtggagaacaggagaagagtggcatcagtgtcttctccctggtcttagctcttttcttgccagattgctatagactggttgtaacctttcatgaccctcttcatacaactacattctccagattccaggaaccattctctcaccttaccctagaagcctgggtataatgacagcttcatcctgtaactgtctcctggatacagcactatccctttttgttttccttaaaccttgccccatatttttgtaaatagtttttttttttttaatttaactctcctcaaattatccagcttaaatttgccattgctatcaccttggtccaggccattaatctctcttgcttggattattgtaaaagcctcctagcttaaatccctgctttctcctttgtctccacacagtctgttttccacacagaagccagactaaccttttaaaaagttaagtcacattactccattgctcaaaaaccctctaatgtatcctcatattaatataagtaaaggccagagtgcttatgatggccctaaacatcctatcaagatacatatggttggttcccttttacctctttaatttcatcttctattaatctcccctttgctttttaaatttttttatttttatgtgtttacctactgattcttcccaaagaggcaccacattaggacttttgcatctgttttttattcttagaattctctactcctaagtattcccacggatcatgttttaagctctttcaaattcttgctgaaaagtcatcttctttgggagaactaccttgactatcttgcttaaaattagaacctcttccacctactcagctgttttcttctacagcgtttactatctcttactatccctttaattggtcatttcttgtatttattgtctgagttcctccactagaaagtaagttgcatgaaaacagtatgtgtcggttcactgcctgacccaggtaaattatatttattgaacgattggttaaatgtagtgagtgcgagagatgcctaagaagcctgtgagtgtgagagaaggctgtttggagtagttgcttttattctgtcttcgtatcctgacttctctccacctatatggaactgctcctgattgggaattctagttagtttatactgcaagaccacaagattcatctgccaccatcaattttagaatatgtacatcaccctcagagaaatttcttaccttttagcagtcacttcccatttcgtcacaactccccacccctaaacaaccactaatctactttctatctctgtagatttgcctattctggacatttcatatgaatggaattatatatgtggtcttttgtgactggcttctttaacttagcacaatgttttccaggctcatccatgttgtagcatgtatcagtacctcgttcctttttattgccacatgatattacactctatggctatatgccacattttattcaccattcatcagttgatgaacatgggttgtttctctttttttgctattatgaatagtgctgctatgaacatttgtgtataaaattttgtgtggatatgtttttattccttttgggtataaatacctagagatggaattgctgggtcatctagtaactctgtttaacctttggaggaactgatagactgattccaaagcagctataccattttacattccaaccagtagtgtatgtgggtttcactttctccacatactgtcttattaacaatattgaaaacacatttatagcaattctgttgaatagatactataaatcttatttttatatatggagaaactaaggctcagaaaaagcaataataatttgtcccaaactgaaaagcctagtaagtattggagctagttttccacctcagttctgatttaaaactcacatttttcatttattcaaaaatgtatttatttttccagaaaaaaaaatatatataattttttcttttttttgagacagagtctcatgctgtcacccaggttggagtgctgtggtacgagcttagctcactaccatctccgccttccaggctgaaacgattcttgtgtcttggcctcctgagtagctggggacaggcactcaccaccacgcccagctaatttgtgtattttagtagagacggggttttgccatgttatccaggctagtctccaactcctgcactcaagtgatcctcccacttcggcctcccaaagtgctgggattaccggtgtgagccaccctgccgggcccagaaatatttttgaggatcatttacatttcacacatatttgagtgtctagtatgtcttagaattggggaaccagttaactcagtttgcatagagcttagccagactagtaacccagaatcacttacatagtacacagcagttctcatacctttaggttgtttttaagtcttaaaagctaatgaagacccccgaaaagctttcatttttatagcttttgtccacttatattctagtattagaaattaaaactgagaaaaaatttaaaatactaatttgtttaaaataacaataaacttattgccaaaacaacatacttttacaaaaacaattttgtgagaagagtggcattatgttacaatttcataaattttttgtatttcaggcttaagaggagatgaattcccatgtatgcttctgcattcagtctgtcacaatatgttgttttggttgaagtgtatgaagcccacacatatatgtatttagaaaatgaaatattttaatagcttattgagatatttgtggatattcttcaatactacatcaaaatttacaagtagaatgatgatgtggaatctgaaatataaagcatcttcatattttattacatgatattaaaatccattgatctgacttacaatttgaatggatcttttaccattgcatgcttttgtaagattttgtattggtcatttggaagatgttatatctctgagttatatagaacttccaaatgttgacatatttcataatgcaatgtaaaaacatcacatccattaataccatatttgctaatttggaggctcagattctatcactgacaaacaaatacagttagttgttttccttcaagtgaaaagctcactttgtttcatttttgggaaaatacctgttaaaaattcaaatctaaataaccactctttgtctgtcagtcattttttcaagtaaaaatgctgttctattttttaaaaaagcagtctactctgatttcaaagactagtacagttgagtgccactgccttaatttgtgcgaaagcgccaggaatttcactcaccattgcttttgcaccattagagaaaataccaatacagtgaaaaagacagaaaagattatagtattattagaaaagtagttttatgcatacaatttaggtgtatggctatattatattcataccctgatagtgtccaaaatgctttttggagtacatgagagttgaaggtatgaaattcaaatgacagatgtgtatgtaatactgatgaaggaaataggcactctcttcccatagaattaaatgtttatttatttttaaaaagtctacacaattattcaaaacatcagatagaaggaaattaatttctttaaatatcttcttacttcaaattctatctcaactttctttaagtgacctttagtagaaataatccttttatgttgggaagaaataacttaattagttagccttgagcaagaaatattttcttcttaataatttcaaaaattgtaaattagtatttattaatgtagactattatacaatatcaatatagaagtatataaagaataaataaaattttctcattcctttgtctctgctggccttattgcacagcccacagacaatcactgttgatacttgttgtttatgcaacacattcctatgcatattttagttttaaaaaattatatttttaaaaatacaaatgtgctatgcaactttcttttttttcaaaaaacagtacaaactatacctcattcttggggataaaatttttgtttattttgttcactaacctgtaaaatctagaacagcacataaaatgtcctcaataaatatttgttaaataaatgaatttgttctttactttttttttttttttgagatggagtctcgctctgtcgcccaaggtgggtgcagtggtgcgatctcggctcactgcaagctctgcctcccaggttcaggccattctcctgcctcagcctcccgagtagctgggactacaggtgcccgccaccatgcctggctaattttttgtattttgatggggtttcaccgtgttagccaggatggtctcgatctcctgacctcatgatccgcccacctcggcttcccaaagtgctaggattacaggcgtgagccaccgcgcccagccgaatttgttcttttcatcagtttgagggctgtctgcataatattcctagctatcaataaataatactttgtttatacattcttctattgataagcatttggtttcttcttaatttctcacttttaaaatagtactaacagttggaaagatgggtagaagagtgttttgggcagtgtgaatagagtgggtaagacacagcagcatgagagagaaatgacttttctggagatttttatgttttcagtgaaaatagtggtatatgtgtatgtgcatttgtagtaggggtcggtgtgtgctaaatttggatgtcaaaagttagatgaggcgagatgggcaagtaatggcaaaatcatgaagtgctatgtatatcatgttggaaagtctggactttattagttgagagcctttgaagagtttaaactcagagagtgacatgatcatatctaccatgcctgaatttccaactttccagaggttgggataaagtgacactttctagtcaatgaaagtgtctgtgattatgtaaatttattaaacaggataaaataaatcataatatttctatattacgctacttttgttcttcattcttaagactctaaaatagattttaatatagacattatatgatcataatggcaagtatttattgagtgctcactatgtgaaggcaactgttctaagtgcttcacatgtattaacttgcgttaactcacttgatctatacaatactctatcactattccaattttacacaagataaaacgagaccaaagttactgttctaggaagtggcatagcaaagattttaaactggggaatctgactccagaacccaagctcttaaacacttcaccatacttcttcctcagtctgattattattacaatatgcaaacaaaactcactaaatttacatatgaaactgtaacaaatcaaagaattaaaagttatatttcctcatatacagaatgatgtaagttcaccttctgtattctgtttttattccaacagaggtcttttgtaaatataaagagataaaaatgtattttgtgaattagtgagtttgttggccaaactgacattagttataatgtaaaagaaattgacctttataatgcagaatactcttaaaattaacaaaaatatcgcatctgaaaagttaatgctagttgtacattaacacataatattaacctaataaatgtgtatatgtgtgtatatatacaacatacatacatttgccattctcagtaacataagtgttttttttttctaatgctaccaaaatattaatgatctttacaggcatagtaaaaattgaattacttccatacatttttaatattgcagagagcccacactaaaggactatttctagcattgtaacccaaactagaagtatccttataggttacctagttcaacctctcatattacaggcaggtaaatggaagcccagagaattacttgtacaaggtggcaaaattgaaactagaacccagatctcctgacttacattccagaaaccttccactctgtaacttcatagttaatgaaatattttatgtactttaatagctcttattaaacaacttataaattgtaagatgagcatagtactattttttgagtttaatttttttctacttctctgtcattttctatataccaacaaatgcttaataactatatacttacgtgatttatctggcctcattttggctgttaaatcttcataactctgcatttctatttttctacactcccagtatggcactgattttttaaaattataatttcttgttattttgataccttgtttccaaagaacttagactaccatattttacataagctcttactcttattaaaaggaaattaggatctggggaatcccttgagcactcaagttttcaaatacatgggcaaatgaaatgcaaggattcttgtggcccatatgtcagtggttaaatttgatcagtgatgggcattgaagtctttcaaagcccatatgtaactgttttccctatagaagatctcaatttgctatttctgaaaaaaatatcatttaaactatggttaatctcctcccttaactagcacatatgaaaactcatatgctggttctatcgtggaattcttagtatcattagacaagttgtgtctcacaaaatactttcctataaattgcttctgctattagatgagcatttcattgttaaattacatgttagacatggaaaattaaagtgctgaattaagaaccaatgttgcttcttaagtgaactgaggaaaatgataacgaaaatcaactatctaccaagagagatttaaagtgcattatttcccttgatttttttttaaaaagaggaagcatgttatagcagaaggagttctgaactgagaattaggacttctaggttctagtcctaactctgtcactagctaattagctatctgacatcaggcatgtcactttcccctctggctttcagctttcttatttgtcaaacttgggggttgaatgatctctttgactctttacaacattgatttcctgagtgtgtaattgtttgaataagtgtactcttaaaaagacaattcaatttagtttttaatagataagatagattttttaaaaaatcacctccagatatagattaatcacggttgaaccaggggtcagaaatatagtagagaacaaataagctgggctgattggggaaagtaaagttgttttttttctttctttctttttctttcttaatgtttctcttccccgctaaaaagctcagctatgcagtgacctttgtaacaattgttgaagttcaaattggaaaacacttttggaactgtatagatatacacataccaggcatactacacacaccacacccccacatgtcctctcccttcctccaggtctccagttcttcagtttataggatcaatctgggactctaggttgggaaaataagcacactgttgctttagtactaatgagaaccatgaaatttagagatacgaaaatttattctcagatattagcctagaagaattggatgttttgaagtggaaagggaaataggttttaagttagagtttaaattttgggtcaatcatgtatcctctttgtatgtttcatcatatgtaaattggtggtggtgataacagctacttaaaaagtggtgttttttttttaattgacaataaaattgtatgtatctcttgtgtacaatatgatgttttgaagtatgtatacattgtggattgactaaatctagttaattaacatgtgcattgcctcacgtaaactttttgatataaggttttaggctaagtccattttttgatattttttttcactttactaattcagagaaaataggttaagatgagaagcttcatactgaaaattacttactttgtatttttatcttggtagagttgcaatgccggtagaatttctaccatggttttttactttataatgataataacatgaatgatagtaacaatagtatcacctcactattgctgatgatctctgccttataattatttgggttgacaaagagaattcttcttgactctaagtgttctaagctgctcttgattgctcaattaatttgaaccaatggagggaacaaaagtgtatatgtaggcaattcttgattacctgtgctcttagttgcacagataactccaacagtagctacttcagatgtttatatttagctcatgaatggatttaagcgtttatgtttgatataaccatgtctgatgtttgggaactcttgtctttggtttgttgtgttgataattaaaccttgaaagtgttttgtctgaattcaaagtatattacctacaagaaatatattggccaaaaactcttacttgcaatatgaatcttcttgggagagtcttgtttgtttcattcatctccttgccatgtagaagagtgctgtaatgcttgagttactttttctccttccttttttttccctgccatgagtttgttaattcactctttgcttaaagaaaaatgtcagaaagctaaatttttataaaaatggtaacagttattgtttaactgaatttggttccaaagaaaagaaacctgaagggcaccaaacctatattcagttacattgggttgtagtgatttaatcacttgcctttggatttttgtggtcctcagaattcctaattgatgctcactttagtatttcagatttttctcctttctttgaaaccctgattgtactacctcttctgtggcttttattagtatttactaacagttacaactttactcagagattcctataaagcagtgcttgaaacatccacgaatggcagaatcttttttttcccagtcatgtcatagattttctatgtattttggtgtttgcttgttttcacagtgcctttttatcttcatctggtttagattcattggttttaaaattacgagtagtctttagtagttagctatattaaatacatttatttctgtgttaggttagtaattatatttcatttatagccttccaattccttctttttttaaaagccattcttggaaacttctagttagaactgactaggtataagcttgaaaattttagaactcaagtgtagttcagttctggagagataggtggttgtcttttgtgttcctgctcatatgattggggaattattttttaatgttagtgagaaattggttaaaccacattgctagtaattttctagaaacttaattataaaatctcttgaataattgtaggctgtagattttctaatactatcttgttgaatggggaaaaatactttttttcgtggaatttattcagcagccatttgttccatggcttttgttgaattggaagtcttatctagatttcagaaatttggttgagttttctgcttaaaataatgtgggaaagtttttgctttacgatttttatgctacacaggacattctactagtcttcctttacaataaaattcattatgtcttcactatgtgtatattaataacatggccttagaatcttcagaagcaaatgaaaatttttcattggtttatgttttctttgtgtgtattttcatcgtataagagttgaacatgtgcttaatataaaaattaaaattcataatagtgctgtaaaatttagatattttaatactctcattttttacatgggcatttttctgttatttagttaattagtagtgaaagtataagtttttcacttctaaaatgggaaaaatcggaatgatcttcatatatccttaattgggagtcacttttcatgaaaaataaatttattatttctatgaattttaaattaaaaatctctcttaaaaatactttgcaggccgggcgcggtggctcacgcctgtaatcccagcactttgggaggccgaggcgggcggatcacgaggtcaggagatcgagaccatcccggctaaaacggtgaaaccccgtctctactaaaaatacaaaaaattagccgggcgtagtggcgggcgcctgtagtcccagctacttgggaggctgaggcaggagaatggcgtgaacccgggaggcggagcttgcagtgagccgagatcccgccactgcactccagcctgggcgacagagcgagactccgtctcaaaaaaaaaaaaaaagaaaaaaaaaaaaatactttgcaaataaggagcatttgaacaaactttatgaaaccaagattattagaacctatacattgttaggtttactttaatgagttatatctatctatatatagaatatataatatatacatttatatatttgtttattatgagtttctacatattttaaatagtgatgaattgagcctaattattctaaagaatagtgccattcatatttcagcttgccagctacataaatttattccaggaaatttttatgacatttaaaaatcaactatagggttctatttatgtaatattaccttgtcagaaactgacattaaatgagaacaagttgtgattgtgtattcatatatcctggcttacctggtattgtcctggtttctatacctgtgttcttgacataataattaacagcacctcctttcatttaaaatgtcgtaggttggatgatgtattttatgaatgacttcacatgatggaatccttaaagggattttttttttttttttgagacggagtctcactctgtcaccgaggttggagtgcatggcaccgtgtcagctcactgcaacctccgtctcctgggttcaagcaattctcctgcctcagcctccctagtagctgggattacaggtgcccaccaccatgcctggctagttttatatatatgtatatatttttagtagagacagagtttcaacatgttggccaggctggtctcaaactcctgatctcaggtgatccacctgcctcagcctcccaaagtgctgggattacaggcaggagccatcgcgcccagcctgtattttttttaagacctactatatgtctggaactgttataggtttggagaaccagctaatagtaaacaaactaatataaaaatgatgtaatcaagtaatttagaagattttatatattattgttgccaaaaaggtgatcaagtagattttctttgtcaaagaacataacagttttttcatcagtgcatgataattgagtacttttggaatcacaacactttaaacatttagacaggatcctatttacattttagaaagagattaagagatattctatagatgtgtcagtatgatggaaagaatgcattgtttttagaaagtcaatgagcactttaaaaactttcaactctgttttaaaccttaagtataaaagaaactagctacaaatacccatttaattaaaactgtttttgagaagtagaacaggattctcaaatggggttgctgatagcttgtaaaaatgtattcaatatgcctataaatttcttaaactgtagaaagtgagtcagctagccaaaatcttcttggctagtaagggtgtacaaaatacagagtgagaagactgagtaggaggcagatttaagaactgagaaacctgatatctggaccaactaatagtgacacagggtcattcttccaacttttgagattcaactaaagaatggcttgttttttatctaaagtataacttctgaaaacattctcctacaaaagctttggtggcattatggaaggtgaattaatttatcaatcatctgtgactccatggacagtcatttctttgggcaattaagaattagaacctgttttctgataccagtgtattgacatataatttaattttactggaagaaggtgatgttagaaagagttaatataataatataaattcttgtgaaatttttcctgtaaaattgcttagtttgtataatttatttggtcctgtagttgattctgccttctaaattatagtttatgttactagaactgtttgaatttttcacacaattaaaaattgaatttctagatgtaatattttctgaatacagaattttcaagtctgttgatggagactagttccctgagccatcagacttcttttactgttcacggaccttaaataacattaaattgtaattatcctaaatataaattagtgtgccttttaatatcactgtatctcccaacagcgtactttaatgttttaaaatgcaggaagaaggcttgaaggctatgtgaagtcattgtcttaaactagttaactttttttaaaatttctcttttttccagaaacatttatagtttactgaaaagaggctggggttgggtattcagaccaactggcttaggaatcatagctctattgattacaagctaacaagctgtgtgatcttggacatatttttaaccttcctcagcatcattttcccaagtttgttgcagtagagaaaaaatgcgaaatgctaatcctagcacatagaaagtgtttggacgatcatttgtgctaaaaaaaagtgtttattgaatgttttttagttcaaattctttatctcttgtcttctcttagatttgattttctaccacttgtgcaacagtggggatggctggtgagttcagttagttacaatggttaccaaactagaattaactcagatatggctcagatactcctgtagttcaaagcaattctttctggtttgttaatttctttggccgtctatcaccaactattctgagaactaattatttagagttggttattagttcatttcaaatttactgagcacaaaatcagtagtagacatgtagtcatgtttgtgccttgtcacagagatgcatgtgacacagatcctccccttaaggagctgacacgtaggaagtatacattgtggcttatcatttgttcttcctctccaccagttttctcggtagaattatgagtagcactagagtagattcttacctaattcacagcaaaggctttgaacttgggtagggagcaaagagagtgtagtagggaaaacatccttgagatctgtatttgctccctctacaatccttctgggaccattgatgctataataatttttttacaagcaatgatcttttaaagtattacgtttaaattcaagttttgtgataatctcatcgccttttcagatgtttgcctcttcaaaaggtgatgtccaccactgctgaggttgtttttaagtactaccagttgtggtattatattccttatgaggctcataatttaacgtattttttccttcttgtctcaggattacatatccagtttttgctttcaagctaaaaaatttaaaaacccttatttttattgatctgaaagttgaaaaaccatgagcattttaaagttacgttagaaagtgagttttataagcttcttcttaaactcaatttataatctacaattattgcataaagtgattttaaatctttaaaaatcttgaattggctggcactttgggaggccaaggtgggtggatcacctgaggccaggagtttgagcccagcctggccaacatggtgaaaccccatctctactaaaaatacaaaaaaaaaaaaaaaaagaaaaaaaaattagcagggcgtggtggcaggcgcctgtaatcccagctactcgggaggctgatgcaggagaattgcttgagctggggaggtggaggctgcagtgagccaagatcgagccactgcactccagcttgggcaagaagtgcaaaacgccatctcaaaacaacaacaacaacaacaacaacaacaacaacaacaggaaatcttgaattaagcttttctaagaatttgtgacgaatgtcctagtgtgagaataggacatcctatttgtgacaaattattttttataggttgaacaaatgtatattaacttttaatttttataagtagaggcttagaaatttctttttagaattttattcatgttctactttagcatgttcaaaataatcctgtgacaggagactcttggtcatttctggacccaggctttaactgtcttttcttctctttgacattccattattttctgtgccctgaatattgtgaatgctacataggaaacattagataatcttgaaagaagttttattttcataatacactgatgagatatatttggcagcacctattttacccaggaatcattattaaggtcaacattgtgaatgaaaagaacatgctatttatccagctatatttaactataaaagaacaataaaagaaacagcagtttttagaatcaatatgaaatttccagttccattttccctctatagactcacaatatgagtttgtgataggtgggatctgtgttacttgcctgttacctgatcatatatactcagcactgtaattcaggaaactatgagctatctatgattatataaaaacataatctcccttgtcggtcagtttcattggaattgaaggtttttttaagcgcctgttttcattaaagtctcagtagttgcaacagccacacccactaggatgtcctgagagctacagacaacacagaaaaaacatgactgaactggactctctagtttgctgatcaaatgatttgggggcagggatgtgtttcatgacagacctggaatggggaattcgtagaggagccaaaatggggcactaaaaagccagaggatgttgggcgtggtggctcccgcctgtaatcccaccactttgggaggacaaggtgggcagatcacctgaggtcaggagttcaagaccagcctgtgaaacatggtgaaaccccatctctactaaatatacaaaaattagccaggcgtggtggcaggcacctgtagttccagctacttgggaggctgaggcaggagaatcacttgaacccaggaggtggaggctgcagtgagccgagatcacaccactgcactccagcctgggtaacagagtgagactccatctcaaaaaaaaaaaaaaaaaaaaagaagaagaagaagaagacagaggaccagtcaaatcagtctgttggggaagccaaatttctaccatttgagagtccaagtccagaggtccagtggaatgaaaattaggaatcaaggtagaagtctgagcaccagtgaacttggagggaacaagatcagagtaagaaaaaaaaagagtatgacagtgagtatggaagaggagagtaaattagatgactacaagctgtgttggatatttgtgacttggactgaaaggtcacaggacattgtactagtcgctgggatattttaaagaaaatagagtgtcatagataattccctagataagtgctttcactttagtaaacagtatatttaggaaatattatattccaacaaaataaaacatccttaaaaatagattataaggaaaatctcagctacattgtctgttgggtaaagtaattttgagaaggtaggacattcaggagttccattctccatttatcatagtggttaagaggacagaatctgttgccagactttctgattttgaatctcagatatatgatttaatagctaaggatttgggcaagctgcgttacttttgcatgcttcagtttccttgtctttaaagtggaggtaacaatatgacctacttcataggactgttgtgaggaatagatgacttaatatataaagcttttcccagtgcaaagcaattgtagtataagtttaagctattattattgtatgaaggggcatagtgggctagagcagagattcccttgatttcctctaggcaaattgtaaatacaccctagaaatgggcacagtatgtggtatgtttgtatgggcaactgtcccaagccttagttgtatctgggaggtttctcaaatcatgctagactcacttcctagacttctccacatacctttctcttggctagaacctgacagcctcagcctacatatacactgcacccggggcagcaggacactggactcctgcaaatatttgagtgtatttctcatactttcatgggtgttgtaaatattgtatctggaatgctggagaatgccggagaatgccagagaatgtcggagtctgcataattactgtatttgggcctgaaaccaggaagccatatgctatttgggaagagaagggttggggaataagcatacagagaatctggtctgccaggcttgctgctaatttctagagtaattcagacatgtcacttaatgtcaagatctgttttcacatccataagatgtcaaagttcaatttattgacctctttggttgtctgattgctagccaagctttttgccttattttgtaaacaaagccttaactgagaagttgtacatttcttcattccttttagttgtatatctcttagctgtaaatagcattaggattcttggtacctcagaacattgctcctaacttttagaaattccctaactatgtattctaagtgtgagatgagggaagatacctctttcttagactctagactcgcttggattaaaaatcagaagatgtgaattcaaattcaattaaatgctctatgacttggtcaaattactttctgtctcaatagcttagtttttcatctgtgaaatgaaaataacaatgtaactttttggatgaggattaagataacaagaatttttaagaaaatgccttgttaataaagtctatttttcttactccttcccttcctctcctaacgctcatggagcttctagagaaagagccaatcctgcaatacttggtggtgatattgacacaaatgatttaattgtttttcccctttaaaggacaaaagaatttcatgtttctgaaaggccagaaattactatttttatgtgtaggttatggagatgtagccagtgactggcagtcacccacagagaacagtaatgtaaagacagtctgtcttatattgaaggagagaagtttcagaataccttcgtttccagatccaaaaaggatgggcttataaagcacaatgggctaaaagcccagctgtgaggttgggagcctagatggcaggattccatggattgttcttgctctgttaggatttgcgacatgaatagacctcagttgatccaggaatagacttccttttgcagccaggaagaggggaagtaggagacttgagtgtgcctggtataggagagtttgatcttaatttaggaaatacctgggtatttttgccttgttagtacactgtagattctaatgacattttaaaggtgaatatcaagaaggaaattctcatacattcagtgaaaaagaaaacaacaacaacagtaacaaacagcctatacctcaactcatgaggcacacttcctgtgaagtggtccctaagtgattcctaagagcacaattgctgcatttattaaactttttatttactgaggaatggacagtagcatatgggagcaatgacaatagctgactgatgagaaaacaaagaaattccagtattctgctgttttgaaaaaagtcattcagaatttagtcatattggttcagctgttgtaaccaaagactgataagataatagaggtctttgtggtggttttgtactgaaatcctttatctttatgatgcactagggccgtttagtgtggaaagcttttaaaactgctattggattcagaactcaaattagctgctggtatgctgggacaggggttcctttctcaggcagtcaccacaaagtaacttttatcaggggaccttctgatagattgttagtctcttcagcttaccctgtttattttttgttgactttttgttgctatgttttgtgacatttaaaagaaggctgtatccaaaacggccaatgctaaatgatggactgagcttgtgaagtggagacatcacagtccatcagatgtgtgaggaggctgcagtgtaaagatgcagcagttttcccaggttatctgtgggtagaaaagagcaatgcagctttcttttatgactagcattgttattttggctttcttctaaaacgatatccattaaaaaaattagaactgaccagggaattgattcttaagagcttttgttttcaacttaatttacaatctttctggattgttggctgagttccttgattgatgttgctttggaattactgttaagtgctttaatctttctaggatttatgtgaaaaagtgtatcttcatcagaactccactccagtgtcagtgccacccctacccactactctaaacacagacatttgttagttacccaggtttcttataatttcattaagtccgattaagtttattaatgtgtgcattgatctaatacaggagaatgtctaggtttaaatctcattttaaattccctgggacatgtttctagagaatgccattagttgactattaattttatttggcttggtatgttaacaccattgcccttcatttatttttattttttttttaaagacaggatctcaccctgtcgcccagactggggtgcagcgatgcaatcatagctcactgcagcatcaacctcctggtctcaagagatgctgccaccttagcctcccaaattgctaggattgcaattgtgagccaccatgcctagcccattttattagagatagaaaggatgtggagaaatgcacaaaatttaatttagctgttctcgtactcattttctctcttttcctctcttaactctttttctctttctccgttgctgtgttgtttctagattttctcattagaaaaacttagttgtcatcacatagtggtgactccctttcagagaatatctatttaatgaatgacctgtttaagatttttatattgtaaaagttctaggtatgggaatactgtggaagaggtgaggtaaatctccatttagtaaagtgccctgcaagttgcctgccttatccagatctggtcttcagtgacttcccaatgaccagtcttatttctagcaccactgattttgattatatatatttcataagggcaaaattagcagactgtagtgctaacttttgtgaactgatgtaaaaaaaggcttttaaatacattttaaacttaattttttattttaatttttcatgctatatcaataagagaattgccttatttatctcattttacctaaattctcatctgttttgaatcttctctgtggctttgggcctggggacaggtagtaatagtttgtaaagttaaaaaaaaaatagtacatttcagttattttttttcaagttcttcagattgtgaccaaaaaaggctagagggctgattttgaaactgttataatgaaagatggtatttgaaaacttttgatgggggaaattgtcatcatatttatattttgaaaagtgtttccttatttacgcattattgacttcctattgagactcaaaattttaagtacaactggtaaagaattcaatggatcaaattcagtaaatctgaagtcactggaataaaggcccctaagaaaaaaaaatgtgtcaattttaaaggtctttcctaactgaagaccattttgtgatagagccaaaggttaataaaatcagtagtgaatgtagcaattttacagataagctattcacaacaagtgtagttacttgaataaaaagctaattcagttctaaaatgccacatgcagtagcagtgaatagctgcttttaggtgctttctggaggaggataaaatacagaatcacggcactcttctcttccagcgtccctggctgcctgtaaattgctgtgaatggggctgtgggctgacaggctctattaagacaaactgcctttctcatcggagagataaaataaatcaggtgtttagtcaaattaaaatacttcagctggagcaggccctggggagcactgatccacctgactaatctgagagaaactcaagacagatgtggtttggggataaagacgaccccatggaacaaaaaaaaagaaaaaaaaagaaaaaaaagaaaaaaaaaaccctgctgcactgtctttggagttggagaacagatacagtttatagtagagagtgtcaggcgcacactgtgtgatgttggataaaaggcatgctgacttgtagagaagctgtgtacagaagtgtttttgctggttccctttttgtggtttgtgaaactacctctgtttttatgtgggagctgggcagaagactattttctggcagtgctttttagagaatcattttaagatagcttgaaggacatgaaacagatgatgttaggtagctcctgatgacctctgctggcctgggcagatcatcagaagttggtttactttttttccaagttgattttttcaaacctccaaacatgatttaggacatgatttttcttttctttgtttttgagagatagtctcttccacccaggctggagtgcagtggcgcaatcatggctcactgcagtcttgaactcctgggctcgagtaatgctcctgcctcagccttctgtgtagctgggactacaggtgtgtgctactatgcttagcttattttttacaaaaaaatttttggagagacaggttcttactatgttgcccatgtagttctcaaactctgggcttcaagcgatccccccacctcggcctctcaaagtgttgggattacaggcatgagcctctgtgcctggccaatatactattttctatatagagttaatgcataagagcattcgaagatcttttgccatccttaacaaaacttaactatattttggttgctcctttatgtctcatcattatctgttctttcagcagctcttacaattgtagttcctttgccatggtaaagtttcatgtttaatttttttaagataaaaaaacttgtattcacaggttggatggtcagtgtgatttagacttgatgttatttttattacagtggcatgaacacatgctgttaattaaaacaggaaaatctgcattataggtcttaaatgcttggcttcaaaccattatacccgaacaaatacagtgggtacagaacagaaaaatgcatccccctcccactgccacgcacacacacaaattaatctgcacattttgaatataagctattgtatggtgttttttccctaatttgagccccaagggctacttggctatatatatgatccccaatacagggggaatttcagacttgttacactactatgcttcactccaacttcatttttaatgccactattcaaaatatatacattaaaaaatctgaggatgctcaagttccttatgtaaaatggcctggtatttgcatataacccatgcacattctttcacatacttcatatcatctgtggattacttataacacctaatacaatgtaaatgctgtgtgaatagttgttatattgtgttgttttatttgtgttattttttattgtgttgttattattttaaaaatattttcagttcgagattggctgagtctgtgcttggttgaataagtggatgtgcaacctatagatagcgggggttgactgtatgtactcctcaagtttaaggaaaaaatagtgacagccttatatgagtgtttaaattctcattttaaaaatactgctttctgcattttcttcttaaacgtgtatcttttaagtccaaagaaaaaatttagatgccactgactgtttacaattggattcagctaaatggtgttattccataaattcagttatacttatatatatctattaaccctggaagcaccaatgcatttataaatcttttggcttcactgtgaacagaagaggctaagaagtcacttaggtattatctttagcctctctgtgcctatgcagaggagaaaggggagtaagttgaagatgattgaaagattgtttaagatggaagaagagaaaaatttccagtatttattggggaatctaaatactagatccaactctggtattggtccttgcccaaaatttcctgtgtaagctcttctttattaacaaaaaattatagtacagtaactatcactatatccaataaaccttctcttaacttatatcatatagacaggtattatgatacaattacacgtatgttagaatattgcacaaaatataataataaaatacgtatacatcccatttatctcatgtctttccaatctattcaccacactgcaaccaaaatgaccatatcactcatttcgtaaaatactttagtgattaggaatcattcttagaataaataggtagatcatcacacatggtctataaggggctgaatggtatgccctcttactagctctctagcctaatctaatgctctattcctgtttattttccttgctcaagtttcactaacttctttcaatttctggaacacaccaaactgccccccatccccaacatatgtgtacacacacacacacacacacacatgcacacacacatgacctttgcctatagcgttttcttttttggaaaagctccttgaccaccaaccaccctcttgcaaccctttcttcagttgtagtttccttgtcattgcaatttcacgttttctggaaagctccttcaaaccatgctccaactcttcgtctagttaactcctatttatccttctgttaatttgttgctttttcagattactttccctgaacttgggcacccaaatttggttaaactcccacagaacatttgtcttatttgtattcctatgtagttgtagtttacatttacatgtttgattacatgattaaggtgtctcttcaatttttttgtttgtttgtttttgagatggagtctcactcctacacccaggctggagtgcagtggcatggccttggctcactgcaacctctgcttcccaggttcaagctattctcctgcctcagcctcccaagtagctgggactacaggtacccacccctatgcccagctaatttttgtatttttagtagagaaggggattcaccgtattggtcaggctggtcttgaactcctgacctaaggcgagccacctgcctcagcctcccaaagtgctaggatacagacatgagccaccgtgcccagcctatctcttcaaattttgaactacaaaatgcctaagaatagggactgtgtctgcttctacttgccatgctgtccttagttcttgttatagtacctgatacatagtggcaattcagaaaatgtttattgaattaaaaatttattcaatatgtaaatttaaaaaatatcattcttgtgttgtattttctcattcctgtatatattaacaaatacattagttgaactttttgtccttttcaagagatcttatggatcttatgattctttttgggaacctgcttttgtattttggaagttctggatcaataaattcttccttttaccaagatgaaattcccattgctgaagtaaaaacccattttcttttaataaattccaggatctagaaggagtagctggcgactagccttgatacagtatttgtttccttatcagtggaatacactttctaacaactttatttttcctttaattttgattttaggccatcattgagctcagtaaatctgaggatataagagatactgacagcttttctttttttttttttttttggacctgagttgacattaagaatcccacgatagtcctaaatgtggtagcttctctgttgatgtcagtcctacctttcagaaatcatatactaacaagtgctagcctgcatcctctgaagtttctctttctcctttgggctactttaaaaataaggccactcataattaaaatattttctgggattgtaatggtgctttcttagtaggaatgagggggtttcataaggaggttggaagtctctccttctgcacacacaaaaattggcaatctttgtcccctttgacagctggtggcatttttctgaaaagctttcaaatcacagatcatttcttcataatgaaatctgtgtggttcagatacagtgggttgaaattcttatcttatgctgcggtaaaatgctctaatttagattcacaaaaggattctgtaccgtttacttaggagagctgtgcaatttgcccataaaaagactgttcagcaccattagtgcataccataagtgttcagcgacatcatattcattaaacagcatatccttatgcataaccttttcaaccttgaatgtgtttttttctctttgaaaaatgacaaatgacaaaggggtgatagagccccccaagcaacactgttgcctttacagatgaacttgggaattttacttgatcctttctcaggaaaaaaaaaaatcacattcaatcttttctcacctgaggcagttttaattctctctgtagtattctctctatggccaagagattgactgctaacttctaaacttcagtgacatatctttgtacaatagaaaattttgtgagggtaaggatcagaaacttcctcaagtaacttttattaagcacctactatgtcttagatactgttagtcactgagcttagaggtgattatagaatattaatataatctatagtttctgatctttcatattaaatatcatggatttcctagcttaatcagatagattgggggcaaaaaggagaaaatggggtaagtctgctttttttagagcaagaggggagagtgagtgagaattttaccagtgacaatactttctcttggcaggaacagtgaggaaccctagctttcattccactgctgtaattactctctggtgttcctgtaccctcaatggcctccagtcattgtcccagatctttaaatgtcttaggatagtccctttctaaattctgccctcctttcccttattcgtccaggtatttctcaagcttgtgagatctcttcttgcttccattttaggtacacctgagagcctggcagaaaaagaacggcagctctccaccatgattacccagctgatcagtttacgggagcagctactggcagcgcatgatgaacagaaaaaactggcagcgtcacaaattgagaaacaacggcagcaaatggaccttgctcgccaacagcaagaacaggtgagccctgcaaaaggcactgacgaactggagatgtggaatgtgccaggctcagagagtaatcaaattgattggcttatttgttgtaagctttcctaaaaaataaaaataaaaataagaaaagatggaaaaaaaaaacaaagccttctggaaatctagggtcttcaagaattttgagggaatatgtgtacaaaaaaggcatcatagcaactgggcataactaaaatgatacattgtttcaggtttggatttgattaatgatttggggatgcttattcatatagacatcacatataatccctctgtagcttcactatgagtaagtgacttttctctgggccttattttcctcccagaaaaagggggttctgttccagaaaaactttgggaatcttttagctcattggtgcaatgattttcttcaggtttaaagtccaaagaggtgaccatacatttcagttttccccagatagccctggtataatgcctgttttctagagtaataataccctgcctccttttacttgtgaaagttttcttggtttggatgatacatcacatggtcactatttatagcataggtaagtcattgaatacaaattagtacatcgttcctaaaagtatttgacctgattgacttagaattgagaatgaagaaaaaatagcaaagtttaaatgtatgtcttttaaaaataaatcactttcccaaatgttttttcttgtctcataagagtacattaatctaacaatgatcctatagagtagtccctgatgctttagatcagacagatctaaattaatgtgcagtttttaggaatctgacattattactggaattatcttttcagttaaatgtattttataggagtatatagagcaatatatgctctgttgattttaatgagttgtgatgtctggtattttatatgcttgaatatttgcccacatgtaggaatatggactcagcccctaatggaaaataacataaaggaacactgtaaaaaatcagaagttagaatgtcatttagccatccagagatgacacagtaattaactattgacacttgtgaataagctagcacaaattaatcttgacacatttgcagacgagtgatatcttacagtgaacactttgtaattatatttcaaaatgaaaattaaatgacacttaaaactaggttgtcatgctcaatgaagcgagcatgtagctcaacctattggcaaataaaattcagaatttgagccacatggcgcttatgtaccatacttcactgtgtcaaacccatacgtctagagtggatgatagtaattgcactgtggtgttttggatgcatttctatgcagcactttatcatttaggagggaccatcaatattagatgcctagtggcatttcactggtttgctaagaagaaataaatattcagaggatccagcatctatacctagagctgcagaatgagttgtacatttctgatttgaatatccacaagcagagtgggccatcccaacctgattaaatactatttccactttaagtataaagctctgacaaggaggagtctcatttctcacactgtagtctacattaggggcagctttatcatggcttccagtaggaaccagttgtcatccaaaatcagaaagcaacatttagaagcagactgctattttgtcatcttgtgctgaatgaaatataatttgggcactaccccctgcataggctaaaacattaaaaaggcttgggaagtatatagcttggaactgatttacactcattttcacttccaacataacccattctagaatactggctttggaagtaggaagaaataggaagaaaagacactcttgacaaaaaggcactactaaacaaagtcctgagtgctctctggctgcttttctctctggcttcctaggttggcagtgagtgtgttctcactaaggatcatctctctggacttcgagctgtagcagctcagcttttgagtcaatagtggcctgatgcctgactcatacttcatagtaaacactattatcctaaggaagctatttgacctcctgagggccagagacagtcatcagtagggcttgcattaaatggttaacatttctttttatagaccagataatgtgtttagatgttgaatttgattgttggatgaaacaaggaaatataaaatttgtatatagatcctgtactatgaaataaacacattgttctcaaaaggataaatggataaatgttaaattacagcttaatttgtttttaaaaatattttgtacatcacatacagcatcaacaaaaaaagctaaagattttttactttttgctgtgtcctttggcactcctttaacaatatttgtaaatgtatcagttctgaaaatctttgtatcaggaaaggttttgccaacatagaccatattaagcaataatacgaagatttttcctgtctttgcttacagattttactttttacatccaaattaagccatttagaaaaatgtagccagagatttttctatctctattctacaaggattcgatttctaaaatcccatgatttccagctgaccagtgcagatataggtgaatagctcacaaatataatagaaggggtagttttcctacagataaagcagagaggtggcacttgtttaaaaatttttcctttcatccatctttctgatttggcctctctcattttataggaactctttcacatagaggtgcggtaaaagattgttgtaataccaggagaaatacctgaggtaatggcagaggtgtaagcatttcattttaacttaatgaaactttatttctgatagattgcgagacaacagcagcaacttctgcaacagcagcacaaaattaatctcctgcagcaacagatccaggtcagtgtattttattactctcgtctgattatacttagatactttcctccttgaaaatggaatttaaaactctgcagatgtacccctgtcttataaacagcaccaatagggctgttttcaaggatgttgtgcacaattctataattgaatgtaagaaatatggactagatggtggcctaagcattattctctgatgtgatatgtaagcaaaataacccttatcttttttctttttgccttttgcctaacactacttactgggaacctaatggtctcccaggtagcatacagatggtattttttattgccactgaccactttctgttttgtattttaccatgtaatagtactgtagagagaacttacttttaatttacttgttaggactaattggaccaattatgagaaaaatctggaaaaaggctgttaataatttgttccttaacaaatattaattgtattccttctagatgctaaagggaatagagagattaatgagtgatagtttgtcttcaaggagcttacagtctaaaaaggaagaaaaacttgttcctgaataattatgacatggtgtagaaaatccctttttcttatggcaatgtaaaaatatatagatcataattacaatgatctggggaggaaaggtgatggtctgatttccgacattcttttagatacttgatggttaactcaatgaacagctatttgagataggcaaggaaaatggtttccctttccaaatagaaatataggtgtgtgacttctagaaagccctagaataaggaactggctgtctagtgactaatccttagaaacactgatcacagagttatgcctatcctacggtagactcttgtttcccttgattattggagaacctgctgggatcttgattcaaactagctgggccagtgtattctgaattatattattacttttcttgaggttaatatcatgcccttctgtattttaaaaaaaaaatcagtagcatgaggtcatagtttactgcaatattctatctcattgatgaataacaaggattttaccttcgatccttgcttcattttgttaatcatactcagtgttccaggtagttactgcacttaaagtactaatttggtatctgaagcagtccctttacctaattggcattttgtccagctattttcagtaggagatcttagccaacttttttgttggtttttgtcgtattcagtattccatattcaagtacacatgttgcaaaataaaaagtccaaatatagatgagttgtaatgtctggcatttttgacagtcagcctttacaattaaatcttggaataatttctcatcctgatatctcttttatgactcatgctgagacccttaattaaataactgtccaggtgttcccttgttctgcccttattagaattttcagtgtagctcctactgctcaggtcaagatttttagcctgtggcttcctacatttttctgtagatccctctgtaggaactcagtaggtgttaaataacatgatcgtttagttctctctgtttctcctatttgtaaagcaggaatggaggaagttccctgaggtgttcttatatcagttaattattgtttttactactgctttataacttacttgtttattcttttctaatatattttacttcttagtccagtgctgtttatactgactggttgtcttcactgatgttttcctgtggcactgagaactccaggtgaatagcaaccaaatcagttcagaatattttaatgaaatacttttagtgtgtattacttatatatgattgtgtagtataaattgactacatctttttcagaaaactacagaacatgatcttaaaatattcattggaatgaacatttggaaacatcaatttgaaaagataggagtaatgtttttcaagttttctaatagaagtttgattgcttttaaaatgtgtggatatttcttgttgtttaattttttaatttaagctaatcagcacttgaacttagcagtataaattataaaataaagatagtcaatgtcagagttacattcactttagaaatataagattctttgtaataagaactcaaattttttaaaaaataagagaaagcaataagacctgtatttatagttcattctgtcctgagctactgctttatggcatatcttgtcagtatttaccttctacatgtgagaccattcaaaaaatttttcaaatgctgaaaaacacgtactccttacacaaaatcacaaaatgtattcatctctgagacttacaaaacaggtatttgacattcagactttctttttttttttttttggaaggggaaagggtaactatattttcaaatatggcttttgaaatttaatcaaatttaagagagagattattgttggattaattttaaatgctttctgagcaaaatatgagacttgagggatgcttcaaacattttttttctatcaaaaaaagaaacactttctcatttgaacccaaaacagaacaaaggataaaacaaaattattaaaggtgaattaaagattattaaatatattaaaaatgaaacttaacttctctttcaaaagcaaatgatgaatacagagacaatttgagcaagtttgacactttttttttctttttatatcttgagtcctagaacctattagcttacatggtcagcaagattaaatcatggcaactggctatgggtcatgagtatgaggtggttgcattcaaaatcgttcctctagtttagaatgctgtcttctgaaatagtactgtttttttccccccaatttgcaagctttaatagaaacaaagggaagagtgcctaacctcttgtaacaaccccacacagacacatctgggtctattataatggaaacaaatgaaaatgaatgaatggcttccacaaattgaaaaacaggatttttcattagaaataggaaaaggcatgattaagatagtattgtaaaagttcccatgtttattttatttgcaattattcagaacttatatgtgcagttaagaacaattttatttatatgtcttccttgaatatattttttaacattattttgccttcgtaaattctaactaaacttttaaatagattcttctaaagccaagtaaaccgtgttggaaaagtaagatgtatgattttgtgaactgtttttatagttttgatgagtccatttttaccttttaataaatcaggataataattataaatgattattaaaatatcactttaatattaggtcttttcggagaatgtttgctttgtaaattcagatccctctgtgctttggggaaaatgatgatttctctaattttttacatgtgaagtaattctcctgatatggagcccaggaaaaaaatagatatttttgatatttccaggacagaaatagcatattttttaccaagtctatggaaagcaaaactaataggtcatggaatatggatctttggagttgggaatattgattcataggctgtaatttcaaaggaaagataactgcttcagtaatttcatcctccccctcccactcattgaactgtagtatcttagctaatatttcgaagcattttacttctgagttatgctaactggtaaacagaattcacttttaattaatttgacagttgtaaacagatcaaagcatgtttacagtattttaatcaatgattaaatataagacaattctaggcaaaacagaaaatattttataaatcctcatttcttgatttttttcacatatttattcatctaacctcatttgaccaggccatggttttgaatctggagattttttttatggatccaatataccacattctttggtttctatagcacatcaataggaacacatttaacgatggaattttgcaactagaactgagtctttgcaaaagaattcagctcattaaaatatctctgtgagaaacttccttttccagggatgaatagtattatccaattatttgtgtctcttcagactccaattttagagttattcaagtggcttatattgtgagctatataggcagtgtcctctcctcacataactaactaaacaacgatctcttaagaatggactggctggatggggttttatttaggcatttggctttctgggcaagggccaatgatttagtcaattcatacacatgtgtcttttttgggtaaaatcgtgagacttgaaatttttagtgccttgttttctttatgattaatgtgcaatattcattgccctcccctcatcatttaacatatgcattagatggcaaactttatttgtagaaggcctgaactaaatgccattgctgcgtctttgcaaatattctttgtcttatctgaaaactttttcttttaaatgttgaaatacatattgcttattttcttttacccaaaccagtgttcattacttcactgaagttgtactctgttcttaagcatatatgattatctttcatatacagtgtttttaattttgattataatatattcctgtgtgctatttatatattttgtgagtctgtatgtttcccacgtggtagagcatcattaaatgtgtgttatcctttcttcctttttggtaaccagaaagatgctaatattatcagcaaggaagtgattgtccttaaacaattaaacataataacttgagatgtcctctcaccttttaaggagatagaccttaccttttgtttccttcaatatgattaactacaggcatttcaggtatctgctgagcagaataaaggactacctttttatgtgaagtagttgtctaaagatcagaaataattgctttgtacattagccttcatgacctgcttgacctagttaattaattttttgctagcataataataatagatatatattggagatatgtttcatcattaagtatctaattgacctctaattttaagagctgcaccttccatttattgtcttttggaaatggctggagcacccaacagaaaaaccgaggacagtcagaagctgacttcaatcccacatagtccctctgtcttaggttgtatttctttgttatttgtatttatcattgatgaacaaaatgcaattacagtgctcctgttttggctctggcaaatagtcgttttttgtatgttattgatcaggtaatggatctccttccaactttctctgaaaaggactaaataaacctattgaaagtaatttgatacttctattggcactgtacatacatatgatactcccttgcaaagaaatgaggggtataaacaaagcttagaagtctaggattagcccctagcttccgcaagcccttaaaatattttgtaattctatcttcaatcatgaattagccaggaaaaacagaccctctttcctctctctatgtctctgctgtatgctgtttttaattgcccacaggcaggctgttgtgatctttggatgtttaaaaccaagataaaaatgcaaatctaattatttcttttatgtaatctaattaactttaaaagtcatgatagatgctctatagtctgcttcaaacattttaataataaagtttctgggttataaagaataggtaaagctgctataattatgactagcaagggctataacagcaaaaattacaaattcttgttgtgaactaaaactacactttagtttttccacattagtcatgctagactgtttgttatagttggaatgcgcctaaaaataagagaactgaccagatcccaagagctactcaatggaatcagctagttacctgtttttccgagtgtggccttatggcaaagatctcattcagcataccaaaacctgaaggtgaatctcaaagctttttctgcgctatccttcagttacttcagtctctacacaacccgcccttctctatctgtgcttatctcttagactgcactgtactccccagctctctcccaaaccagtggtactaaaaattcagggaaaccagtctctgcttctttccggaattaaagtggaagagtgccttacctcttcagaggcagagtgaggtgcagcagagtgggccagatgttccaggtgaggccagcatgtgacattacataatactgaataggaaaatgtctctcttctattttttttttccttgatccttctcattatattgagggctcagtttaatgttagtctttaatactcttctagtatgtactaaaatcagagagagagagagagaatgagagagagagagagagagagagagagatcatcttattctcagagcctttggatgcaatatggcagtcagctggaatttaaataaatttaatgttttcctttacatggttatctggttagcttctatttacggcaggtgattttaattttctatttgaagtataatatgaagtttccttttgaagtgtatatacaccaaaagaaaaagtcaaattaaaatcttaagcaaatagtaattaggtacttggatatgacaaaattatgaagatagttctctaatggaattttggggaacccttgaaagagtactacagtaagagttgtattaaacattccccctctaccctgccagcactttcacagaatgttaaactcgaaaacgtcatcatgattctcattcactggatagagggagaataggtagctatccatgttgaagacaatatagtaagtttatcataagccatactttaaaataaccctgagattatgtttttccaccttttggggaattaaaatgtcctttctatgaagtattggtgataataggtggtatgtgctttctttgtttttcaatagttttatttggtaaaataaaaagttcccaactatatgtaagtctccacttttgcttgtctttgaaattttgctgatctatgatatataaaacctttgggcatgcttaatctagtccaaagcctttagattacacgaggaaactgaggtatagaccagaggcttgtctgagcttaaaaagcaagtattatcagagccacaaggggaacccaggtttcttgatgcctgatggagcactgtttccagtatttcagatcctttctccatttgccctttttgtgacttgaataaatcttactgcacttcagtttcctagtttacaaaatgtgtctaataatacctaacatctaaaatgtcattacattctctttatccttaaatagaaaaaatagaaaatttgccactagactctctctacccttagaactactatagctgtgggtatatacctacaaggcaagagataaaaagaatataattggaatctttttgtagtgcaatgggaggtgtgtatatggctgggtgactcttttggtgtttacatatgaaccttttagacagttaattatactacttcctgagggctttaacgtgatgtgtcactatactgagggtcagacacctttaatattaataacttttttttataactaccttcttcatctgatgaatgtgagcagtgagtgacagcattccatgctagtggttctcaaccttggttgtcccttgtaatcacttggaatcttgttaaaaatactgatgcctatcccaaagatttttatttaattggtcttggatacagtctgagcatggagagtattgaaaagtttatagatgattctagtgggtaatcagaatggaaaaatactgctctatacagggtaatgaagattaaatgattaaaggttaatgctaagttgtttagatttaggttgaatctctctctctctctctctctgtctcatccatccatccatccatccatccatccatccatccatccgtccgtccgtctgtccgtccatccatccatcctgagggttggagtataccttaaatagttcatgatgagttaaaatatacttttcattttggtcatagctgttttacttactagctagaaagcttttaatggaccatggtttaaacaatttaaataaatttagttagtttttctaataacttgatttttatttgtctatgaggatattggcaagctaaaattgtatagacatcagaaggtctgtgtcttttggagaaggtgtatgaaaaaaatgaagcacaaaataagacaaaaataagacaaaaaagttagaaaataaaatctcagatgccatttggcttttaactttctaaacagaataaattttaacacaaacatcaacccattttttaaaagtgttttttaaaactttaagacatagaaaaaatcttgcatcctgacatatgtaaggaatgtatgactctgaatctacttttaagtaaatttgtacatataaacaaaagatgtagagaataagatgtgttatttcggaatgtatgtaatttaaaaattttatagaaccagtgcaggtattggagataaataaattagggtttaaataacaattccactacctgttagcgctgtagtctgttttgttacttagtagctgtaagacaagttacttaatgtctctcagcctgtatttcctaattcctaaagataattacaataccttacagtagctttgagataattatataaaacccctagtaattgcttaagcataatacataccactatcattgttgtttttgttcttgtatgactaggtataggaataatttcagagtttctaatagagaaaccttcatgtacatattctacatgtgcacatatacacacatttgtatctatacacacatgcatatttagaacccacaaattagtgatgtgaatatagaataatcaatgtgtaggtactataatcaattattatcaccatgatagtacagaggaaaataaagtgcaacaattttccctggctgccaaacgagagcttttcaactgtcagtgagtgagagtaaggtttgtcaggcactcagaaatggttgaccaagtattagagcagcttggagattgtataaaagagagcataacattttattttcaaaaaacagagtcaaattctcacctctcagactaaaatgggctttgctattagattcatagtgcttgtgaagttagaaggatggtaaatgaacctttccaatttattttatagctttttaaagacagttgaaattatgtgttttagctgcacaaaatgcaaaagtccttcttgctgaaaataaagttgttcatataaatcttatgtatgccatctcctgtaagtcaagcatttgcctagcttttgtgaattatgtctatacttagaatttaagaagttaaacagtatgcataccagacttgagagatgggaaataaaaattgatatactatgtgacacttgatatagcacagggaaatatcttttaaatgctgaggggatgtactgacataaccatttttaattcacatatagtaacttcccactcaaagttattaatgttagagtcatggatttttacttgtacaaaataacagcaaataaatgatgcaaaaagtatagtatctcctgtaagaagctgaattacttttatccactgctcaatccattaagaaaatgttaaagttgtaatatcaaacaatgaaagttaaggaattcatagtcagaattaagggttgagtacatcctcagtcaggttgtagtctggactctaacttttgatacatgtatgtttcagtggaaaatttttctcttaaaatgtctgcagttgagttttctgcagtggcttcataacttcaactgtgtttaaaatgctataaaataaattggaaaggttcatttaccatccttctaacttcacaagcactatggatctaatagcaaagcccatttttgtctgagaggtgagaatttgactctccactcatggacaaaaaaaaaaaaaaaagaaacaaaggaaaggttaaaaattaactgggtgtgatggcatgcatctgtagtcctagctacttgggaggctgaggtagggggatctcttgagcacaggagttttaggctgcattgagctatgatcactgcactccatcctgggctatggagaaagactctgtctctaaatcaataatgaaataaaataaataaataatataaaaatttcaacttttttaatatacaaaagccatatatgttagaaatttaagaaaaaactacagaaaaaatgtctttgagtagtaaagttattttgactacttttcttgctctagttttttagttttaaaacttcttttctagtaatttttcttttccagtggtttctaaataaaaaatttactagtagtttttcttgtctagtagtttctttaaaaaaaacaaacacttttctagtagtttaaaaaaaaaaaacaaaaaaactaaaaacccaaagcaagaaaattaatacaaataattttaatactcaaagacatttgccctaaacatcatatacttaaccacttgatatatagagtgtattacaaatttgggtctctactgtcagtcttactgagaaggaaagatactgcattgatatggaggccaaggtcctaaacatagagcttaggttacttcttctatggaatcaacaatggtctgaaacctccctcccaaaagaaaccccccaggagcttagaagttccaaggatatactccagttctaagatggagtccatgagagggccctctcaaagaccagtggacctaacaatccacattggaactaaatcagaaaactttaacagaaaagcagttgtgtggatgccaacttcaagagcctaacttcacttttctatgtaggcatagatcttgccaatgctttcagtctgttttactgatatctatacatgtttctaactcttatcctcccaaccagcttttcctggaacacagtaaattccatagacttatacgtcctctttggctctgggaggccacaatttcaagcccaggaaaaaaaaggcatggagatgataactgatctactctcagcagaagttgttcttctcactcttatgtaaagtctgcagccccaacttggagacgaaatagtattagaacaatgacagaaagatgattagattagttgacagaaagtagcctagacttgaactcaggatgtctatgcctgcctagtctttgttctgctagcaactacctgtcctgcagcaaatgacttttctgccttttcattttccatatatttgaagaaggattattgttcaggattatcactgaagttccttgcaactctggcctctgattctagatgacaggaattgactctgttactttaaaaaaggagagcagtagatagtcgtgcttaggaagctcaaaggcaaacgtcaagtttggccatagcataagacgtgtcctcttaggaggatgtttccatttcaaaccattgaagggtctggaatgatgagatcaaattcaggtttcctttgtgaagtattgtgatggcttgtaatgcttgccccatgaaataatggctgtaggtgatttttagaaaaatacatttaagaagagggcctgtaaaggcctgctttcagggaacagcaaacacatttctgcagccagtgacaaactcctgacattacggctatataatggaaagagtgacacaaacttaattttagtgttgcaagtgaaatatcataatttttggaaacaaatccttatagctttgctaaggtattaattgcaggaaattactgcatatccttttgaagtattatgtcagtggcatatatagcacataacaccttttcctagtctctcttgttttcaccccaagtgttgcattttcatttgaaaagagatgtgttaagtggctagaactttgtctaactgtgggggtggtgttgagtgtcgggggtgggttcaggcagtctcaaaacacttaagctgtgaagggagacttctcagttatgctttctagaactgggtctcctgcttgaaggataatgttgatatggatattcttttggccatttcttcatttctaacttgttaagtttcaatttctagtcccagtacattttccaactacaatttattgggtcgcaggatttaaaaatgagagaatttcatttctgatgtgtggtagagcttaatacggttttctgatttcctcccattttgtttgtagtaaatagggtaattactcactaaaattctaatatctttcagggctttagggatgaatccaaaacagaaccatataatgttttatttaagcaaatccatgttcttattaggcagttcaccttaatgtcattttttataaataaactttgttttattttttcaagggttatttaatttattttgttgtactaccacatcctgacatctgcctttgctaaggcctgcaggatgtgatttgtggtttaaaatttaaaaaaagatattatttaaaaatgataaatcatttgggatacaaaaatatgaatgtaaaagagtctgatgtactctatttcattttttaataaccagacacgtgtaccgttctgtgtttgtacagagcatttgtgccagttatgcatctgattaatatctaactagatatgaatgaaaccaattgtggagaaactactacaatactggcttcttggactgtttatgttccccattaattgcagggctttaccatataaccattgggtagatctggttttacttatcaaatccagatctgctttttctccccctgctgagtagggtgaagtttcttgtgctaccagcttcttattattttgggggttcacagcatcttgaggattgaagctgttagccctggaactcccagtgtttctgtggaaagattatctttgctagagtaactccttggtaagtttgctctacatgcaacacaatcaggttaaacagcattttacttttaaatgaagtatttattttaataattatggacaaatactcatttctccacagaccttccttactctactttggataagggtaggtctaaactggagggcttttaaagtctggtctttaatcttttcccatagccttcatgtttttccgtagggggagaaataggtgggaaatgaagcaggggacagtataggattgatttgtacataaatgataatgtggtcttttttcaaaagagcaccatattttctttggaaatgagaatgcacaaagggtattttagttgggcttataagaagaccatttcccttgcctagttaaaagagctgttacgcagtagttttaatctccaccttgacagaacatgtgcccctgtgttccaaagggacaaaatgtattgaatttgaagaggacagcaagtccgtcccattcgggtccttaaccatttcagttttgccagggctagcttccaaagctaggtttaaaagcagctgggagatgtaccgtcactttacaaaatgagtattctaattattaaccataaaatgtgggaaagatatctggcaagaaatctaaaaagataagcttcttcttttatgccgactggggacattctcattatgtttttgactaaaaaagtcattgcattctgaaaaaaatgaatgatagaaaggttttttttttttaagactaagtagctgtgaagttgtataagaaagagaaaacactttgaaaagtggttagagctctcatgtattaagcacagcagatgaaatgatttattgggttttatacacattctgtaaaggttttatacacattgctaacagaatgagtagcagcctctgggagctgaacaggccccagggactagtctttgttcctctggtcttgacaggcatgtgtctctgttaaatgagggcttaatttctctcatatgtgaacaatttcgaagcccaacaaagacagccaggactggagctatttaaaagaaccaacacaggaggaagcattcttgaagaaaggggatgctaaaaggctaattactcacgatggcttagcaactattttattttttccctaagcaaggtttattaacatgaatctaccactttttttttttttacataaacacacattaaaattacaagggtgtattttaattttttgtgaaatagccatttgctgatctctgttcattgaaaagaggtgcccccatcagcacctcatggtggtgtatatcatggaatattaattcactagagggggaggggaaagactaatatactttggatcttttctgtctcaagtggaaggaatttaaactatttactaagcagcatccttggcaacactgtgaatcctttctttagacagtaattgcttaaaatatggagggaatctttatttcaacattttctgtgagtgtttggctatgattctcttagtttgtttcaatttctagaagaaaatccatctgttaaaggggtatatgtaagaggttacaggtatgtctctactttcatcactcatattttttaaaaaagactttgtaaacttgatcattttccctttcaacttgtattataatcctcattagccatttatcttaatttttgactactgatatttaaatttctgtacttttcctttcaagcttagtaacttcttttagcaggtaatgatctataaacatttaaatgtatttgtgctgcaacttttatatcatattatattataatgataggactacttaaatgcaaacaataattgtcttctgattcatctattttgtatggttttaaagcaggatgtaccagttatttgaattatttacaaagaagcattatctataaatgaagggctcttccaactctaaacttctatgttttaagaataaaaatggatctgaaataaaataaatgacataattttagagtgtttacaataaatttgttaaaaattccccaaatattacaagcttacattttgactttttaatatagaaaaattaggaaatcctcaaatatggaagtttggcacaaagtcagacacgcaacagtatcatttcatgggaacaacattctgctgtacatggtagctgtgtgtggcatgatagaaaaggcgaagaaattgttgatttgatttgtaatgatggacagctgaccgataacttggttacatctcattatcaaagtggtctttgtgaatgaatcagatttttcatatgctattagcagttgtagcaaaaaaaccataatttccacctgcatgcctatttctactagagtataaataacttctgaaagtgtctgagccttgtgtacagccatgatgacctaactctgaaggatatggggtggtatctttacttagaatgtgaaatggtgactatgtgacttggagaagaaaaaagtaaaagccatttcctcccaggtgcttttccttagcatccttgctttctacccagaaatatagtggtttccataagaaagtatattttagtagaaataacatgttccaaaccacttaaactaatgtctaagctatatttgttccagaattgaagtgcatctgaatatgagaaacagtagggacttcagaaatgagagtcacaaaaaattctaggacccttatttatgacatgaattaattaggttaagcttgctttccctttattatttaagatgttatccaaaatgaacaatatcatttctttataaacctgcctctatttttatacttcctgttcttataaatgacgtcatcactccaaatcatatttgatacctatttttcctttatgcatcatagaattgccaattctagtctaatttacctcaaaatacctcttatcacattagattcatgttatgtcatgccaaaactgctgaaacagtctgaaattgtctcccccactttagtttgtccctttccaatttatatgtctattccagaatattcttcctaaagtcaacttctcattgtgtttcttttctgttgagatatctccaatggtgtcctattgactatgattttgatttgacaaactttcattaagcagttgttatgtttctgatactcctttggtctttgaggatatggcaatctacaaaaatccctgctctgctaagtttacattccactgtggggaggcaggcattaaatagataagtaaaattactgcacactacaagaactgctatggagaaaaagcagggaaggaggaaagggaatgggaaagaggtactgcaattttaaatagggtgtgtgggtacgtacttaagggagaaggtagtatttaagaaaagacccacaggaatggaagaagcaagtcatacgcatatcaggagaaagatccttccagggcagaggaaacagcagagcatgctagctgatgggggcttgctagctttagctaaggagcatcagggacagtatggctggccagggtaggggtaattttagtgagtgaacgaaagagaaaagagtaggaaatgagaacacagatgatcttttacatcgttgtaaggactttagtcttcaaatgggatgggagaccattggaaagaacggcgtgccctgacttgggttttgacaggctcattctggctactgtgttgcaattagacgaaagggtggaagggtagaaggagggagaccatgagaaggcattttaggcaaagtgttggtaacttggaccaggttaatagtgagaagtcaattctagatatattgtaagagcaaagccaacgagatttagagtgaaaaggagagaggaaagtcaaggattttgacctaagcaactagaaaaatggagttgacattcactgagattctgccattcactggaaaagctgtaagaagaacagatatcagcagtgagtgagggtctggaagttggagggagaatatcaaaagtttagtgttgaactattttgttgaaatacttattagagatccgtttggagatattgagtaagcagtaggacatacatgactggaattcagaggacagataaggactgaaaatgtacatttgagagtgtcaatgtatgcgtagttttcaaagttcagtgtttttagcctaatgttcatggccctccataacatggttcctactctcagtaaagctatttctagctttactttgtactagttaataaacttgtctgtgtataattttcagaacacgactcatactttcacatctccaaatcagttgtcataatgttttttctacttggaatacccattttcctcacatttatctttgtctttttaaagcctagaatttcattatggcctggttccatgaagccttcactgatcaccaccactgctttcccctgactcagtcaaggttatctctttctcttctgagcttccacagtcccttgggccttttaaatagcacatactacatgcattgtattttagctgttcattcatgtcttgtccctcctacaagatcatagcctacctgaagtctgaggtcgtattcatttttgtattcccaacatgcctagtttgatactttgcacatgggagatgttgttgaattgaatagttgaaatcttaaatcattttaatggacaaagaaggaaacattcaaagttatttttttcttccattatatgttcatcacttattgaagcaaatattgcagaagcacacatatgaaacaaattgtactaaaatatttagttaatagtgctatgaattaaacagaatgttggaaacttaggatttggtttgatcttttgactgaggtaaagtctatccaattcggagatgtttgctgattaatcagctgttaaattcctacttgattaaagttggtaatgtgggtgaaataaacagtccatagttggttcattaaaaaaaaatcacttaaattcctttttgggttgactctgatcttaattaaaatgcctagaaagagcaaattggactgtatacatttatactacagtttcattgtccttcatttctatctctaaattagtgaataatttgtatttctaagaagggctcaaatacatagctaatattgagtacttattatatactagggacttttataagtcctttacaaatattacctccttaaatgctatgtatttagtcttttaggatttttttttttttttgagacagagtcttgctctgttgcccaggctgtagtgcagtggcgccatcttggctcactgcaacctccacctcccaggttcaagcgattctcatgtctcagcctcctgagtagctgagattacaggcacatgccaccatgcctggctaatttttgtacttttagtagagacagggtttcaccatgttggccaggctggtcttgaactcctgacctcaagtgatctgcccgccttggcctcccaaagtgctgggattacaggtgtgagccactgcacctggcctaggattcgtcatttagcattactgaactttactatagtttttgaaaatcagtaatgctatgtagttccttggggaaacttcagaaaggaatagtaagggatatagtttttacagccttagtttactgactggtatctttttaagcattttaacttctataattcttatgtatattatgttaaaataagaaatcttgagagttgtagatttagttcaattctttaaacatttaagtcccttagttcttagctaaaggtaccaaggtgaaaaagataatgtctctgcctttaagaaactcacagtttagtaagagagacatttgagcaataatcatactaagtaaaatgatttttaatttagtaaaattttaatgagctttgttgactgatcatagattaagtattttagctctatcaacatcaagggtatatcccttaaatgcgatggtagtatttatggctttcaagttagtatttgtggcttgcaaataccaagtagaacagtaacacttgctggaactcctgagaaaatatactgaaaatcattcctctaaaagtagatttttaaagaactgctttactatttgttattttagtaatcaacaataggaaaagctgcagttagcaatatagataaaaagaaccagttaatttcacagccttaaagcatatctgctctgtgtaagaagactgaaattagctatatgaagtcaatcaatacaggaaatatgagacatactgttgtctctctgtggactttcttttttctttctttctttctttttttttttttttgataccaagtctcgctctgttgctcaggctggagtgcagtggtgcgatctcggctcaccacctttcgcctcccaggttcaagcgattctcctgccttagcctcccaagtagctgggattacaggtgcacaccactacccctggctaatttcttttgtagtttagtagagacggggttttactatgttggccaggctggtctcaacccctgacctcgtgatccgcccgcctcggcctcccaaattgctgggattacaggcgtgagccactgtgcccggccctctccatgaactttcaaaggagccagagagacaaaatgtccatgtattttaaaatgcgagaacagttgcagaacatcttgaaaacaagtacaaaaataattattataaactgaacagttaaatactgaagatccactgattctgatggaggaaagtgaaatggtagacaagcaagacactactttacatacattttatttgctttaaattgaacatggtatcatacagcacttttaagcaaggtatagttaatgtctatttaagaatttctaggctgggcatggtggctcacccctgtaatcctaacactgtggaaagtgaaggcaggaagattgcttgagcccaggagtttgagaccagcctgggcaacatagtgagaccttcatctctacaaaaaggaattaaaattacccaagcatggtggtgctactgggtaggctgaggtgggatcacttgagcctgggagtttgaagctgcagtgagccaaaatcatgccacagctctccaaactgggtgacagagcgagaccttgcctcaaaaacaaaacaaaacaaaacacctgaaaaagaatttctagaggctcagctcttctttgtctcgcaacctgtctctttcagaaataaagggccttaagtagaactagccctggttccatggttgagttacaaatatacctgtcaatgccccaacttttcatagaagacaaaatacataccacatgattaactgcagttcacaggaaccacagaggaagatagtgcaggttgctatcttgcttggattgccattccttttgggttaggcttagaagccaaaatcatgtagcgtcaaggccccagaagaatgctttaacctataacttaggactttagtcaagatttattagcaagatttgtttttcactttaagggagagatacttttcatcctcaaacttgatttggaaagtatgtgtgggaagagtttgttttcttcccctccagattttgtttttcctgagatattggctgagaaagcctggtttagaccattgtttgatgaatgctacctaaccttctaaaaagttaggattatacattctatcagtagttgcaatcctttccacatgtttattttctataaatataattttgttatccctttaaataaattcatttataaaaggcatagtaaaaatctataggatcttaaactgttttgggtgaaagggaccttgagaacttagatcactgactttcaacttttttcagaccaaccacagtaagaagttcatttcacatcactacccaatacatgcatatagcacatacatacacatgtgtgtataacagaaacagaaatttcattaaatgagacttgtcttacaacatgtaatgttctctgtatgagatattttctttttatcttccttttttattttctcttccctcctcttttttcatactcttatctgatccttttatttttcttttcccctttttacactatctttccactctttttcattcttttttattatcttgtctctctcatctttattcaccctactctcttctttctttaatctcattctacccatatactccttcctctttcttctcacttttcttccttttttctttcccttttttcattttccctattctattctatttttaaaaagccaactctgtccttctaattggtcacaaccacaaagcgtggaaaatactgactcagttcaaaccactcattttacacttaagaaaaccaaggctgttaaagatggactatcatctgtttaaggggtatattaggctattcttgaattgatataaataaatactcgagactgggtaatttataaagaaaaggctcatggttctgcaggctgtacagaaagcaaggcactgggcatctgcttggctttttatgaagcctcaggaaacttacaatcatgacggaagtcaaaggtggagctggcaactcacatgggaaagcaggagcaagagagtgtgagggggagatgccacacacttttaaatgaccagatttcatgagaactcactattgtgaagccagcaccaagccacgtgggatccacacccatgatccaaacacctctcaccaggccctgcctccaacgttgggaattataattcaacatgagatttgggtggggacaaatatccaaactatatcaagggtattgcttgtccaagatcacatgttatgtcctgaaaacatctagttactgacagagttggttttgtaatatcggactttaaaggtcttcaaagaaataaaaatattctgacctatatggatatcttaatattctgaacctaattctttctgttttgaaggatataagatgcagctagttgtaattataagcaagaatgtctgggtaaaaatttggaaatttccacagatttctagtttgatgaagttgctatccatcatcctgaacttaaagttttgatttttccaagcaaggaacaattattacagttgtatgtaaaaattgaaagacttgaaaactctattatatataattgcacagaatccttgcattaaatttaggacaaggaagaaacagaatagtctattaatttattttcatagttccaggaagggataagagagtgaggaccataaacaaccagaatctgataaaatatccttaactttagcctcctgccatgagttagtatgttggaacagtgaatggcagagaaacacactaaggcaaggccaagtgagaacaagaaaatgtctgcaattcactttttcagtaagtactaccatgtgccaggttctagttatgtcaaaggacagaagaaaaaagaaaaatgagaaaacttagcaccaggagtgttatatggtagagatccgacttgactatgaggagcagctttttgtctcagcaggagttttgtggcgctagtaaaggaggtcagcatttttcctttgtcctgcttttgtctgttcagaatcccactctttgtgcccttttcagaatgtgcattggatgtgatttttgttgttgtaatttggtttccattactactttaaataaacttgacataatatttggattaggggaacagctactagagcctattagctactaaaataattcttatgtctaagactatatatatatatatacaagactatatatatgactttatacataatcttaaacataagacatatatatctgatatatatatatatatatcaaattcattgtcaaatcttaagtgttacagtcctcacacaatccaagaataaagagaaaataaagaaataggtgtactaatgttgtgctggagccaactcacactggctcataagaaccaactgtgtgtatcttttcccaacttcttgtccagtgacatcatgtttataggttgaaatcaaccatggtggattgaaatcaaccatttacaccatggaaactggcaaatgctccatatcaccctcccccactttttttttgaaagctgatttaccagcattcaactgggtgtgataaagtacagaaacattaaaaagctaagcaatcaaatatttaaatcattgattcttgaactaaagtggctgcatgttatttaactagtatcatcggttttggatcaagagtttaaaactttcttgtagtttttttgagaatttggaattaattgaagaattttaaaaagagagctcagttccaaaaatgttttagtaacttagaaatattttaaagtcattcatggtcagaaataattagccccctgggctcactgtgctgcttttgtaggcttcaggaaagaagaaaaatttagaagtctgaacagaatctagtttaagaaaatgaaacattcttaaattacattttatcctcaatccataatttctgacagtgtattttctgtgttctttgacaggcttatagactactctgctttaacataaaggattattattttttcaccttcatgttaaaaaccacattagcctccaccccgtaaagtaattttacaacacttagcataatgccacaaactggtatttaagataagtcattatggtatatatgggcatgtgttatccagacacatcactaaggatgcacttgcttcccagccacagaaatactgtaaaacatacagcttccatctgtcagctcctgtagtttgcctgagctgcagagagccacttaaccccaggtcatatccttcccaggctctcccatttgagtgaaggacatggatgtgaagtttgggcctttcaggtttgaaattagacactgacttcagggcttcctgctgagttggatgaagtattcttaggccaatactatagttcaatttcttcctctgcccaatcttgtcttcttctctttcctgtttacaagtgttgttccctagtaaatatcttgtaccttaaaccgtaaacctatcttgtagcttttagagaaccccatctgcagcagccttgtacgttacattaatgcaatatgttagtattatgctaaggcaattttatcaggtcttgccaataccattgaggcctgcatttctggtatgttagtcccctttccgagtttcccaccccatgactttgtctacggcagaactgttatgaaaaaatctgctttagaaattttgctccatgttttagtacttgtcctccaaattctgccactttacatacatttggtaataatgaagtttcacctacctaatgttctgttgcattaagtagatttttataggtagaaacagacttatcaaaagtctgattgttctgcaagccaataaatgtcaatagaatggagactattttattagtaaatgtgtatgttacaaactttattacattttaaatttaacccaaaattcccctggtcaaaaatttaaaagattccaaagttgtgtgcatagttattaggttactaaaatctgtaggtatatattttagattttatattactcagaatactgcataaaggtctttttaccttattttttctatcagttcacaagttcacatcatctaatatttctctgtcaaattacctactgatactataaggccaaataaaaatattaaagggaggaaacaaagtattttttaaaaccaaacaccaatttattttcacgtaactgttttggagagctgtatgaaaatgttgagaaataaggtaggtagaaaagataagaaatataagaaacagtaatatttatcctaaagtcttgaatcctcaaatgaactgatctttagcgttctcatgctagtgttaatttgtgtctaagttagaggaggggataggaaaagaggatttaaacacagctgggagcattaagtcattttggataaggaattaatattagataattttggctaacagcagaaaaactaataaacagtttgatgatagtattctcttaaaagtgtttatttctgtagtatcattggtagatatgatttaggtataaggtgagcttattgggactatttgcattgtctttctcctgcaaagaaaggagatggaaaatggtgaaaataataatttcaaagtctggctctgctatctatttggcatgtgatcttggatgaatcatttaacctttgtgagacttttctgtaaaaagataacaaacacacagatacacacacacacacacacacacacacacacacctgtaacttcaagcacataggactaatgcaagaattattagagttaatgtgtagagaaatactttggcaaatataaattgaaaaagtgtgtagtcataataataatgatgagtcagttcacatagagcaaaattttatatcaattcccatatcacattcaccaagatcttttttctgaattcctaaaagaacacccaggaaagccacaagcagataagaggaatttttttattactcctggaagccttgcctacaatttcttcattttgcctgggtgccccctctccacacatattcatgtgcatacacatttagtcatcatttgtgttaccaataatatgaagaaacaggacatttatcatatgatttttatatataaattacagttgagataaagataagttgactcttgggagatgtgggaaaagaaatctattaatgagattcactaattgttgttgttgcattttggcatcagtttcattttgaacagaagagaacaagttgtacctgggagtcataccctacgaaagccacaagaacataatatatacaccaaggagtatgatggcttttggaaatactagctttgagaaggtacagaaattggaaggaactaaggggggatttgagaggagctggtggcacagtgtctagatgcattgaaagtatccaagaatgaagagatgtgtttaatttcagcatagagattaactcaacaatttttgaattgaatgagtttaataaagttttcttattaaatttctactagtctttgggtactatgctggaaacaagaataaaaaaagaaagataaattacttatctttggaagctcacagtctagtaaatggcaacaatataatgtgctaagtgttatggtagatatattcactgactgccatagaagtgcagaggaagagcatttaatcccaattgatagagtaagggaggcttgctcaaagaagtgacatttgatatgaatctgaattttgaagtaggagaaggaatgtgaaccaggatggaaggtgtccaggcagagagaagagtctgaacaaagattcatagagatgaagaacattgcatgttagggaactacaaataaattcatttctcagtaaggctggaatgaagtgaacaagtacaagtgtggcaaaatgaagctagagtatagctatgcaccagatattgaaggaccttttatgaccaattaagaacaatagtttaaaggatataagcaagagaatgggatgacatttgcctttcagaaagatcactctgatgagagtgtggagaatatctatttggtatgtgatcttggatgaatcatttaaccaaatgattaaccaaatctgggggacagaacatgtaaatacaggatgataatcaggtttggaggactgggtgaggtgaagggttttatttttgacatgctgaattatccaggtagatatacttactagatgttggatatataggtttgaaacttgtaaattgagtctgagttagaaatacagatattggatattaaagactggataggatttggatattagccccctcaaaagaggaggctaaaagtagagacaaggagaacatttgaggtactattgaagtaatccaaaagggaagaaatgacagaatctcggctaaggaggtataagtaggaatagagatgaggagatgggtttgtgtgatgttgaggaaataaatctatagaattcatgattaattggatttagctaagaagaaatttaagcaaactcccacatttctgcattggttgacagttgacacctctgttcaacaggataggtgtttatttaattacacaaatatttaccaatgataaatcactgctcattatcagtgagcagtgataatacactaaggaacaaaatggacaaagtttgggaagatagagactgtaaacaaatagataaatatcatgtagtgataaattctatgaagaaaaataggttaaggataagtaagaatatagagtgatgatagttacacatttatagagctcagagaggcctccttttgagtaaatgatttgaataaattgaatgcaggagacatggatattagggtaaaaaaaagtattccagggagaaggaacagaattacaaagtatgtgaagtgggagtgtgcttggcatgttttaggtgtagccaggaggccagtaaagatggagtagaaagagcaaggggaagtggtatgtggtgaagtcagagatgtattggtggacagatcatgtaaatacaggatgatgatcaggtttggaggactgggtgagaagaagggttttatttttgacatgctgaattattcaggtagatatacctaccagatgttggatatataagtttgaaacttggaaatggagtctgggttagaaatacagatttaggaatcattatcaggtggataataatgagtttgcctagaaatatgagagtgagaagagggtagagagcagaattttcggaaatactaacatttaaagggtggagtaatagagaaatgggaacatgtgatggagattaagaaggagaggcagtagcaaagggacccacagactgatccatatatgttcagctctggaaggttcaagcatgagatatttattaagcatctataataagcattgcactgtgaatatgagtgcaataggtctcagaatgatgtggtgatagggctcttagaaatcatctatttaaacccaatcattttgtatttgagggaactgtgaccagaaggcaaagtgacatgctctaggccacacagtttcatagtgagagagataggacatcaatctaaatcactggaactgtcccctttacacactgaactcagagaaacaaaaagcatacaagattgggataattttaaagaactttctggaactttggtcttaaagactggatgggatttggatattcagggagaagggaagggcaatatgagagtaaatattaaagtgaagatgtgataacgagcttggagtgtatagcctatgaaaagatgtcctatggtagagtttttattagtgaataagggaaataaatttggaaactttggttagaacaaagattgtagatttgatggcatgggaaagcaatagagactttggaactagttcacctttaataaaagcatgttgtggaagaggaagatacactagactgccactaagtatgtgttaacataatagctaatgattcactatgtactagatactgtaatacatgccttatgtattatattactcaattgacacaataatactgtttgccactgagaaaatggaggcttaacagaggttaaacaacttgcccaaggcatcacaataagtagcctagccaagattctaatctaattaacagaaaacacttatatagtgtttactgtatgttagacactattctaaggctctagatacctcaatccattgaattcttacaatagcccattgaggtaggtaatattattcccttttatagatcacaaaagtgaagcatggagaggttaaataatttgtccaaggtcatacagttaataagtggaagacctcgaattcagacttagtctggctctaggatgtgtgctcttaaccactacactctgctgcctctctttctatgagaatctagagccctggatcctaaccactatgtgatgtatctttcagagcagaggttttgattgaaaaacctgtagactcatttgccaagttgggaatttgaacatagagatagagtggcctgggaaataatttctaaagaaaaagaaaactttttttttttttctgacaatcagtctgacccacactccacagttaagcaaagagggtagttcaaggaccacctacagaaaagaaggagcgatagtcttaaaaccggaaatttaccaggttcacgacttgtaaatgaggaatgcatgaataagaactaaaatatgtgcagcccaaactgccccactacaaatatttgaacactccctgaaggactggttgcccaggaaatgcctggttacaaactcaaggtgcaaatttatcaaggtagatagatgcctgtgtgctagtctgtggttgtttgtacaaagttatacttggggaaatagaaacaggaaactttgatgtgtatattacaataattcttattttgtctttatgtaaagacaaaaagttgcatttttttttgtaagcaaatattaaacggctttaaaaaatcagttagactggttgaatgattcagaagaccactgtacttaatttaattcggagacaggtgattagaaaagatctggctgagggttgaagaggagtcacttaaaaggcaaaatgggagcacaatagagcagaaagaagcatcaatagctgatttctgtaggttccatacaatttaaaataaggagttttaatatggtaaaaagaatactgcacagggataagtggcgtaaaggaaaaattacataaaaaatagatttctgtaatttgtcgcagcatgttaattaggggggttattattctattgtaatgattgttagcaaatgtttcctccatttatttttccctttacactgtccaattgtgcttcttacttttttttcatgtatttacaaactctagttaggatcctgattacggcatagttccttgataatattaagatatgtaaggtatcttcattgttggcctcaggctatctttgctatgacttgcatttgtccaacgtcaaaacataggaaacaggtaataaagcttttggtggtatccagccactgtaatgaagacaggaatgtgatttgagctgggaggaataaattgccatcttacttcacttttatattcctttttattatcaggcagcattacccaaagccatgggttttgttttcagaaaagtagaacttagaattatgcttggtttaggattaattaataagattgtgtggtactctccagagaaaagaagttaaacttcattatatctcaatttggattttttttttatttttgacttttaaaaatgcttagattttcctcagtattttatcaatagtgtgtaagctggaaaacttgagtttgagatcacatatctgtctcactagtctattcacttctgtgggcatttcggcagaagtggcaactggaagttgtaagcatggttttgggcagggagaccagagttcgatggtcattactgccaattatactctgagacacaaagagataggttgagtctgttggaccccagtgggtttcagtcttatgtgttcagttgctcatattgtgcttagtgagtggtatgggtttttattgtattttaggaggtaactggaagagatcttttatttatttgtctaaccagtcctatcagaggtagttaaccctgtttttgataggcttagtaaaacttactctacatatccctgtgcaatactgctttgtaggatgacatatcgccaaacaaatttgggacaactatcagttcacaaattttttccctttcccaaggctgtgactttttttccttaaaaaagtaactctaggccaggtgcagtgactcctgcctgtaatcccaacacttttggaggctgagatgggtggatcacttgaggttaggagtttgagaccagcctggccaacatggtaaaccccatctctactaaaaaatacaaaatacaaaaaattgtctgggcatggtggctcatgcctgtaatcccagcactttgggaggctgaggtgggtggatcacaaggttaagagatagataccaccctggccaacatggtgaaaccttgtctctactaaaaattcaaaaattagctagatgtgatggcacacacctatagtcccagctactggggaggctgaggcaggagaatctcttgaacctgggaggtggaggttgctgtgagccgagatagcgccactgcactcaagcctggcaacagaacaagactccatttcaaacaaacaaacaaaaaattagggcttggtggcacacacctgtaatcccagctactcgggaggctgaggcatgagaatcgcctgggcgatagagtgagaccctgtctcaaaaaaaaaaaaaagtaattctaatatatcatttctgatatctttgagatatcaaagctatttttgagaatgtatgtgagtctctctgtgtgtgtgtctaaaaacatgaagctaggaagtagagggaaatgtaatatctgttagttaattcagtcactattatataacagaatgtgtttatcaagaccatcttggcatggtagttcagatcagtagcctgtattaatggtaaagggtgttctctggctttaattatacatacattccagagaaaatagtaatttgtattttgttttgtttttgtaacttattgatagtccagtgtcaaattccattggtctgttttgggatacctttatatttgtttgtgaagtgagcatctgggtttcagtgatctccagccagatttgggttctccagatactgaacagagctgtctgtgggtggggtcaaacacgcctgtgacttttgaccattgaaaatgaaggaaaacatttgtggtgagaaacaacagcatatgcttgacctccaaagcatacacatctataaatggataaaagtgactatttaaggttgttttaaaaaagaaccactgtgtctacaaagaaagaaaccctaattcaatgtttgaaaaagcaaactgtgtgggtgaaagaacatgtttttgtcaaaaacatctgtggtgttccctatgatgtatttgatcctggtggtaaatcaacaaagttaagtattagagacaaaaattgactttagacaacttattatgtcataaataatattaattcaacccaaagtatttcaaggctgtctttaactgttgttattttgactaattgccagatatacaaaataaagttctcataccaaaattaaggcattgcttgaatttgttatttagcagttgcagttggttatgtatgtgttctttgtaccttcattttaagttttactttagtacagtgtttcctagaggtggtttcctcactgtcaggagataactgccactgggcctaattttatagaactgaatttttcagcttgccatagtttttaatgtaattttactatagtcatgatttatagaccatattgtttgtgtttttgcagatgtaagagattccatatctgattttatgaggattttttctttcccaaatactgaagcaataaattatggggtgaaactctcccaaacaaaatgtaaaatttacaggaacaaataatttgacatgaaattttctctgtggatgaattgggttgatgaaattaacagcaacagaaaaatggtgtctgcagggattgtgtcaaaagaagctaagttatgtcaaagacagtgaatggtatgaactattaggtgatgaattttaatagtgtccaaatgtaaatagtgaattcaaagtattactcagcagctgcaagagcgatcggaaaagctgacatgacaaattcagtcatttcttaatcactttcgttacgcactattgtcagctctgagaggcaaattttcatcctgatttacacccgtaatgctaatacttgaaacctagaacttctcaaaatcgtttgcttgcaaaacaccttttaaatcatcttagatgtttctgtgacccaatgtcattaaaaaaatgtgaaaaatatattgcatatgtcaaagaaaattttccatttcccatttgtatgttataaaagaggtattatttactgtaaaatccaaaagtattaattggctgcctttggtttaaataaaattgattgttaaagcagaaaatagaggataatatgagtcttattctgctgtagcctcccaataaaagaagcagtgacccaactcattagccctttgatttaatatattgacacttgggtacgaataatttcatttagtggcttttgcttcccagggatcaatttaattagttataaaatgtgacttcttgtcaggagctagaagaaatgctgacgttaaataaagtcatacacaatttaaacaataaagctatcgatgcctggttaaaagttaatgatgcaaaaaaatggcttaatagagacaacctcagcagtgaaagtgatgctaggaaaattaagctaagtgggtgaatgaggaatggtgatgttgttgaattgttaaaacaaatctgtggctggtctgatggctggctatgttgtaagtacatcatctttcagcccgagagacagaactagttctagactccttgctcaatattccttcagtgtgagtttcatttgtttataggttttaggatccaggggagggaagaaatcttgtttaggctgcgtggacaagaaaacttcctgaaatcaactccatgtttgagagaaagatgtagaagtgttattcatgaccgtcccatcccaaagtggcttctgtgaagtagtctcatgtgggctctgctagcttgtccagggccatttctatttgtgctaaaatgtttgaaaagaactctgggtttacattttggcctggaagatttgtctccttctgaatagtggttacttataaaagtagttcttcccaacttagagaaatgtaaccttttttacctatgtaattaatgccacctctaactcacttctgtaatcaatattgttattttatgtctctgacagcatccacacactgattttgacactacttgagttatctttgtctccgtatctctagcctcaatatacttatgttacagaatgaatgaactggcctagaattaagtaactagataatctcaatctctaaaatgcttccaaactccctaatttaatcatagattcaaacccaattgtttaattcagtcaaatcaattgctttgggagtggtgtagtcaaaacaaccagttggttgactaaaagatcctggtttctgctggtatgtgtacatgtacccacaattgcctctttttggcattggctgctactgggtcattaacaccagttagctaaataaaagataaccacattttattgtcagacaaaatttgtatctcacttctccagctgttgcctttctaagtcacttgctcattagctaaagatgaagaacatatttaaacttgatgagttttaaaatccttattctagtcaaaggaattgacataagtattctatagctaatttttcaaaaaacaaccaaagaagtgttttcccttttccagttttgtccctagcaggttctgaagtctgtggttgctggacgggaataaaagtgcaatgaactgagctctggaaaggaagatgaaataggaatttatggtctttaatgacctatcagactcctatttccctactttataatgaagcacatattctccctgtgttttcttcctggaatgtactgaaaagggtcaagattaaagatcctgggcaaaagcttactgttttggaaatctgtttattgcatatttttttttctgctggttcagctgccaaggaaattactgtagagcctacagtaggccgtcaaagtgcaatatatctctctaggaaaatcagcaaataacttacctatggtttaacataaaataactgcccttgaaaattgcaataaagcttagaaaccttgaactttcagtgtaatttgtatattaaaaaatgtgtttgggctgaaatgatttggagtttcatttgtcattccatttgtgtagtatacttgcacacattgacaagaaggacacgtggtagttaactttgagaaggggcatttttgagagggagctgacaaactttaaccaacaaaatgactttcagaagtcttgaaggaagaagaaacaacgtggagacaaatgagtatgcttacatagtatttggtaaaactatgtaaaagtacagaagggattattgctgcagttaaaatctgtgccagaaacaagttttccactggagtaaaggttatctttttttttcttcttaatgttgggggaagggcaattaattgaggacaagagggaaattgtgggggactgatgttagataaactattttgtctttgtgttgacattatattggctacagcctacacgagggaatgcctggaaaaaagtaaggagagagaggcattaatattttttagtgtgcgtgggtgcgccagcagtagaggggcccatgttttcttagggctcagatggcaaagctaagcattcagcctacggcaggaaaaaagtgccttttttgttttctgactgcagagtccaggcattcccaggggaacacaatgaatggcccattttgtccaacacggtttcatagacatagatttcttgttttttcataattattcttgcccgtcattgggtgtgcacatgacatttgagcgtgttttaaagtcttaacacactcatgtgcctgcaataaagttactcataacaatcccggctttctccagacaacagagcagggtctgttgttttcacaagtcacagcagctgggaggcaattgtgaagacaacagcttaatctaactggaaaatacaggaagaagagagtatacactaaatttcctcccatattattcaaacaatgaagaataaaaaaaggctatgggtggtctaactcaacaactgattggcagaatatactttaaattgccttagactgttgtctttaaatgttaagaatctacaaagttaaattcactgtatttgttaatcagctaaaaggcaggctcaggcaatggtacacaactacatttcaatggctataaaaattattacagatcgcttgttttttatagtttgttaactagcatttggtgtatgtataaaaagatgctttgacaaagtagttatgaagcaatggttaatctcctttgaaaggtgtgtgaaagaccaagaggttcatggtaattcacatcttcatgccaggctgtatttctggtgtacagtcattagtaagttttaaatttcacactgaataacagaatttaggaagaggagagtaactagaagatttaaatctgacctggaacatcagagtagtaaactggctgtgctcttcagggtgctgaagtaaacaaagttatttttattccatgtggatgggaagagataagaaatgtgagaagtacaataaaaaggaaatttcggtgttcatttaagtttgcatttggggagaaaggattaagcaggacatggggaaggaagtgacataaaaagcaaaaatgatagtgctatgcttaactatttcaaactccaccatccttttccctttaaggaaacattttgtgaaagaacttcttatggactcttttatttttttttattattatactttaagttctagggtacatgtgcacaacgtgcaggtttgttacatatgtatacatgtgccatgttggtgtgccgcacccattaactcgtcatttagcattaggtatatctcctaatgctatccttccctcctcccccaccccacaacaggccccagtgtgtgatgttccccttcctgtgtccaagtgttctcattgttcaattcccacctatgagtgagaacatgcagtgtttggtttgttgtccttgcgatagtttgctgagagtgatagtttccagcttcatccatgtccctcaaaggacatgaattcatccttttttatggctgcatagtattccatgctgtatatgtgccacattttcttaatccagtctatgattgttggacatttgggttggttccaagtctttgctattgtgaatagtgccacaatgaacatacgtgtgcatgtgtctttatagcagcatgatttataatcctttgggtatatacccagtaatgggatggctgggtcaaatggtatttctagttctggatccttgaggaatcgccgcactgtcttccacaatggtcgaactagtttacagtcccaccaacagtgtaaaagctttcctatttctccacatcctctctagcacctgttgtttcctgactttttaatgatcaccgttctaactggtgtgagatggtatctcactgtggctttgatttgcatttctctgatggccagtgatgatgagcattttttcatgtgtctgttggctgcataaaagtcttcttttgagaagtgtctgttcatatcctttgcccactttttgatggggttgtttgtttttttcttgtaaatttgtttgagttctttgtagattctggatattagccctttgtcagataagtagattgcaaaaattttctcccattctgtaggttgcctgttcactctgatgatagtttcttttgctgtgcagaagctctttagtttaattagatcccatttgtcaattttgacttctgttgccattgcttttggtgttttagccatgaagtccttgcccatgcctatgtcctgaatggtattgcctaggttttcttctagggtttttatggttttaggtctaacatttaagtctttgatccattttgaattaatttttgtataaggtgtaaggaagggatccagtttcagctttctacatatggctagccagttttcccagcaccatttattaaatagggaatcctttccccatttcttgtttttgtcaggtttgtcaaagatcagatagttgtagatgtgtggtattatttctgagggctctgttctgttccattggtctatatctctgttttggtagtggtaccatgctgttttggttactgtagccttgtagtatagtttgaagtcaggtagcgtgatgcctccagctttgttcttttggcttaggattgacttggcaatgtgggctcttttttggttccatatgaactttaaagtagttttttccaattctgtgaagaaaggcattggtagcttgatgggagtggcattgaatctataaattaccttggacagtatggccattttcacgatattgattcttcctacccatgagcgtggaatgttcttccatttgtttgtgtcctcttttattttgttgagcagtaatttgtagttctccttgaagaggtccttcacatcccttgtaagttggattcctaggtattttattctctttgaagcaattgtgaatgggagttcactcatgatttggttctctgtttgtctgttgttggtgtatgagaatgcttgtgatttttgtacattgattttgtatcctgagactttgctgaagttgcttatcagcttaaggagattttgggctgagacgatggggttttctaaatatacaatcaggtcatctacaaacagacacaatttgacttcctcttttcctaattgaataccctttatttctttctcctgcctgattgccctggccagaacttccaacattgtgttgaataggagtggtgagagagggcatccctgtcttgtgccagttttcaaagggaatgcttccagtttttgcccattcagtattatattggctgtgggtttgtcataaatagctcttattattttgagatatgtcccatcaatacctaatttattgagagtttttagcatgaagggctgttgaattttgtcaaaggccttttctgcatctattgagataatcatgtggtttttgtctttggttctgtttatatgctggattccgtttattgatttgcgcatgttgaaccagcccttgcatcccaggggtgaagcccacttgatcatggtggataaggtttttgatgtgctaatggattcggtttgccagtattttattgaggatttttgcattgatgttcatcagggatattggtcgaaaattctctttttttgttgtgtctctgccaggctttggtatcaggatgatgctggcctcataaaatgagttagggaggatttcctctttttctattgattggaataatttcagaaggaatggtaccagctcctccttgtacctctggtagaattcagctgtgaatccgtctggtcctggactttttttgattggtaggctattaattattgcctcaatttcagagcctgttattggtctattcagggattcaacttcttctgggtttagtcttgggagggtgtatgtgtcgaggaatttatccatttcttctagattttctagtttatttgcatagagttgttgataatattctctgatggtagtttgtatttctgtgggattggtggtgatatcccctttatcattttttattgcgtctatttgattcttctctcttttcttctttattagtcttgctagcgttctatcaattttgttgatcttttcaaaaaaccagctgctggattcattgattttttgaagggtcttttgtgtctctatctctttcagttctgctctgatcttagttatttcttgccttctgctagcttttgaatgtgtttgctcttgcttccaacacatttaattgtgatgttagggtgtccattttagatctttcctgctttctcttgtgggcatttagtgctataaatttccctctacacactgctttaaatgtgtcccagagattctggtatgttgtgtctttgttctcattggtttcaaagaacatctttatttctgccttcatttccttatgtacccagcagtcattcaggagcaggttgttcagtttccatgtagttgagtggttttgagtgagtttcttaatcttgagttctagtttgattgcactgtggtctgagagacagtttattataatttctgttcttttacatttgctgcggagtgctttacttccaactatgtggtcaattgtggaataagtgtggtgtggtgctgagaagaatattattctgttgatttggggtggagagttctgtatatgtctattaggtccgcctggtgcagagctgagttcaattcctggatatccttgttaactttctgtctcattggtctgtctaatgttgacagtggggtgttaaagtttcccattattattgtgtgggagtctaagtctctttgtaggtctctaaggacttgctttatgaatctgggtgctcctgtattgggtgcatatgtatttaggatacttagctcttcgtgttgaattattccctttaccattatgtaatggccttctttgtctcttttgatctttgttggtttaaagtctgttttatcagagactaggattgcaacccctgcctttttttgttttccatttgcttggtagatcttcctccatccctttattttgagcctatgtgtgtctctgcacgtgaaatgggtctcctgaatacagcacgctgatgggtcttgactctatatccaatttgccaatctgtgtcttttaattggagcttttagcccatttacatttaaggttaatattcttatgtgtgaatttgatcctgtcattatgatgttagctggttattttgctcgttagttgatgcagtttcttcctagccttgatgatctttacaatttggcatgtttttgcagtggctggtaccagttgttcctttccatgtttagtgcttccttcaggagctcttttagggcaggcctggtggtgacaaaatctctcagcatttgcttctctgtaaaggattttatttctccttcacttatgaagcttagtttggctggatatggaattctgggttgaaaattcttttctttaagaatgttgaatattggcccccactctattctggcttgtagagtttctgctgagagatccgctgttagtctgatgggtttccctttgtgggtaacccgacctttctctctggctgcccttaacattttttccttcattttaacttcggtgaatctgacaattatgtgtcttggagttgctcttctcgaggagtatctttgtggtgttctctgtatttcctgaatttgaatgttggcctgccttgctaggttggggatattctcctggatgatatcctgcagagtgttttccaacttggttccattctccccatcactttcaggtataccaatcagacgtagatttgctcttttcacatagtcccatatttcttggtggctttgttcatttctttttattcttttttctctaaacttctcttttcccttcatttcattcatttgatcttccatcactgataccctttattcccgttgatcgaattggctacttaagcttgggcattcgtcacgtagttctcatgccatggtttcagctccctcaggtcatttaaggacttctctacactggttattctagttagccattcgtctaatattttttcaaggtttttagcttctttgtgatgggttcgaatttcctcctttagctcagagaagtttgatcatctgaagcctttttctctgaactcgtcaaagtcattctctgtccagctttgttctgttgctggtgaggagctgtgttcctttggagcaggagaggtgctctgatttttagaattttcagcttttctgctctgtttttcccccatctttgtggttttatctacctttggtctttgatgatggtgaggtacagatggggttttagtgtggatgtcctttctgtttgttagttttccttctaacagtcaggaccctcagctgcagatctgttggagtttgctggaggtccactccagaccctatttgcctgggtatcagcagtggaggctgcagaacaacaaatatagctgaacagcaaatgttgctgcctgatcgttcctctggaagctttgtctcagaggggtgcctggccatgtgaggtgtcaggctgcccctactgggggtgcctcccagttaggctactcgggggtcagggatccacttgaggaggcagtctgtccattgtcagatctcaaactccatgctgggagaaccactactctcttcaaagctgtcggacagggacatttaagtctgcagaggtttctgctgccttttgttcagctctgccctgcctccagaggtggagtctacagaggcaggcaggcctccttgacctgcggtgggctcctcccagttcgagcttcctggccactttgtttaccaactcaaggctcagcaatggcaggcacccctcccccagcctcactgccatcttgcagtttgatctcagactgctgtgctagcaattagtgaggttccgtgggtgtgggaccctctgagccaggcgccgaatataatctcctggtgtgccgtttgctaagaccattggaaaatggtgggagtgacccgattttccaggtgctgtctgtcatagcttcccttggctaggaaagggaattccctgaccccttgcgcttttcgggtgaggtgatgccttgccatgctttggctcacgctcggtgagctgcacccagtgtcctgcacccactgtccgacaagccccagtgagatgaacctggtacctcagttggaaatgcagaaatcacccgtcttctgcgttgctcatgctgggagctgtacactggagctgttcctatttggccatcttggaactgccgttggttctattaatattttattgggaaagatgaagcagtcagggctgggaacttgtctcatcgcctttttaggcactcagatacctgaatacctgtaatctcatttcacttccattcttcgcttggaaatactacatcctcatgatagtgtttttaaatggaaatctaatggagaaatccaaatgctgcttggaaccataggatgacctttactatttcaccactcatatatactgagcatgagcatgaagagatttttttttttttttgaggtgaagtcttgctcttgcctaggctagagtgcagcagtgcaatcttggctcactgcaactcctgcccaccaggttcaagtgattctcctgtctcagcttcccatgtagctgggattacaggcacctgccatgacacccagctgatttgtggtctgcatgccttggcctcccaaagtgtgagccactgtgcccagctaagagatattttttattctggttattatgcacctattctgatcatccttaaattgaaaagaaacccactttttgttatattatttccactttacttacacatttctccactattcatggcagaacataacactgaaggcccaatagctaggttcctgggtgtcaagatctattgcaaatgtgaattattctgttgtctttgctggtattttaccctcatagtcctcaacacttaggtttaattagtcatgtacatgcctttatttttgtgcttacctttaaagtttaacaatttaacaatagttacgatttatggtcttatctgccagacactgaaccacattatgttcattttctttaatattcataaatatgcaatgatatggattttatcaccatttgacaagtgaggaagctaaggttatcatctaattagttggagccaggtatcaaacttaggtctctgtggcttcaaaacttgtgatctttctactatacaatataatgctgcctcccagttaaatgaaagggaggaaacagtagtgtctaattaaaaggaagtaggaacataaaacatattagggcttttcttccacttttcctcctccctttctcattcagttgaaatgccattaagcaggaccaattgtggaaggctcctgagttgggtggcagctcagtggggtttgaagatcctattaggaaagtggcttctcatagtggtggcttaacaagagttgggtcctattggatgaaggttgtcaagtggggaagtggctcaggaggatgaggagattggttggtaatatgtaagagatagagagaaaataaatatacatatgtatgtatgtgtgcatgtatgtgtgtgtgcatatacacatataaatatacacacacacatatacttatttttcctatctcccgtatgtcatattatatgtatatatatatatatatatataatatatgagccaggttttttacttttagaaaagagttacaaatatgaaatgaaggaaaataagaataaactctgtggtattatattggaattagaagtatcaaagtgactttgtggttttatatatatatgtccatatctatatagagagaagtataaatgtgtgtgaatatgtataatacatctaaatatatttcttagctctgtgaggcagcttagaagcaaaatacactccaatagtaatatcaacacatcacaccgagatcttggcttctaaaaactgtgcttctgaatctggtctggggaagggaaaatacaagataagtctggaatattttattattccagaaagtgaggaggtgcttaaagaattttaagagcataacaaaaggataaagcatccagcttgaaggggtaacctgtgtccatatatggtgcaatttaggcatcaaaaatgataataatggatttatcctattgaatagaacatggattcatgaactgacctgatgtatttatgaataaatgaaaaaataaaagagaagagaaagctcttccttaatgtgccaactaataaatatacaagacattacagaaagaaagtcacgtggcaaccatcatagtaataatgaattctgacaagaaacatgaagggatgctaaaactattgggtgagagctggataaagaacgatacattcacatagtctcaaagtatctccccacacagtacttaggaaaatgtagaaaaaaagtgtaacacgatagtggaaaaaacctggtagatactatattactcaggcgacattaacagtgatgggataaattgatgtatattacctgatgggatatattgagaagagcacagcatcgcttctggtgatatgtctgacaaaaatgtattacctgaatctaatcataaggaaacattaggaaaaaagtttaggtacagtctacaaaataactgtcttgaaatctccaaaaccaacccaaatgtccaaaaatgatagactggattaagaaaatgtggcacatatacaccgtgtaatactatgcagccataaaaaatgatgagttcatgtcctttgtagggacaaggatgaaactggaaaccatcattctcagcaaactatcgcaaggacaaaaaaccaaacaccgcatgttctcactcataggtgggaattgaacaatgagaacacatggacacaggaaggggaacatcacactctggggactgttgtggggtgggaggaggggggagggatagcattaggagatatacctaatgctaaatgacgagttaatgggtgcagcacaccaacatggcacatgtatacatatgtaataaacctgcacattgtgcacatgtaccctaaaacttaaagtataataataataaaataaaaaaaataaaaaaataaaaacaacaacaaaaaaatttttaaggttataaagatcagggaagaactgagtatttcagattggaggatactaagaaggcatgatgacacatgattctggattggatcttattgctataaaggatatattgggacagttataacaaaagtgaaggcatcagaatcacttgattttttgaatcctggctctttttagaaactctttagacttaacctttatgaggcactgtttatttagactgtaaaggggcaaaatgatgccccactgaatagtgttgttgtatagattagttaagtatggaactatctagcacttattttttggaatgtagacattaaatatgtaattcattaagcttctttattcctagaagcaattctatatgtagaactatggcaaagccccaaattttaaaaattcctggtttactggtaggtatctatagtaaatgtgaagaaatatgtatatatttgcatagtgtgtaattgtattagtctcttctcatgctgctatgaagacatacctgagactgggtaatttataaagaaaagagttttaattgactcacagttttgcatggctggggaaggccttaggaaacttacaatcatggcagaaggcacatcttcacagggtggcaggagagagaatgagtgcccagcgaagggggaagctccttataaaaccatcagatctcctgagaactaactcactatcaccagaacaggatggggggaactgcccccagcattcaattatctccacctggtccctctcatggcacgtagggattataggaactacaattcaggatgagatttgggtggggacacagccaaaccatatcagacattttgtcagataatttccatatcttttagatagttttcaccttgattccttaaggtaagcagtagaaatattattatctcattgatagatgagaaaattgatacctactggctcaaaagtaagatactagaagaaccattatctcagcctcgtcttttgacatctaaacaatggactttttattatacagtgtgtcttactctcttacaacccacatgctatttatttatttattttattttatttatttattggagagagagtcttactctgttgcccaggctagagtgcagtggtgtgatctcagctcactgcaacctccgcctcctgggctcaagcgattcttgtgcctcagcatcccgagtagctgagactacaggcgcatgccaccatgtccagctaattttttgtattttagtagagaccatgttgcccagggtgatttcaaactcctgagctcagccagtctgtccacctcagcctcccaaagtgctaggattacaggcatgagccactgctcccggcccccacatgctctttagataaacacaaacactttgtacaattctttaatgttacagaaagttcagattagattaatgttgcaacacaaaaattatttttatcttccaaggcacatattatttattttaagtatttgtgagtttttcttagacagtgtagaagtcagagcacaaagctcatcacttgtaacatgatactgaatgctctgcttcatttttcttacaacaggcaaagtaaaaccagaatcacaaatacatgttgatgaaaattggtttatggtttggagagactatatacttatgtaggcatacctcagggacatttcaggttctgttccagaccaccacaataaagtggatttcataataaaatgagttgcatgaattttttggtttcccaatgcatataaaagttatgttggctgggtttggtggcttacaccgataattccagcactgtaggaggctgaggcaggaggattgcttgagcctaggagtttgagatcagcctgggcaagatggcaagactatatttctacaataaattttttaaaaaattagttgggtgtgaccatatctctacaaaaaaattttcaaaaattaggcatgtgcttatattcccagctacttgggaggttgagacatgaagataccttgagcctaggagtttgaggtggcagtgagctatgattccaccactgaactccagcctgggtgacgaagtgagaccttgtctcttaaaaaaaagttacactatactgtggtctattaagtgtgcaattgcattatgtcaaaaaaaaaaaaaaaaaaaccacacacacacaatgtacataccttaatccaaaaatactatattgctaaaaaatgctaatgatcttgggaggccgaggcgggtggatgacgaggtcaggagatcgagaccatcctggccaacatggtgaaaccccgtctctactaaaatacaaaaaaattagctgggcgtgttggtgcgcaactgtagtcccagctacttgggaggctgaggcaggggaatttcttgaacctgggaggtgaaggttgcagtgagctgagattgtgccactgcactgcagccttgcgacacagcaagtctctacctcaaaaaaaaatgctaatgatcatttgagccttcagcaagtcataatcttttttactggtggagggtcttggctgctggctggtcagggtggtggttgttaaagattgggtagctgtagcagtttctaaaaataagacaaccatgaaagtgctgcatcaattgactctttcacgaaagatttctctgcagcatgtaatgctatttgataacgttttacccacagtagaacatctttcaatcctctcaaagccttacatgctttatcaactaagtttatgtaatattctaaaccttgtgtggttatttcaacaatgttcataccattttcactcagtagattatctctcaagaaatcagcttctttgctcacctataaggcgcaacttcacatccattaaggttttattataagactgaaataattcagtcacatcttcaggctccacttctaattctagttctcttactgtttccaccatatctgcaactattttctctgctgaagtcttgaacccctcaaaatcatcccatgagggttggaatcaacttccaaattcctgttcatgttgatattttgatctcccaagaatcacagatgtttttaatgtcatctagaatggcaaatccagaaggttttcaatttattttgcctagatttgtctgaggaatcattatgtatgaaagctatagccttatgaaatatatttctgaagtaatgttatgaaagttgaaattattccttgatccatggactgcaaaatgagtgttgggttagcaggcatgaaaacaacattaatctccatgtgtatctccatcagagttcttgggtgatctgcattgttaatgagcagtaatattttgaaaggaatctttttttttctgagcagtaggtctcaacagtaggcttaaatattcagtaaaccatgctgtaaacagatatgttttcatccaggctttgttcttccacttatagagcacaggcaaggtaaatttaagataattcttatggaccctaggattttcagaatggtaaatgagcattggcttcaacttaaagtcactagctgcattagcccctcccaagagagtcagcctgtcctttgaagtgttgaagccaggcattgacttcttctctctagtggtgaaagttctagatgtgtgactcttcctttcacttgaacacttagaggccattgtagagttattaattggcctaatttcaatattgttgtctcagggaatagggaagcctaaggaaagggagagagacaggggaacagctggtcagtggtgcagcctgaacgcatgcaatatttactctcttgcactggtgtggtttatggtgtcccaaaacaactacaatagtaacaacaaagatcactgatcacagatcactacaacagatataataataagaaagaattggaaatattgcgagaattaccaaaaggtaacacaaagaaacaaagtgagcacatactgttggaaaaatgacattggtaggcttgcttgaccagggttgccacaaaccttcaatttgtaaaaacacattacctgtgaagtgcaataaagcaaagaacaataacatgaggtatacctgtacatactaattcaaactatacacaccttcttcaagaagttttcaaggctttccttacttccctctcatttcccctttcctcactactctcactcctacaacgtggcccagggccccagtcttgaaaatctcagcatcattaggcaatatggaacaatggttaaaagtaggattctggaggcagactgcctggattcaaatcctggaccatccccttaatagctgcctgatcttgaggcaagctattaagcttttctgtgcctcatctgtaaaatggggaaaataacagtatttacctcatgaagatgttttgagaattaaatgtgttaatgcatgtaaagcacttaaaaaagtgcctggcacattgccaatactatatcagtgtagcctttattactataatcattattatcatcaccaatgtaattaccatagtggcttaaaactgtataatagttgggcgtggtggctcacgcctgtaattccagcactttgggagtccaaggcaggcagatcatgaggtcaggagttcgggaccagcctgaccaacatggtgaaaccctgtctctactaaatgcaaaaattagctgggcatggtggagggcgcctgtcatcccagctactcatgaggctgaggcaggagaatcgcttgaacctgggaggcagaggttgcaatgagccaagatcacaccattgcactccagcctgggcaacagagcgagactccgtctcaaaacaaacaaaacaaaacaaaacaaaacaaaacaaaacaaaacctgtataataatatgataatgttgtaatgtcataagtctcaaattagattagtatctgtccttaggtctttggtctctcccttttatttttgtgcctcataagataattcagaacctttcctgttaccctcccttagatattttagtgaaaatattggtatttttgtcttgagagattcttctctaatcagtgctcttatggaaaatctttataggatagcatagacccagctctgttcctcagagttttttctcctacctacactcacaaacatggtttgatgattctcaagtcacatacacctaccaccccaaaatgtattccttgaaaagcaactgtagcagtggggtagggccaccctttccttcagggcataatgaatctctagagaaggagaacatgaagaatacatatccacagacaccatgattctgaaacactctccaaaaaggggtgtgccccatttgtttaggagagcactgaactattttgaaataattacatttaaattcactggataatgtccactatgtactaagcactttacatcattttctctttgcaataccctcttttaataagaaaaccaaaattaggccatttttttttatgttactggggtctgagttagatcttttaacatcaattctcttattccagggcctattttaccatatcacaactgtctctgaatgaataatatactttttactgttcaatgaaataaaactataaaagaaggattgaaatctgcctactcttgctttgttcatctgtatgctagtgttatgccattctgagagatcagcttgtgagatgaaggaataggctgctcaggtttgcagtacttggtggattttgtgtgtccttgtggtataaaattgcttttcattcaaagctaaaaacaggtaggacaaggctgtcattgtgacaagttagtgtaaatggaacaaaaaaaaaaaaaaaaggtaacccgatagctcaagagggatatagaatgagcccagacttcccaatggaaccccttttctgtttaacgctaaagtagaatttccctttttctaaagatgatgttaataagtacccacctttacccacaaaagagaaagaaaaacctttatcatgccaatgtcttcctagatacaaagataagcttgcttgctttctttctttctttctttctttctttctttctttctttctttctttctttctttctttctttcttttttctttctttctttctttctttctttctttctttctttcttttttctttctttctttctttctttctttctttctttctttctttctttctttctttctttcttttttctttccttccttccttccttccttccttccttccttccttccttccttccttccttccttccttccttctttctttctttcttccttcctttctttctttctttttttttgagaagcagctgtaaaattttggaaattataggctgtagatataggcttgaattctggctctgccacttgcttggtatagtcttaggtaaattacataattttccttaatcacagtcatctcatatataaaatgggaaagtaatgaagtaatgcctgctttataggacaatttttttcctgctttatggatatataaatgacacacaataattcatccattttaagtgtttgatgaattctggaagttgtatagagccatatgtaacttttagtcccgaagagtttccttgtgtcctctgcagttagcatcccccattgaaaccctgggcctattcattgatatcactatatttttgccttttctaagacttcatataaattgaatcatacaataaatagtcttttctgttagatgtatttcatttattcttatatttcttagatttttcatgttattgggtatgtcaatattttgttactttacattgctaagtagtattccatagaatagacttactgtaatttgtttagccttcctccagttaatggtcattgagttgatttcagctattggcttttaggagtactattgcaagtctatgcagacatatgttttcatttttcttgtgtagctaagagtggattaattgtagggctttatggaaattgtgtttctttaagaaatttctgtaaaagaaagtggctatatcatttttaattccaaccagcaatgtatgaaagttctagttgttctgcatcctcaccaacacttggcattattaatcctttaaatttttaccattctagtggattttaggggtatcttgttgtggttttgattttcatttcttgggtgatgggtgatgttgagcatcctgtcatatacttattggccactcatatattttcttttgtgaattgtctattcaactctttgattccagttttataaatttatttgacttattattgagttgtaccagtttttcttaattattctgaatacaagtcctttatttttttttctttttggcagatattttctcttactttgtggcttagctttttaaccatgtcttctaaagagcaaagtttacgattttaatgacacccattctaccattttttttttctgttctggtttacgcttttgttctgtttttaaatgtttgcctaatacaatgtcacaaagattttctcttatgttttcttctagacgtttttcagttttaggtcttatggttaggttttagtgcattttgagttaaattttgtgtataagataagagtccagacatctttttcctttacagatacctatttatagcaaagcctattttaaagattatcatcttctcactgaattatcttgacatcattatgaaaatcaattgaccaaataggtgtggatctacctctggactctgtattctggtccactgatttatatgtccatccttaaaccaataccatcctaatacctaaatggcattatagtaagttttgacatcttactatacttaactaattttatttgtttaattgttttgactattttttttcatatcaaatttagaatcagcttcatactatattcaaaatgtcctgctggaattttgatttgagttgtgttgaatctataaatcagtttgaggagacttgctgtcttaacactattgagtctttcattccatgaatgttgtatgtctccatttattttagtgtttcaaaattttcctttgtaattttcaaaaaattgtatatatttatggtgtatgatatgctattttgatatgcataaacatagtgaaattactaacacagttaagcaaattaacctacccatcaccttttatagttaccttttttgggtggtaagaacacttacactctactctcttagcaaattttcagtgtacaatacaatattaactatagtcctcatgttgtacattatccttataatgtttcatagcttttagtgtagaggtcttataaactttggttaaaattttctattttatttttatgctaatgtaaatggagttataatttttttctaattgtttattactagtatatagaaagccaatttatttttgttattggccttttatgttgtgactgcttaatttactattagttctggccactttaaaaaaattcttaagattttctatgattatgattatattttttgcagataaaataaatgtcacttctttccacactgtgtgcattttatttatttccctttgcttattggactgatgaggaaatccagtacaatattgattagaagtggtgagagtagacattattgcctattttgtctgatcttaggtagaaagcaaggatcctttcactattattgattatgatattagctgtaggtgtttcaaatatacttttaatcagattgaggaagcttccttctatttaaatttgctgaaagttatttttttaaatcatgaataagtgttaaattttttcaagtgttactctgcacctattgaaatgaccttatgtttttgctcctttattctcttattatgatgaattatattgattgattttcaaagttgaaaccaaccttgcgttcccacaataaacctcacttggtcatgatgtcttatcctttttacatactgttacattctatttagtctgctcacttgtatgctttttaaaactagtaccttaacccttgggaaaataattcaatttatattttgttaaaagctatctttgtaaagctctgtatattttgaggaatatgagtggagaagttactattttcacattaaaaaagaataatagaagattttaatgtatgtcacagcatataaagttgtgatgggaagtgggaaaaaaaagaggaagagaggcaattatcagaaaataaaattttgtatcaattttgccagaagtgagatttgctttcatcctctttacatgatgtaggtttatgtttaagaaaacatatttaggctaaagttgaggacagaaagagggtatgtttgtatttaagttttaccttaaaaaagagataaagatggacaggtggggtggctcatgcctgtaatcccagcactttgggaggccaaggtgggcagatcacctgaggtcgggagttcgagaccagcctgaccaacatggagaaaccccatctctactaaaaaaaaaaaaaaaaaaaaaatgccaggcatggcgttgcatgcctataatcccagctactcaggaggctgagacaggagaatcacttgaatctgggaggtggaggttgcggtgagccgagattgcgctattgcactcctgcctgggcaacaagagcgaaactctgtctaaaaataaataaataaataaaaaagataaagaaaactgggaaataaaaatgaaaattcctgaacttggaattcgcatatctagtcaccaggttatgtcaccatcggcaagtcacactatccctatgtgcctcaagtatttcctctgtcaaatgtagtagttaggcctaagctgtattctgggcagggaaggagaaggcatatatatatatttcagaaaaagctcactagagcttctttccaggttagagtcaccagattacatagtctctaaatcatttctgtccctgaaaatctgattttgtgagataagtaaactggatactaaagaccaactttagtttggtcgttcttaagttttgtgaccttggcaagtcacttctcttttggccttacttttattataagccatttatctggcatttatgtttaaaattaaggtattggaaaattggctttctaaaactattgcagttctaaaagtctgtgattctaaagctagctaaatacatgaatattatacatatgtgtatatgtcaaacatggcaaagaacttactgtagtgagacaaataatcattacatttttatgtgaatgtattcagcacccttaagcattatgaaaaatataaaccaaagtccacattgttaaacctagttctaatttttaatgggaaatgtatattttctcttgaacatatgttgaaatgctagatttgtatagtatttgctctcaacttgtaatacaaaaatctaagacttctatatgcttttctaggatgtagttttctttgttatttgcagtctgttgttagaaagcttcaagggatataggacattaaagcaccacatctttaactagctgggacataatacatgatttgagttcccaatattttctaacagtaaggtttgtttattaaagaaaccacatgctgtgactgaatcagtctaatagaagccaagtttgaacttgaacattcaaatgtatgtccatatattttgggcatatatcatacataatgatgtggggtctagacatctttctgggtttgtttatgtctgttatggattcccctcattatccatgctgtttgagggagaccccatggattcagcttgtttattacacactttctatattttaagactaactcagagttccaagtggcatatatgttccaacttggaatattattttctcactttccagttttatgatgatgattaaggaaaaataaaataagattttagggaataatgacatgtttgagagtggctaacaataatcattttgaccatgtttcaaatacagttttataatctttatgtttattataccattcttcctaacatttttgacaagtttgagttatagcatctgttttcttatttttaaatcacattgtgtaccatctgttcttttgttatatttgagcataatttttagaatttaatagatgtaggtaaagactttaaccttcagtattactaattttacagttatgtatacacagtatattcagaatgctagaggtgagtaagtatacatgaagaatagattttgagtgcaaaaacaacaaaaatcaatttctagttaatattattaacttggagcaagtaattcatgatcacttgactagcagccttcgttgttgttgttaaaaatctctcccattaatatttattttataaaattaggtatttctatgtataacttcttaattttaaagaaactactattcatattctttgagttacaaagctattttttcatcaagtgaaataaagaaatcaaataacatgataagaatttgcaataaatattgaaagaggttggattgtcatcagaatttatcattatgggtattttttgagggggtgatatagcacttgctataaatattcatcatgttcttaaatctagagatattccgtgattaggtgattttatgcctgtttatgctggcaggaacaaaagaactttaaaaacagaaaacataaacataattgaaccactcacttaaaagagaaattggaatagatgttttccaggggagaacatgctttctgtataaaaagggctagtgtaacaagaagtcatctattcttgatttctttagacagttagagctttgtgccttgtctagtttctgtgttttaagagcttgttctgtgtagcagaaataatacaataaatgggtttaaccacatttgtctcagctagacagtctgctttgtcagagattgctggtacaacataaacaaattatgtgtttgtagtgcttttcaatgaaagcctatctaacagagctgagattgtgtttcagcagctgtagatttaatctcctacctgtcagttaaaacaggcatttcctgagccagataaggactggttgtagagcagggaagtagtcacagctggacaaagacctattgttattggctgataatttctatgtagattcaactccttattctactgtggaaactacagttgtagtgcagtattaaaggagctagcccagccttttaaaatgttaaatcaaagagaatcaaaactggattttgtgtcattcatttgggggaactgtcatgtggaactaaaaaaaagtctatagatttgatcatcacagttttagatcattgtggatgttatactagggccatggaaaatgcctgttcacagatctgtaactacattcttgggagttcaagttgtaatataagctacccaaagccaaaaatttaaatctgtggattgatgcttggccatgtgactcacatatcatgggtattgtgactacaagtgctgaatattctagaaaggaacagacctaatgttaaatatatgttctgtaataaccatgtgaatgcttctacacttcttctttccttgtatcctaatttccaataggaaaaatacagttattactgtaactattggagaattggagagtagagaataatggcaattagttaaataacttcactcaaataaactttccttccttccttccttccttccttccttccttccttccttccttccttccttccttccttccttccttccttccttccttcctatgatttctttaagaacatgtgaaagtttcaatgtatacatttcccattttgaattctgagtatttctgtctcttgacctgagtgaaccaccatccttccacttctctttgggcttgagtttgtattctttttcagctgtgattgcactgagttattgattgtattgggttgctgcttattagtcctaaacaatgttattggcttgttgttctttgtaacagcaggagtatcatgagaagtgaattactgcagtactggactataccttggaaatccccattttatttcacaaagatgacattagtctcaactccccctaactgaaaaagacaagttttatttaaccagtgtttgagccagtttgtatatatcgatctttgtacttttatgatctttatgaacagtttatttttttccatagaaaatttgttaggtaacttgaattattttaaatattcctatacttcctacacagagactgaactaagaatttacatttttagtttttgtcagtaagctgctctgatgcctaaaatttcattgaaatttcattgaaatgttatttgatataacatttggggaaaagaatcacagtaatgtatcagtatccaaatagattataatatcctagactcttctcccctataggaattaatgagtacaagtatttgaaaatgatgtgcttctatcttatatggaatcactagaaagatcatattttagtcagtcaatcaatgaatgaatcaatcagatactctttgacatatttggaggcaccatcctagtagcatactaagcttctacttgcaagatgttttccttctacttgagcggagaggatatataagatggaaataggccaccattacccccattttgggtctactgaggtgttttctaaactggtcccattatccccattttgggcctactgaggtattttctaaacttgtctctctgcgttcattcttgccctattatagtcagttttcctcatggcaaccagagtgatctttctaaacttaaataggtctcatggtaatactcccttttaaaacccttcagtgactttccatcacactaagaatacaattccgattttcttactgtgctctacaaggccctaaataacctgatctccacctgtctttctagcctttcccctaccactctctatgctcattctgctctgacctttgcactcacatgccctctgcctgagttgcttttctctcttctagctctgtgcaacatttcctcaggtcgtttaaccctgtgtgatgttatctcttcagagacgctttccttggccatccctatccaagatagtcctctgtaccttctacctactacctccaactttctgcctttcattcttcatactctatctagtttcctttaaaactcctattatcaacttacatttattatatctgtatgtatttgttcatgtgtatatgtgtatacacacatgtacatacacacatacaaatgtacatatatatatgtatttttgtatgttgtctgtcttctcttagaaatgatggtagggaatattgtcttctactgtattcccaatgcctacaatagtgtcaggtcttaaaagaaacatttgtttaataaatgaattaatgtatccacatgggaaaaccattaaataattcaacacaatatgtgcagtgcaaatattgacagagggaaatttatgtttggggaattttcatggaagagtttaatttgggctgaaccttgaaagattggtcaggtttgggaaggcaaagaagagaggaaagatcattccatatggtgaaaatgtggtaagaacaaagacttagaaactattgaaagcaaatggagaaacatcatggtacaatgtagtaggcaaagaggagtcaggggtatgttaagagcatcttgtggagaggcagcctaggctagggagtatggaccttaccttctttaacagcgacatctcttttttgtatctaagttatttattatgaaaatggcactaaataaaagtataaaattaaattgctttttaaaaatcagcatgttagcttatccttatagtcatcttcagcgtcaccttgttcattaaagggagatagcaggtgtaggagtatgtgtgtgtgtgtaatgcacatgctgggagtggaggtcaggggttgcaggttatgctccaaaatgacattactgtgcatgtcattagctttgtactctaaaatgacgagactgtgataaagattgaaaacctgaagactacttgacttgggattatagttattgtttatgcctttccttggtatctagtttttataaatattgccttactttatctccctgccccccaatcacatgtacaggtactgtctctcactgatacttccaaggagggacaatttgccatggctgagccccagctgtcaatagcttagacatcttatttacgtcctggttagagttgccacactatgtttctcaggccttcttgcttgtgatgaaactgcttctgctctccatgatagctgatgcttaaatgcttttctgacattcattcattattgcataatgagctcacagtgatataacaatttttaaaaatattattactttggtaaactgtattcttggctctttgggtgagaattatcatttctatcagtaaggattataattgatgatgatgaaatattaaagaagcttagaggcatctctaaatgatactatagaggaatttcaacatgtactaggagtactcagccattaaaaaatcttgaaattaataaagtcaatttttatattttcttaccaactggtgaactttaaagttagaccacagcagggccaaaagaaaagatcactataaggaaatatgtttggactagatttgtactattgcctccattgaagaactgtaaatgatgaatggactttgacttgattcagcagattaaaaaaccatcagaattgttatggcttagtttttaaataacatagaatacaagttcttgaattcatttatatagcaaatatttgttgagcccctactctgtgcaaagtcttttacagagcccttgagagatagaaagtccttgcctttaagttacttgtgcataattttaacaaggcctatagtttaagatgtaaacctgcatttctggatgaggaatttaataatggaactctggtcattgctaacagaataaggttgcataaaatacttcagaggtgaaagccagattgccttcattgtgggtcaaaagtttatgaacggtttatatctgaatttggttgttacaaagaaaggaatgccatattattcacaaatattaccatatttaaatggcatttatacaaaatttgaaaaaaataatttttatcttggcaaaacactttgatcattgtgtatttaatggggtttccatttaggaatgacaatcattagtctctaatatgtttcatacttctctggaaataagacagggtggaataggaaacattcatcttcactagtctttggaaatatctaaagtaattgactagctcagtcttctgtgatggcctggtgaccactaactgtgactatttgcataatagtcaactcttcacttctgtagtgataactgtttgtatcttattaaaattaagactgttttagttctcttgacttttccagaagttgcaaaaattgagatttgctgttctgccttaaccaaacaaatgcacacatggggataacaatatgctgagtttatgcagattttacagcacgaatctgaataaaatacccactaatagatccttaaggagtaataaacacacatgaattttccttagttgcactttaaagtgattttaacatactactagaccttaacaataatatttaattgacaagattatgcatttgtatggattgaaaaggtagtagatatctaattccaaatgaatcatacattttacttttgcatagcatgttttattaatttctttatggccaggatattctatttccctcctggtgagagtttcttaaaacatagtaagataatttaaacacatttaattaacatttatcatccattttataaagaaatctgacttatgttttcaaaaatactctcaatttttttctggggtgtagaccatagatagagtagagaaagatacttaatggaatttttgctatactttagttttctttttaagcaaaactttctctgttgaccttattccaaagtaagctgaaaactggataatttgtactaatatgtaagtgagaacaaacctaataccactacctgaaaaaacaaggctatagatgtctttaaggcacttttatatttctactgcccagcacagaaccaggtatagagtgataggttctcactaaatggctgttgaagagttgaattaagacaagcaacactgccttctcttttggagtagcatgtttctcatgagtctaataggcctaaactaactttttatttgtgtaagtattgagctcttcattttatggaataaggggacaaataagtaagagatactaggaattaagattatgttagtgctaaatccatgttcttttctctgaaaattcaatattaaatagaacatgtacaaatgaataagaaataaagtaattacttttgactacatatgatcctagtagattaatgagatatttgtccattttaaaaaatgcaaataaagtgagtacatacagtatgctgagagtatgctcagtatatagagtatgctgagaatataaaaagagatgttaacacaaaggaaaggattggccctttcagggctattaacatttctctcagaatatatacctgaagaagatttttaaaacatgtaccgttgacctgatagagtcattgtgttcttacttacaaagattatttctttcctctgtaactatggaagagagttggaaagtgctagactgtgaagtagattttaaatagttatcttaaagcaccaacccagcaaatgaaactgctttgtttgcgtgttttactcttggtagttgggcaaggacatagtaaaactagtgacaagataaatctttttcgtttattctgtgaataatttaggcattttgtttagcatgttaaataatcaaaattagaaaagagaactcactttctggagctatttttttcttttgctttaaaccaacttttcattgaagtatatttatgcagaaaagtgtgtgtatatatatatatatatatatgtgaagttagctctttattaatgttttaactaaaacatatgactttgaagtcccaatcctgagtttgtaaagggatgcttttaaactataacatcttgagttcgttctactttttaaggagtttacttggccctttaatgagaattttgaagagtgctaggaatagtgtgccaaatcctgggaagacattacattatattagagatggatattaacaatggtggcaaagtgttttgtatcttatcttgatgggacctgagaaaggaaagaggaagagggaagaggagaagttatgagagacagagagagagagagagaggagtgagtgagagagagagagagaagagagagagcaggagggggagtgagagagagagagagaagagagagagcaggagggggagggaagagagagacagaggggaaggagagagagagaaaggggtggggggagagagaataacctgccaataacaaataacaaacaaacaaacaaacagaagcaagcaaagattgatcctcttctgaatgcagttacattgtttgtacaatgtatatccattggatggtggaatacacctgggaagaatggactctgttctcaaatgctctagaaaatgtgtgtcctaaatttgctcttgctaggattctagtattctcctgttgggctagctagattctctagaagcaggatttgatatattacattagctgtagcagccacagatttgctaaataagacaaatgaagagagaacaagattatatcaagatgtatttaaaagtcagttttaagttctcttctggaatgagaatgattacagctcagtactttttgtagttgcattaacaattctaccctatgaaaattggtggtcagaagaccagatctgaggtcctagttggttggctctcagccattgatcagttaatacaaaatacttactgtgtttttaggcctgtgataagagcaacaggatatatagaaatataaatggcacaggccatttgggacagtcaacttacttgctgagagatgatttatgatttgtgaattagtgaacagcaaagaacacagcatagaatttaaggcttctttgagtacttaaggctgtggccaacaaagagaagttcagtatgttgactactgcattacactttctaaggaagggcgaagcagagtattaaaattttggaaagattttaacaaaaaagtttgagactaaaagggtttctgttaaggcatgaatttatcctgtcaagtgagatatttttcctcctaacctccagaattaactataagtccatgtactgtggatttccatgcactttttggcaataagaagacacatttctgaccttgaaggcttttcctttaagttttctggggacttcatttcttttgctttagatggtgcagcttttacagtggtaatactttatgcaaatgagtcagctattctttgcaaaaatgaatatggtcatttcgaaaactgatccccatcccctgtttctgactgcacttcttgcacctctctctcccaccttctctctctcccaagatcactttttctgaactctctattttctctcttttcctccatctctgtcatggtatacacacattggaaacatttctttcaacagtttaagaagctttcttcaattaaatcacataaggaattattttctagagataaagtatttaaaaaccctcatttttgcactgtctttaactcagtaatagacattaatatgcacatgattttcaatacaaatacttatttcccattactaaaaaaagttaaataatcttcatgaaagagaaaatgagccccctgagtgtcactctgtttgcatattagcacatagccaggtctctgccaagttgctctctgactgattgctgcagatgctctttctcaagtattcagagtcatatctttactgcaagtcttcggggacaaacaatagcacctgttcctcacaagatatcaggccagttagcccattcatgtatctttaatgaagctctggggcagatggcaaaaaatggcatcatcaacaacttagcacagagaaaacaaaggggataagtgttgatgcaacaatgctgttttatgaattggaagagacagaacctaagtgtttcacacacatctgctgctgtcttgattctctgaaagatgtgaggaataccctagcaattaaaatttctgggcatgtagcctatttgatcaagaatatgttccccaccctctccaaaagggaaacactttggttagggattgtataagtttagaattaatggacagttgtgctttggggtagtttattcctttcatgatacactaagcttcacccgtgatggggtttccggttacttggtagtcattcaaattacatacccagccagatagtgcttactttcaaagcaataaaaataacacagttttcatgcccagcgatatattttggccacatctagttttgctctttgtgctagcaaaatcagttttacttcttcatctataggataattaaagaatctctgaatttgtgtttagggaaagttacactttcaagaaaaaaaagatgctatttgaaattttgataacttcttggaaaagacatgtggagactggtcagtctttgatggagtgaggggagttctattattttttattcttagtaaaatatttttgggggttgctgtttccaatgtgactgcctttcctggcatgtcaccaaatgggaaaacgggatgatgggaaggtagggaaaaggcagtattacattcttcatagtgggatggggcttttctgtatcttcagaattcttcatctgccctaagcactggcactcagtgcagtgactttaatacacaacttccataaaaggaaaatatcctggatgtttgtgtgattcttaggtggccaccaagcctctttccttgtcttttccccttaccttgctcttgctttccatttctgttccacattcaaccgacaatcttttagtaagtataatacatggaaagctatgagagggaaaagttgttgctttaatttatactttctgctaatatcacttgcattgggtcatactgatgagcattctgtagaagatggcatttagaaatattgatagaccctcgttgcctttgcttgttttttgtttgtttgtttgtttttgttttgttttgttttttgagatggagtctcgctctgtcgccaggctggagtgcggtggcatgatctcggctcactgcaacctctgcctcctgggttcaagtgattctcctgcctcagcctcccgagcagctgggactacaggcacaccccaccatgcccagctaatttttgtacttctagtagagacagacaggggtctcaccatgttgaccaggatgatctcaatctcttgacctcttgatccacccggcttggcctcccaaagtgctgggattataggcatgagccaccacgcccagctgcctttgcttgttttaaagacacaattcctttaacacactagggcagccatccccaacctttttggcaccaggtaccagttttatggaagacagtttttgcatggactgggtaggggaggggggatggtttcaggatgaaacttttccaccacagatcatcaagcattagattctcataaggagcatggctaggtccctcgcatacacagttcacaatagagttggtgctcctatgagaatctaatgccacagctgatctgacaggaggcagagctcaggcggtaatacttgcttgcccgctgcttacctcctgctatgtggtccagttcctaacaggccacaacctggtactggtccacagcccaggggttggagacccttgcactaggtaactatgaataagattgttggattgtatcaatgtcagtactctggttgtgttgtcatactgtagttttgcaagatgttatcatttggggaaactggattaaggatccatgtgatctctctgtattctttattacaaccacatgcaaacctacaattatattattatcaccaataatcatattccttatcttagatctgtttttcaaaggatgacttcatgcttaatgtaatatgatattaaaagtatgaactttgaccctgacatatctggacttgagtcctgactctataacttttaattggttatgttacttaacctcacatggttttgtttttctcattaaataagtatagtagtagttagtaccttacagggttttgaggattaaatgagatagagtatgtaaatcacttttccagtgtttgacatatagaaaacaagaaaaaatattagctgctgtggtcatcatcatcattatcatcatcattactattattacttatgtaattagacataagaagaacttttaatcaccttttctcaggctagagtctaactagctactggatattctggcttctctttaataaagggcacttggagtttttacatcattttacttaaaataagtttattgttttacttaaaataagtttaagtcaattttaacccttggaacaaaatgatcattgctaatcaatgtattgtaacaaactacacaattaatgatggtagatactgagatcagtgtgttctgtataaaataaaataaaaatagaaaggaaggaaggaatttattgaaaattgaacagcattcatagtatccaaactccagcaatatgcttttgaaacacaaaattattttcagctggagacttccaggttttctttgccaaaacagtgcaaccagtgatttctcccttttctatcactgaagtccctctgatgtaatggaaaaagccctggacagggtgattagctgttctggactctggatccagcactgtcatgacactgtaaccttaggctcatatcttttaccttctctagccacctgttttcctatgtgtaaattgtgagctttggattagattagtgattctcaaagaatgacccctggaccagcagccccagcttcacctgggaactttttagaaatgtacactgtcagacccctacctcagatctactgattcaaagactcttgacggggagcagggggagagaaggaagcaatctgtgttttaacaagccctgtgaatgactgtgatccacactaaagtttgagatcactgtcctaaattaaattttagcctaaaatttaattagttggactgaattccagagttttctgattcagtaggtatggggtagagtttaagaatttgcttttttaaaaggttcccagatattgctgatgctgctggtctggtaccacactttgagaactactaggttaggtcatttccaagttctattccaactctatgtttctgtcattactcttgctttcacaatgtcctttgacctcctccttatttactttttctctcaagttattgaatagcctctgggctaatatttagtatttgaagtttctaacatagctttctttgcagagtgtgatgaacagaaatgaatttacctaaattcttacagcttatcttaatatgaaacacctacagctctttggcattaaaaatgaacccgagagtttggttagttatctcatgaagatggaaagttacaaaagaagtaatttaaggcactgagattcaagaattaattctggtttctaattgctattgacctttttctgttgtctcatgctgaagagcttgggcgaccaatataaaaataatgttttcattctaagatgctgctaaataaataacaccaaagagccccaaatacatgttcaaatgagcatgtattcccacctcttctttctcatggttttctagatacttgggatgggataatgctctgtgaggcatgttgtctgctaagcatgacaagcctctgcctgccaaactgaattatttagttggctcatgttttctttcttaaagtagagttatgagtaagatcaactattgcttgttttattgcttgttttatcagtaatttgataatttctagtcctgaatatgcaaaccatataagaaaggaacacggatctaacaaggatttactgtgacattgcattacttttatgtcaggtactgtgccacaagagatacttttattgtctatttggtcctcacaataattgtgtaaggtattataattagcttcagtttttacatgaagaaatagactcagaacaattaagtaactgttcaagattacacagtcaagaaaatagcagcatatagatttgagttcagactttttgccaacaaggcctttagaggcacctagtaaatcctcgataaataaatgcatgataaatgaatgaaggaatggctgtaatcacactatcgtattaatgttgacttttaaacaatcatagaattataaagttggaaaggctctaaaggttattatataatcaggtttttcattacgtatttgctttaaacatctctaacatatggtgttatacagcctttctttactggaccagctctagggaaaggatatataccatctctttactcagagtgactatagaatagtttattactagaaagttcttctttgcatttcatttccatgaaatttcttcttttgagcctagttctgccctctgttaaccattcagtcttaatccaatccttcttccatacattattatttcaaatatttgaagataaccttacctcttttatctctcaagctaaatattcaaacatcttcagctacttctcagtaataacaacataataaatgtttgtgaaatgaaagaaataataaataaatataatatccaaactcctcactttctttttctccctttttagagtataagccatctgtgctatattttaggtacatattagggccatatttctggaggcaaatgaaattatttcctttgatgtactcttgcactgaacaattgtaacccataaaaatattgtgttttattttctggcatagaatagtgccctcgtctctgatgtctcaggtttgcatcagggtacaacaagctagagttcaacagcaaacccggtgcttttcttcagggttaaaggcaagacctgggcactgggggatcagctccaatttaagcaggcttagtttgtactctaatgtacgaaacttgggcttacctcagctaaaatggaagaaatagctgctcaaagctagtttctttcatgccccactggcaaggtagtaattgcacaaagacctttttattataagttgattttcttgagaaatgaattcagaaaaatcctgtaaagtgtttattttttgcttgccctttattaacccacatcttagggctttccctagagaaaaactgttggtaaacgaaacctcttagacctacacagaagcattttttgcactgtgtccctggctatgaagggaacagggacaggacaaggcaagtcagtgctaattaaacagggtcattagccagtgtatggaattttgcctaaagagaagatttaggaatttagacagggaagggtttggggttggaagaattactggtaaaggtttgtatcttaaaaaagatataatatagcccttttataccagtgaaaaggctaaataccctgtttgaacttaaagataatttcttttggtatatcttagttttcatctttaaataagaaaagtcctgtattcaacctataaaactgtgccctgaaagccaggacaaaaccttcctgtcatgctatcctggaatccgggcagcatgcatagagtaaagaaggaagctaggaaattaaaatgtaattttcacaagcatgattctgtcatagctcttattttctttatatggaatacaaatactgatatagagtaaagatttttctattttgcattttttgtgctctttgatacatttattgaggtcaaatgaaatttgatatagtaggatttattatgaaatgttctctgaaaacaactccataattactgagctacatggtagtgcataaagctgtaaaactgcttagccagacaagcaatttatatgttacatcgaggtgtgtatggcaaagagtattactttaattgggagccaagatgtagtagccttaaatctgaagagctatatgtttaacataatgcatgaggctttgaaataagatacctaaactggggagatacagcttttagaatatatattaattagacattattttctgaccatggatactaaatactgtttttgaaagaaagcacagaatgcaaagcaggtgaaagggcaaaacctctcaacattgtacagtgctagaaaggaagcaaacttatttcttctagttctttgtttaaaagaaaaaataaaaggaaaaaagtcaagagaaaagaaaaccattaactacagttcggtggaagcagggacgaggcaaatgcacaatgaagttacgtcttcggtatgctattagcatctcagaaaagggatttggtggattttaactgaattttctcagattgcagatttggaatgaggttagaggtgggtggctgtgtgggtaccagcacaccaccaggagtgaaaaacaaattcttcttggcatacatttgctccctgtctgatcataggctctcttctgtttagcaggttcagggtcacatgcctccgctcatgatcccaatttttccacatgaccagcggaccctggcagcagctgctgctgcccaacagggattcctcttcccccctggaataacatacaaaccaggtaagtagagagggatttaacattcttttccaaatgctcagatctgcatgtttatgcttagtactcacaacaaacacaggagcatgccagggaactatgaataaaaatatcataaaagcttattttaaagtaaaattagaattgggaagagtgggcattgtaataaactaattggttgctaaaaacttttactttctcttcttccacttgagtttgtcttgaattcacagataagatactactttccctggggactacaatgtttttgtcagctctctctcatacttttactgtgaataattgttttttggttaaagatccttttctcctggtgagagctgttatattctggaaaagtgatcacattcagtataaaatgtcattgtttgttgtcagacttctcttagaaagatagttaaaactagactgatttaattagcttaccactaatggtaaaattgtttttgattttcatctaaaaaaatgaagtattcagtactttttaattcatttttaaacctcaaaaaacaggtcatgtaaccttgcagtgaaatatgttttaagatgatttagcaaatgttgtgatttttcttttttcctcggagtttactggactcctggggaattcaattaggggcataatggtttgaagcttctttcagagcctccttgtaaacagggctttaaatgtttaaagatatgttgccaaaggaatccaatgtaagaagatagtcaagtaaataaaagtcaaccttaatttcatttgtgcattctttgtaagtgacctcagctcagaagtagtgaccttgttctactcattaataatttctgtgtcaagttctttttaacatattaacctgattatatttaccatcaaatctgagtacaacaaatctgcgtgcagcagtttctttgtgtatgtggtttataaagtgaacaaaggcgttttaatatgcttagagcaataataaaatataaatcactttactaaaattctggagaagaaagcttattaaatagcataaaaacaagcctagtgcattttagcatctgttttaattgcttgttgccagtgattactcttttgtatttgatagagaacttccttctttgtaagaaaaggtaggatgtctgtggcaaaacacgaatgattcaaggaattgagatgttatgagattggtgagtttaagggctgtctgaaaattcctcacatataaatgaatcaaactcatattaccaaaaggtttttggatacctgagagaaaattatgtcattcaaattgttaaaaattcatttttctagagcatgatttttagaacaaggtatacttagctactatgacattggcatctatattaaggacaggagtatattttttcagagaatttttttttttttttagtgaagtggttcagtcttcctgtgatctctgtaagtcattctaaactacttcttcattttgactttctttggaacattgaagtaagccaagtttactgttctattctgaatttgagtttgacacccctgtaccagtcccagaaacattttaaatgaactgtatgtggaaattatctatttgacttcagtgtttttaaagttaaatttatccacatttcaaaatcagttatgggtcttattttctgttagacgtagacatcttgcttacctaattttgttgaaacaataccgccacttttcatgggggaagatattgttttattagtgattttagaccatttttcaaatgtcttctctaacagcattaatgagattataatatgtaactgagaaaaacagagaaattgggacaatattgtgcagaaattagttacttctattgaacaaagggcagcttaaagttagtgtcctggggtaacagagctgtatttgattatgttggccaaactgtgttggataaggcaggacaatgggttttgagatgtaggaagagttttaattacaagcaaggttggtaaaaaaaagtgtttactttcgtgtgactcctaaattatgtcagacaatttcattaatcagaactctaattctttcaatattttggctaacctaggctttattgtatatgaaaaatgtgtttaaaattcattaaaattatatgttcttacgctattagtagagaaattacatcctcagaagacttaatcaatctatgcagtgtttttatcattcacatgaattaggtgaagagacttctattggactggaaactggacaagtacaatacaacttctttttgccccaaactgagctatggtaacttcacttgaaatgtatgtgagggctgggtgtggtggctcatgcctgtaatcccagcacgttgggaggctgaggggtgggaggatcactcaagcccaggagttcaagaccagcctggacaacatagtgagcccttgtctctaaaaagattaaaaagttagcaaagcatggtggtgttcacctgtagtcctagctacccaggaggctgaggtgggaagattgcttgagcccggtaggttgaggcagcagtgagccgtgattctgccactgcactccagtcttagcagcagagtgagaccctgtctcaaaaacaaaatgaaataaaataaaataaaataaaaaagaaaagaaatgtatgtgagacagcaatgactaaatttttgaaagaaaaccttgaattggtggcataaatttgtattctggttccctaaacaacaagatgaacaagtgctaccttggtctttataaattgaaaaaaataaatttcctttttttttccctttccactttcccgtatctgaaatgatttcatggtatttgtgccttcagctgattgaataattatcttaatttccagagagcaaggactaccttggggtgacattcattgtttgttaaagttgactgtttctgaatccatgttaagacagtgtaagcaaatacatttagggttataggccttcactccccaccctatgatttgacctgtgcctctgggcatttcagagtcccagcgtgtagtaaacactaggcaagctctcccacctcagtgggttgctgagggggcatgctgcccacagggattgttcagctccaggacagcatctttcagattgttctctctagaaatagctttattgagttttaatccctatttttaaaaatgttttacaggttctataattagagacatatttcttgataggaactcatcatcagatcccagaacataaaccacagacttttggttgctttgctctttcacattgtgatacagagaggtgcaccaatcaagagtaagatagatacatttgagcacaaatattggagaaaattaaaagataaagcatctttcacagttgccaatgtgtatatccaatcaagatcagcttgcctgaaaaacagaaacgatgagtagcccccttcatacttcaggcttgatttagctgacccattgctttatgtagttggaattttttacatgattgcggctagaaagcacacttgaagtttcctagaaggtcctaggaacaggatgtctgcctgttcctgggtcttccatttactcactagttatgatatgataatatatgataataataatagctaaagcttactgattgatactgtgccaaatactgtgctacatatttcacatggactattttatttcatccttacttgaacatgtcatttaatcttgctgaacctcactttttgtcatctaagaaatgtgtcacgatttgttcactacccaacgtggacgtgaaaattaaattttgtaaaatatctaaaagttctctgaaaatgataaagcactaagattgggagtaaagtctgacggtgaaactgagtaactttagcctgttaaactacatccttatccattggaaatgcggcccaaaagctgagtgttagactgagtcatagtgtccctctgctcaacgaccaaaaacaattttacaagtatacctaatgtttcttttttattgcagtaaaatatacataatataatagttattgttttagccatttgtaagtatataactcagtggcgttaatatattttcaatattgtataaccaacaccacaatccatacccaaaactttttcatcatacccaacaaaaatgctgtagccattaaataataactctctctatccctctacccttagtctctggtaacctctattctattatttttctctatgcatttgcttattgtaggtacttcatataattggaataatacaatatttatccttctatgtctagcttattttggtaagcataacatttcaaggtccatccatattgtagcatacattaaaatataattttattgctgaataatattcaattgtgtatatatatgtatatatatgtatatatatatacatatatatacatatatatgtatacagatcacattttgtttatctgttcatctgttgataggcacttagtttgtttctaccttttggctattatgaataatacttctgtgaatatggttatagaaatgtttgttagagtccccactttcaatccttttggatatatacctgtgagttgaattaatggattatatgaagttctatgtttaaacttttgagaaaccaccaaactgttttccacagtagccgtgccattttatattcccacgagaaatgtaagagggttccaatttcttcacattgttgctaacacttgttattttcaactaaatttttttattattatcatcccagtaggtgtgaagtggtatctcgctgtgattttgatttacatttccttaatgatttatgatgctgatcatcttttcatgtcctcattggccatttggatatctcctgtggagaactgtctattcaagtagttttcccatttttgagttgggcttttgttgttgttgagtttcagttatttgtgtattgtggatattaataccttatcagatatatcatttacaaatattttctcccattctgtaatttgtcttttagcattcttcatagtatctttttatacactaaagttcttaattttgatggagtccaatttatccattttttcctttggtgcctgtgcttttgatgttatatcaatgaaatcattgccaaatccaatgtcataaagatttaccactatgttttcttctaagggtttagtttttttagcttctaagtttatgtctttgatccatttgagttgatttttgtatactgtgtaaggtaaaacctttttctattgttttacatcttttgcacatggatgtccagttttccccacaacatttgttgataagactatcccttcccccattcaatggtttttgcacctttgtcaaaaatcaatcaactatatatgtaaaggttttaattttgagctttctattatatttaattggtagatatgtatatatatatacacacacacatatgtatatatatatatatgtctccttatgccagtaccatcctgttttaattgctgtagctttgtgttaaaatttgaactatgagctttccaactttattcgtctttttcaagattgttttagttattgggacctcttgtaattccatattaatttgtgaattggcttttccatttctgtgaaataggttgttgtaattttgatagggattgctttgactctgcaggttgctttgggtagtattgccatcttaacagtgttaaatcttcctacccatgagcacagatgcttttccatttatttatgtcatctttaatttctttcaaaaacgttttatagttttcaacatacaagtctttcatctccttggttagatttatccctaagtgtttagttctttttaatactttcgtaaatgaaattgttttcttaattttcttttgggttgttcgttgctgatgtttagaaacacagctgatacttgcgtgttaagcttatactctgcaactttgctgaatttattaattctagtagctttctcagggactctttgggattttctatatataggattatgtcatttgcaaatacaaatagttttacctctcccttaccaatttgatacattttatttctttttcttgtctaatagcagtggctagcacttccactacaagactgaatagcagcagtgaaagtgaacattattgtcttgttctcgatcttaaggggaaagctttcagtctttcaccattgaatatgaagttagctgtggatgtttgtttgtttgtttaacaaacagggtctagctctgttgtccaggctagaattaagaggtatgatcatagttcactgtggccttgaactcctggcttcaagcaatctttctacctcagcctcccaagtagctgggactataggcacgtgccaccacacttggccagctgtaggctttttataaataggtttcatcatgccgaggtctttttcctctattactagttttctgagaattttttatgatggaataatattagacttttgtcagatgcctattctgtgtcaattgagatgatcatgttggtttttttttccctttgttctattaatgtaatgcttgacactgatttgatcccttgcattcttgggataaattccactttgccctggtaagtaattcttttaatttgccattggatttgttttgctaatattttgttgaagatttttatatctatatttatatgggatagtggactgtagctttcttttcctgtgatatctttatctggttttggtatcaagataatgttagccttataaaatgaattagaagtactccctccccttcattttttttttgtaagagtttgaaaaggattggtattaattcttctttaaacatttggcagaatccgttggtaaagccatctaggccagagcttttccttactgggaggtctttgatcattgattcattgtctttacttgttatgggtctgttgaggttttctatttcttcttgagttgggtaatattcatgttttaaggaatttgtccatttctcctaggtgttgaattggttaatgtacaattgttatgactgcataattattcagggcttctttttaatttctttgttttagttagcatttattgagcaccatttgttttccaagataacccccaacctgtgtatgtgtgtgtgtgtgtatgtgtgtaatctcatttaataacccccaacctgtgtatgtgtgtgtgtgtgtatgtgtgtaatctcatttaattttcataataactcttagatataagtggtaataaatggtatcatctctgctttattaaaagaaaataagaaactgatactcaaaaaagttaacttttccaagagttccacatcttgaaatagcggagatagaattcagactgaagttctctgatttgacacttcatactcttggggccttggtctaagtatgtgtgatcttaagaaaatctgaccttttctcagtgaataaaatgtaatttttacatgtggtgttatgcaaatgacatcttgtaaagccactcatttctgtctcttccagagtatttcaaagcagagatatgaactgctattgtaatagttgattatttaaatatatctactcagaatcaaagcatttctgaggttcttcagattagcaccctaatttttaaatcggtgttggggtccaggaagaaaatatgttcagctgtgtaaactaacctagttttttaaaggtctataatcttaactgtgttctcctctgtagatggaggctatatcattgatgagctatcatgaaggcatgaactttgagagtttattttttaatttttaatttttatttgttttattttttgaatgtcaatagtggtgatttctgagattttggtgcacccatcacccaagcagtgtacactgtacccaatatgtagtcttttatacctcgctatcccccaacctttcccccaatccccaaagttcaatgtgtcattcttatgcctttgcattcctcatagctgaactctcacatgtgagtgagaatacgatgcttggttttccatttctgagttacttcacttagaataataatctccaattccaaccaggttgctgtgaatgccattatttcattcccttttatggctgagtagtattccatggtgtatatatatatataccacattttctttatccatgcgtagattgatgagcatttgggctgtttccatatttttgcaactgcaaattgtgctgctgtaaacatgcatgtgcaagtatctttttcatgtagtgacttcttttcctctgggtagatacctagtagtgggattgctggatcaaacagtaggtctacttttagttctttaaggactcttcatactctttttcatagtgtttgtactagtttacattcccaacagtgtaaaagtgttcccttttcaccacatccacgccagtatcattatttattttttttttattatgaccattcttgcaggagtgaggtggtattgccttgtggttttgatttgcacttccctgacaattagtgatgttgagcttttttttatatgatcattggccatttgtgtatcttcctttgaaaattgtctattcatgtcctttgcccactttttaatgggattgtttgttttttttcttgcgatttgagttctttgtagattctggatattagttctttgttggatgtatagattgcgaagattctctcccactctgtgggttgtctgttaactctgctgattatttcttttgttgtgcagaagctttttagtttaattaagtcccatctatttatctttgcttttgttgcatttgcttttgggttcttggtgatgaattctttgcctaagccaatgtctagaagggttttttccaatgttatcttctagaatctttatggtttcaggtcttagatttaagtctttgatccatcttgagctgaagttttttacaaggtgagagatgaggatccagattcattctacgtgtggcttgccaattattccagcatcatttgttgaatagggtgtctttccccattttatgtttttgtctgctttgttgaagatcagttggctggaagtatttggctttatttctgggttctctattctgttctattggtctatgtgcctattttcataccagtaccatgctgttttggtgactatggccttatagtatagtttgcagtcaggtaatgtggtgcctccagatttattctttttgcttagtctgtctttggctatgcaggctcattttggtttcatatatattttaggattctttttactagttccttgaagaattatagtggtatttttatgggaatcacattgaatttgtagattgcttttggcagtatagtcatttttaaaatattgatcctacccaaccatgagcatgggatgtgtttccatttgtttatataatctatgatttctttcagcagtgttttgtagttttcttgtagaggtctttcacatctttagttaggtatattcctaagtattttattttattgcagctattgtgaaaggggttgagttcttgatttgattctcagcttggtcactgttggtgtatagcagagccactacgttgtgtacattaattttgtatcctgaaactttgctgaattcatttaccagttctaggagctttttggattagtctttaggactttctaggtatacaatcatatcatgagcaaacagcgacactttgacttcctttttaccgatttggatgcccctattttctgtctgttgtctcattgctcttgctaggacttccagtactatgttgaatagaagtggttaaagtgggtatccttgtcttgttccagcttttagggagaatgctttcaactctttctcattcactataatgttcgctgtgggtttgttgtagatggcttttattgctttaaggtatgtcccttctatgctaattttgctgagggttttaatcacaaagggatgttgggattttgttaaatgctttttctgcatatattgagatgatcatgtgagttttatttttaattctgtttatgtggtgtatcatgtgtattgatttccatatgttaagccatccctgcatccctagtatgaaactgaggattttttaaatcaattttatgtaatggggatgaatttatgtgagttcattcacactcacttatttaattgccattgtgacaaattccacagattttcggatgattggtcaagggtttggatgcagctgtgaaataagtgaagaaagtaaggttgagccttgattcttagctttcttaaaggtagaaaaaacactgcagatgatcttagaagaaattctgaggtcaagactcttttcatcattgatctattctttgacgaatagaaagggagaaatttagcaggagaaataacaacatagtgatctcaacaatatatattataatccttgctaattttatttttcatttgtcctcaggacaaattgaagcttttgtgtcacctattacctgctaacatttactacagtgtggtttcgcataaagacaaattcagacttatggcattccctcagagtgtagaggaattgtaatattttgctgtaccaaatgcgtgcatccaggcaagatccatgctaagtggtatgttcaagtttgcatcagtggttgtgattcaaatatgttcatattgtaacaagaatggctatagctcataaaggtgggctctatagttgtttggcaacttattatcattttatgatgctggcacacaataatttttgagttagttagggatgtgtaacatatttttcttctgttatggaggctgggaaatgaggtatgcgactgaagaatcttttgtcccgtcttctagttctgttttattttttttctctctctactccttccaaactttctaaattatttcttcaatgtgttaacatctgaagttactatctcaggatactgcaactatcccagtcctttgtctttctgaagaatgaaagtaaattgacagacttttacccatgggatttttggctttttttttttttaaaaggtagactttatatctgaattattcaaattaaaagcattattgcaggaggtagcctgaatctaatgggttgtaggttcttagtacaagctccccttctcctgccgttaagttttactaattttctgcttcatgtcagtttctatgaaaatttaagaatttattttctctcatttagggactcttgctgttttgattccaaaggaatgctgcctattctgacaagtgaaactaatgtcaagcaaattttccataagttttaaatcctactttgtctttgttttgtactcttatgataaaaactgtcagttgaaatatgtagaaagctggaaaatggatttacagaatggacattatttctcaaattggtttttgaaagttgtcttcttacactagaggtagcaagggccagattacagtagtgcataaagccaacctgtttcaacaagcttcaccttccatgtacaaattttaaaagaatgggtcctcatgaaagcatttcaaatccagagacaaatttgaaaaaaattgctacaacatgttgactgattccttgccaagtcaggcactgagaactttttcttgattgacttacacagaaaattagagcagcataagggaaacatgcaactttgttattaaaaaactaaacttcacaatacccttaaatccctctccctcttaaatttttcttttctacttgtaatctccctcttcttctccctcatcttctacccctcctgccttgtccttgttctctttcttctaatcattctctgttatatactctgttgctctaatgtattcatttttacttttaatgttgaaacaatgatatgttatggagaaatagctttctaaagattatattcaggtatacagattcaaagaaggataaaagttaaaaatgtttttaaaatatgcctgtcagcagtggaaagaaagctgtttgtagccagcaggtgagctggaaagtactatagggtgtggtagagatagtaataaattaactggcaagccaaaagctgtaaaaaaaaaaaaaaaagctatttcatagcacagaagcatgacagctatgaaaaaaggagtgccccagggaattcttttagagtttgatttttttaaaatatgtttgacatgaaaaatgttttagtacaaataaagcaactggtattaaacttacagggaggggggttgtggtttagagttagtatgaataatgcatgatatttaaagaaagaacagctctaaaatgttccaggaggcagtccatgtcgatggttagaatggtgatttttttcccctatttttgaagcatcattaattcagcatcgttttgtgatttttttaaaacttgatatctaccaaagaaatactatttgacttagattaggatattcttccttcagataatttagtttaaatatcaagaagatcagtagaattgtttaagcataaagtgacagtcatttactataaaaaataatttggcctagttatcttttttaaaaagctcatatagtactgcaaaccaaaatcaacctcatggaaggagaaaaacaagatcagatattttgaacattactccataggagaccagcacaatataatgttagtgaatgcattgtagcagcgctccatatgcaatcagaagccaattgttactggactgtgtacaagcacacactgtgctcaatggtctgatgaggtattatggatatgatgcaaagagactgtgtagattagaagctaacaatttgttaaaagtgaaagcaacttaacatttacattgggccagctgagtagcatttcatatggcaagcaggatgagttcccaggaaccagagtcaccaggaaggctccaggtattcgtgtccataccccaactccaaaaaaagttttcttgctttccagttgactgcctttattactgagattctttctaagctgtctattcattattacattcagctttcagtgtggaaagttcatgcaaaacaacatgattattataaatgtcaaaaatgtgtggaggaacagcctattaaaatatagcctagagatattacataacgctgactttaaataagtagctgaagccaaagtgatactccattaaatcactgatattgtgaaatttatccacacatactaatttttatttcagttacctctgtcatgatatgtttctccttactttgttttggttcttcaggttactgcacacagcctgtgttcttaggtcacagaaggtacttccgtctccctttttaggaatgatctgaagtcagaaacacattaagatatagcattcatctctgctgaaccatactcactctttaccaggtgtttagtacagatattccatgtaaaatgcgcatttatttaatcaaagcatcattaaaatatgtttgataagtgcttagtatgcatgattctgtactaggatccaccagtacagtaccagaggttaatccagacaaacatggtttctacacttatggggataccagacatttcacagaatgctggaagataagattagctgtcctctcagccctatcatattgaagaggttgtattttttaatttttaaacttgtttaataaataaagtttagaattatgagcagtcaatagctcagagccctttttggactctaatactcttctttgcctacaaagccaaaactttttgttgttctaatataaaagccttaatgctttcccagtgtactgagtgtcagcctggcttaaagatatttttttactcttaaaaaatgatgtattacaagattcgcaatggagtgaacatgcttgaattgcacatttaagtttttttaacatcacattcatgttttgccagtttgcctaccagctatctgttaacaaaaagttccaaggcagcactgcaagtctgtgcccaactaagccttttgtttctgcagatgtttgggcttagagcaatgttgtaaagctcaggcaatccaaggaccatgtttgtacttgtctgctgcaattccctgtgcattgtctaaacctgtatgcattgttctttccgacaggtgataactaccccgtacagttcattccatcaacaatggcagctgctgctgcttctggactcagccctttacagctccaggtaagtgccagaagaaaaaaatgtgggatatgagccagtactttagtggaaaactgctaaccagctgtatgctaaataatggcctgaatgttaaataattttttaagcatagcccagaaggattaacaccttatttgcttatcgtaatgcaaatagaagagaaaactgccagtttcaatatttttaaaggaaaagatcacattaggacttaatactatgtattctctatcagatgagtgaatagttttacaatttcaatggctagttgttactgcatacatgttagctttttccttgttagtttttcatctgtgtctccacttatgtccagattagcttttgcatataaaaattgaaacaaaaatgatgttggatattttttccttcttgtagctcatagaataaggggttgttattttcaaattacatgataattattttgtaaattgtaaatgcattgctccttaatatatgtgtcctcaccctttctagggtcaaaagtcagggcatggtgtctgataaattttgcattggtgtttcttatttataaagctaaacttggggggaaagtgttttggaagctgattgaaaaatcatttacaccttatcttcttcacaataaagtgagtttggaataggaatagctgatcattatacccttctactactaccacttgaatgggaggttgactttgaatatgaatgtatatttgtattaataaaaacaaaaagctgagatcattaaaataagtcaaacattcagtatttggatatttagagaatataagataatcaacaacttgacttcaatatagtagaaagttttattaaagatagtttttattcttaaaatatactataattatttttgagttttcttaaattatctacagaatagcatctggtgaagcatttttatttttgtgttgctagtctctatgtgacttgaacataaaaagtatacaactattgtcccatgaaaaaacatcattttgaatgtttccaactggatctgcaaataaagaatttctgcaatactttgagaaattttgtcatgagtcatgatccaggaagttataaagatgtaacccattatgggctgcctagcagagctagaaatttcgcctaagaagagcagcaacctcacctctcttgcaaaccttcacctttcacgctactaacactgaaacctactatagttggtgcaagtctaaaaagaaccctcactattataaacctaatatatttcttctcttcctatagctgtgctattgagtatcttcttgagtcagaggcagaaacaagaaatcagtgccactgtttgatactgtaaccaaatttctgtaaaagaaagaaactgagtcttaaactttctactttctattttttgatgtggtcaataccctggatttagaaatatgtattctgtttcatgagttctgacagtatgttttgtctttttttttttttctgaatatgctactaaacagaagggtcatgtctcccacccacaaattaaccaaaggctaaagggcctaagtgaccgttttggcaggaatttggacacctttgaacatggtggtggccactcttacaaccacaaacagattgaggtatgaatgcttccattgatgcttcattgggttggggactggattgttcagtcatactctaggctttttttttttttttttaaagtggcaaacactcaacctaaacactgaacttaatctttccctttttctcattcctaaggaggctcttcttttgccccttttctttcagagaaaaaagcaaatcccaaagcaatgcccctgaattaaggttgttctttgccatatatattcacacaaaagctttacattataagtgtcttcaaaaccatgtttcttccctcactcttttatattttcttatgcatagtgttgtatagtattttttaaaaaatacttaaacattaaaaaattatttgaccatagaataaccctgtaaatttgatcaaatataattctgcttgtatagataaaacagctgaggtttggagaggttaagttatttaaccaaggctataaaatattcgttgagtcaaggttattgcccaggatttctaattctacgtactcagttttctcagaatgaagtaggggtgggtgcctgggcctggatgattgctttttccaagacaaacttctgtagtattcttttcatatttcaccttccagtagagtcctttgttgttttgttgggatattcttaccactgagagaagatggcttatgaaaaccaagaccttttcttctataagaacccagtccttctctctccaatttcatgcttaattccttttctgcctcaccggggtccctcactgggactctcatattggagaatttccagctatctgttgaattttttaaaaagtggatacagtttacctcaaactgaaacacactttaattctctgggttagatataatagcagattttatagtccaacctaggatgggaaactcaacccaaaaatgaaaataattgcatctagcaagatgtacatttaacttctgatggctctgctggtctgtatagctcaaacactatgtagtcaatgaaaggtccctttgacgttaccttttctgctgcttgtgaatctacctttttggaaaatgatagggaatgatcactcctaagaaaaggaagagacaagaccaaagacccccttggaagtagcctaaggtagaattccagagcttgttaactgcctccctcttttcttttgctttgacataagaggtagagagggggtttccactcagacatgattagacacatactttcagaatatctcctgccttctatacagacagaagaaatttctaaggctttcttttggctgtagagtgagtaccacatttctgggcattctgaaaatctatgcctaggagagctagaaagaaatgactggacattaggaacaagtttatatgtgtgatgacaactagcaagcttatctactcaggacagtcagcttgagagcttttaaatgcctggaagaatgagaaattaggtagccttggctcaaactcaagacttcctctcctgctggacttttctgtttcctctcctggtgggacttttctttctctcctgttggactttcctgttggacttttcttttggattttctgttgaagtgttgtgttctatcccatcaatcttcccttagccaggtttctacccagtctcttcttttgcctaatttttcactcagatcggcttctctcccaccccccactcccaacccccacaccatcactgatccctgatgtgtcaaatctggcttctgttgggtttctggaaaccatgatgtcatgcatatgagtgtcagagctctgtagtgctgtagtgatgctgatctagaagcacagcatatgtcacgtgtctgtcactttaattaggctaaacaggtaaaccattaatgcaagagccttcatagctttgcagtttaaatctggatgctttgatagtttcctcagtttttatttactcttgctctgttctattacctcctatttttgcacctttttcctgcatgtcaggaaacctttgatctgtttgctcatgtggactctggttagaaaagatcgaccttgtttaaaagatgggtttcccaaactttcctagtatgagtatagcatgtttattgggacatctgtgaatagcatagtagacacccatatctaaggtgctagatagtaacgttttaaatcttgagcgagggtagagggatattttaataatatcttggtttattgttatttaaatctgctttcttttctagctagggtcttctcccctcctttgataagctaaaatgtcacagttatgtcaagaaacatgatcatgataaactattgctacttagaaagcattacaatgatattaactggttttatttctaaacagagattcttaggagggaaagcttataacacatatactcccccaccccactgcatgcattactcagaaatggtgttctctacttcatgttacagttaatttgtccttcaaaggttgtcatttctaatattaatgagcctgggtaaatcttaacaacatttggtatatattaagtataccctgaaattttatcaagtagagaaaagttatttaaaattgaaagactctccttatattagcatatgccattactttctttctttaaaataaggaagattccgtaaagaccattttttaaaatactactgtgctgatctaaggcatggttttctctgcctcaggggcacaatattaggagaaagaaggccaaagagtgctatttttagttgaacagttcagcagatgcaggcatgaatactcatatatctgaaggttgaggggtttgaaccattaattttgataatttattaaaccctgggaacaatcagaaactgtaactctaaggttacaatgcttttgacctttagagaacagagagcacttgctacagtaaacaatgtattatactgctgcttattccagttctctcacccgtataaatttcaggaccagttgccatttgctttcttcagctatgttatcattggtccttaagtaagtcaaaaagaatgttaaggaaagggaaccagtataatgaggcagtcatgtaaatttagcctttaaatagtgatgatgttagattgtttctgaagaaatattgtcgtgggaactaagctctggatgactttttttttttaatgaaaaagggacttcagtgtatttattcattttatatggttattttcaatatgatagacccttaattttgttttgttttgttttgtttttaatggggagtagtgttgcctcatagttgtagcttatattaaacaaaatctggtaccatatgcaaagtgatccacctgcctcatgccttcttattaaatgatgcatgcttctctttagcaaatacagcagttagatatcacacagcttaagcatttctaattaaaatatctccatgtgtcagcatattggtaatgtattattttaatccatttattttgtttatgaaacagtgacatatgtttagattgtgaaatatatgagccttaaaaatcactttattgaagaaaattaattcctactatactatctcagtaatgtgttcactcacccagtcagtcactggcggcactgccagtcttaatgttgggtagacattaagacttaccagtcacatccacataacagtcttggaaggaagcgtatcagttctttttcttagcatcaaataatagggttattcttttcttactattttttattacttattaattcaaacctgtcccccccaaaacacttttgttgcctttttaaaaaaatacaatgaaggatggggctcagtatatgtataagagattctgaaagaccaatcaaaattaaagcaagccagttaccttttcaaagttagacatagtaatttgtttgtcagcaggaagatgtttgggtcagccctgagataaagcgactgtcagcagttattcctccaagacaagtaatttcactcaatgtattactgacagattgctcacttctctgaatcaccagaaaaaaacaaacttaatattgttacaggcagagtttctgtcttcattagcttcagagaatgatttttgtctagcatttaaagttcactaagctttagttggaacatattttaacagactatttcttataatgatagtatggatagtagcctaaatgaaagaattgtataagaaaattaaaaatgtcaatataaatgcaattttcactgttatttgatgggtcttatgtgtagtttaggggagatttgaggaaaggaatatagttagagtcttaaagcactaagaaaacctgtcaaccatacgttattcttaaatgaaactactgaagtcttgccaagtttgcaaagatggaggagaacaattgaagtttttgcaaaaatgaatacaagcacatattttatttaaatgatattgtcaatttttgtgctacaaatggaaagtaaagaagtgcccatcagcattgagaatgctgtatttctatttcagttgcagcctgagtctttatgatgttgtatttagaggctctgcactgtctgttgtaccctgtcttcttatttgcaattgtaaagatgcctcagtggtgtgggggaatgggagggtgatggagttagctttgctgggcagtcttggaaagttgtgatttctaatagagaagagggtggaataaatagatgattagggtgacctattactggctacccaatggagaaagaggaatgaactgactcaaagcttgttttgaggatgccagccatggggctctgctttgaagagaatgcatgcttttctcttaatcagccttcactcacccttctgactcttttcttgatttttaagagtgtggtggaatttgggaggaccattacaactaggcttagatgagctgtaggctaatggaattaactccatttatggaattagaactttggattagagtttccactataactttcttgctctgttgtcttgcactgttacaaaatacctccatttgcagtttttttcattgtaaaatgagcataatatacattctcagggttcttataaatgataaatgcaataataaagcatgtattagatttccacaaatgttccctgaaccatcatcagaataggtaaaacttttcagtaacctcagtaagcagtcaattctactctagatttattgtctaaagtacttctgatgggtgggtctaacctactagagtataagttaattaattcagggaattttttgtctcttttgtttactgtggaatccttagcattgcctagcacagtatttggcaaaatggacgaattaatgcatttcatctttggtggacatctgggacccaagctcctttgaaaaccttttttttttccggaaaatatttggttgagtgctctgtctataagagacactcttttatgtcaacaacttttctagataggcttcttaagaaaaagtgcaggtatcaagtgaatcctaatggaggctaaagaaatataggtagattagggaaggatgccaaatataaaggcaattcctaatgcttagaaatctagcttgccattgtagtcagtgaagcagaagtttatacccaccctcaaactaaaacattggataaactggattttcttttggaactttgctttttatttggttttaaagtaatacctgaaagttcagagagttggctcttctcacataagctctgttaatcactgtgtttgagttatttgattggtgggatagtcagctatactcaaaaccaatgtagtcctctatctctcctgatacaagatttttgtcaacagtcatttagctctagccccactaattaatccactcaataggcagcttccagtgtgtgaacgcatgtaattacatttacatagatttcttgtaagatgtgatgatttctaaaataatgacaggtatttttattcctgttttaccaaactgaagttttaaaatatttttggttgatattatgtatcatatatctgcatgtatgtatatgttgtaatgagctacgttggaattctgagagatgatgtgattaagggtacattagaaagtttgaaagcaaaacattctagcattttagaaaatgcttcacttctgtttccaaccatggaataagtcaggatattcaacatttaggaaatttatattcagaaaaatatatgataaaatatttgaccttccaggtaacagaataggcagaacaggagaaagacattttttacgatattttaattaaaagagattgagaagctacagttggatggtttctcctcacttctgaccactagagctggcacatagctattactgttctgccagttcctcttttctgttttatttgtagaagagttcatatgctacaggtaaactcagggaaaatttatgatgatttaaactcaatgtactgatttgaaaacatcttgctttattttagctgttctagattataaagattaggataataactggattctcttctgtatcttcccaagcttaaatggcattaataaaggattcttttctcaattatatgtaaataaacaagcactaaatatgtatcaggtgctatgtgggtagtatgtggattttaaaaaatcattatatatgttcctacctttcattcttctcttataattggtgacagcagtagagtcatcttgagtcaaattgagaggaactaatttaacgctttccccccggttttctaaacatgaattatttgatactgatatccattcaatgcatatttaaccaagtatttgcatttccatttaatggactaagaaatggaaccaagttagagccaaataaatttcctaaggcctctctcttcatattcatttggagaagcaaagatttaaactagaattcttaatttccaataaactgcattgagttcatttctcactgtgtgtttctcttatagcaccagctaccatacctgtaaccaacaggctacaggttgatgttacaatgtctatattaacctagaccataatccttgatgccttgtcagcaattcccctagagctattgaccttgaatggtatgaactaaaacaaaagtaaataagtgacagatatgtatgaaaaatttattgcttcaaatatatccgtgtatttgactatctcaaactatacaaagtgcaagcctacagtgctcatttgaagccagtttgaaatagagctgctgtcaccctacaaattccctatcaagttttccctctaatttatctactcatttaaattaaagaaagaatgaagtattacatccttttaaaattcttcttacttgaaatcacatgtggtagctttgaatgtaactgttggaataacttaacacttattgtatcattagagttgtgtcaaaatctacatttaaagagagtttataaatgatcatgctcaggaaatttgaaaaaggcagcatactacatgattccaactatgtgacattctggaaagggcgcaactatggagacagtaaaaatatcagtgggtgccagggatttaggatgaggagaggggtgaaaaggcagagcacagaggatttttagtgaaatattatgtagtgaaaatattctgtatgagagtataatggtagatacatgtcattatatatttgtccaaacacataaaatgtacaacgccaagagtgaaccctaatgtaaactctggactttaggtgattatgatgtgtcaatgtaggctcatcaattgtaacaaatataccactcaggtgggggctgtttataatgggggagactgtacatgtatgggaacagggagtatatgggaaatcgctttactttcctcttaattttgctgcaaacctaaaactaccctaagaaaagtatttaagaaagtttgcaagcaaattaacacaataaatttaattcaattactcagcaaaaaaattttttagcacgtattatatgccaggtcctgtactagacagcagtcttcagctgagggcaactttccccaccccccaccctgtcccacaagggtgtggttgacaatgtctagagggtgaggatgctgctaaacaccctgcaaagcacagaacagccacccacagcaaagaattatacagtctaaaattccaatagtgcgaagattgagaacacctattttacatagtggggacgtatcaatgaataaaacaaagtccctgccctctgagaattttaccttctagtgggagaagagaaaataaggaaaggaatatataataaagaaatgagactgcaaatcttactcatcttagcagaaatatcctcacctatcccatctgcctcaatctgggtgggaaaattttttaaaattaagacctattagactgtttatcctcagtttttttttccttcactttgatatttaagactaaaacttttattctagccagtcacttctggctagaacagtcacaactctcttcagtagtattaagcatatcatgtactcaggctgtcaataagggaatattattttttagtttaatagtatataagtctgcctttcacagtgaagtaaatatgaaatttggtgagaacctgggaactgttcattaggttttataggatgctagttaccgaaatctcataggatgaatgaaatcattcttagctataattgatgtgtaaattggatattacaaaggagactaaatttctttctaaaacaaaatttttaaaagaaacatgagtagtattaatattatatgtgtacacatatatacatacatatatgtatacatgtataaacacatacctattttatagccttttacagttaaaaaacaatttatatttagcctttgtgtaaatgttttaatattattcccatattttggaagaagaaagtgaagctcagaagagttaagtgacttagacaagattactattctagtaaacaaaataggactgtaatagatggtttaagtgtattttaaattttacctcttggtcaggattcttggcattaagctctgttgactggtatataggaatagaagctttcttgtataatttattcttctcttgttataatattcaagtgaattaaaggcaacttaattaaattataaaagagaaaaatttcaaagtcagtatgacattctcagaatcccaaagagttcacgtatttttcaaatttccagttaacatccagaataaacgtcaaacctaagagaatttaatgagcagtagaactactgtgataaaaactgtcttatcttattccgtggctttcctttaggaaaatgtttagtatgtttttgctgaatgccagaaccctgtttttttgagagtttctgggcctgtcttatagtttcaaagttttgatgagtctcctggagtagctggggagctctatccttgcccatccctagtctgggatgcactctgagcatgttcagcaggttgcatgccagcagatgaagcagatgtttgaccatactgggatggagcgcctgctgcattaggagctgggtattcctcttgacatctggatgttgctgggtcacgatgcctgcctcaggccaggagtctgcgggaactgtggggcagagagcacagagtctttgctgctctttaagcgattagtgcactgaagcagcaataatgttgaattatcgcctggctgctttcttctcaggaatcttgggacaataggagagtcaagaaggagcatttacagtaaagtcatgttcagagagacaagactaattatagagtattaaagagctttattttaaacgatttaatttacaaatagctctgggcagtgcatggaactttttagaaccataaacctgtagcttaaagagacttttctaatttaaagtggctagtatagaaacatattgtttcagcaattattcagttttagagtttgttcaagttgtgccatagaagattcagcatctagttaaaaaagaaaaaatactaaaacttgaagcttgtggggaaagtgtctctaacttgaggagaaggaagacctttaggtaagagactgcctgaattatgtactggcttttactgtttccctttatcacactgaaaactggtagcatttgctacccagaactgaaaccatctgttacaccaattttctttatgatatgtgttatttaagcacaatggatgtggaaatgggtagtttaaaatgtgttttgtgatgaacagttgtcacattatgttgctttgcctcttataatttttcattagtgagacctctgtgctaaaagaagtcttcttataaacagattatggtcatttatgttcacagtaatgtattggataagaatgctatgttgctctcacttaacctctcgtattctaagggggttatatttaattaacgctggtgagaggctgacctgagagactgtggaaagtgattgagctgcattttgtaagctctgctctagtcagctgggagagaaattttctaaaaaaattggaaagtactgtcttttgaaattccctccatctaagctgtatttcaatgggccatttaatgctcaaatggacaaaggtattacttcattgaattttatcaaactccttctcagaggctcagtttaaaaactctataagaaaggtagtttagcttcttaatagtttatcacttggtctgctttaaaaaaagcaatttttttttttaagaaaaggagaaacacttactgtcactggaatggagcatgtgccccaaccagtcctcaccatactgggattgccctccagagttgaggagctccttagctcacaaagaaaaagatatcctctctcagtgttgctgttcacctgctcagaacatcctcttcatggccaaataggggtttgttccagggcccaagaggcagtacattcataatgtgtagttatgtcattggctcagacataacacaatagagaaggcaagagagtgagatcctgagaccaagagacagaagctttgttgaaatagtagaagactaaatgtgactaatttgggtggaaattcttcacttctccattcatttatcaatggtgttgataaagaggcatttcttaaatgcagaacaaaatagtcatctatcattcacctatatccaaccaaaccctcctgattttagatctacctctgcctccatttcctgattaatgaaactctattgccaaatacagacataccccactgtgaaacagaaagatgactatatatcatcagatgatgatttgtagccatttattgaaacaacatgctacccttggtttaccagctggcttgctgtcttacatgttctctgtctatacaatggtgaatggattagaggttccaggaaagtggtgcttcttggttccataagaattctgcagttaaaaaagctaagtgatcatgagctaatttcctgtgaacctcagtctcttcgtctgtgaactggggataatgacaccccctcagtagggttggggttaggattaaatgagataatataagcaaattgcttagtacagtgtctgctgcatggtagatgctcaataaatatgtttgtccatactcttctgcttgtatctctcttattcattcattaatttgaaaaatatttattgaacatgtactatgtaccttaggtactcttttaagcaatgaagctaagaaattactgccctcttatagtaatagtctgaggaagaaataaattaaatgagtaatactttaaggtgataggaacagatagtatagggctaatcatttgagatgtgtgtgtatgtatagcatgtgtgtatgtacatatatatactgatttattgattgcccaaggtgattgtgtataggcagtttgaaacccttttgtcctaatttctatgcctgatgactgttcctggtttcaaaaagcatgaggcccagtacagtgctctttagcaagaagtgacagccactccacaattagggtactttaacatagatttcccactaatcatgaaacaaatgtcatgttattgaaaataaagccttcacaaataggcaatgagattgtacaattccatagactttcagagctagaaaggtcttcagaggctttgagggtcaagtcccaactctaccactggttccatgtgcttggacaaattaatcttcctggtacctagcttttatcaaatgggattaggaaaaatacccccatagggaagttgtgaggaatacataagaaaatgtttgtgaaaagtgctttatacactgtcaagtgctatataaatcttataattttatagttgaagaaactgaggtctagagagatagattaacttgaccaaagccacacagctagtctgtggcctggtttagatgtatagaattgttagccaacagtgtaaataactaaatttgattgcttcttgtacatagatttaactaaattcaactgaattggccaagaggacagtatatctcatgctcctacctattctaagtgggagtcaatgagcgatcagtattagtagagatatatttttttcacaagcgaatataccaatctaatgaaaattattcattaacaaaacaaagtaaggcattaaaagtgtaagaccctgttacagtgctggtagcagtgacaaagctagaatataagcttatgctaacacgatgaaaagagtaattatttaattagttcattcatagattgattcctcaaatgtttattaagtgcctactctgtagtatgcactcttttctattttgggcacactaagatcaagagaatttgactcttgcccctgaagggcccacaatctagtaagcaatgtgataattgttaaaatagatgtgttccccgagtgaaatgctatgaaaggaggaagtgcttagctccccctggggaagtactggcaatcttcatggataaggtgatgttaaaattgaatcttaaaaggaggtataagttccccaggtttatggggaaggatgcagaatggcaaagatgcagagaagagaaaaagcactccagacaaagagaatagctacccataggtgtagaagcaatagacagcacggcacattcagaaacgacaaacagttggcacagcctgagtgtacaggagcaatcataggtgaaattggaaaggtatgcaaggggtcagatcacagagtgccttttacactgcacaagggaatttggaatgcatgtggtagacatgattttattcacaccataaatggtaaagtagtataaggtatagtgaacaactttatggtgtgatattcctcttaatttgatctctagtttacatttcccattacactagatttaatagttaaggcactgtgtttggtaagattgatagtccctttagtacaatggtaccctgtggcaaatgagactgtacaaatagtgtaatgatacatgctgaataaacaaaactgtttaagactgaagcaaagccaaggtccaaccatttcctggggatttggggaaatcctgtaatctgcagtttatactaagcccaatcatatttagcacattgcttctcagtgaatgggccttgatactgtatttcaaccaaataatgaagcaagaagtaagaaatctataaagaaaagctatggttcttctaattgttaatgccttgcaattatgcccctttctggaataataaaatgttccttggcagaggtcaggatctctgccactgacttatttaacagatcctcttaacatctgtcctgcagactgttcactttattagcagacaagagacccaacagacttagcctgctgtgtccctttttcacattcacacagctgtggattaactcagactttccagaagaggaccaaccagaagggatagtaatgttattggctgattctaaaaagatgggaaaaaagagcagaaacaaatgttgccctagtacaattcagtgtttttagggtgacaattaccagtctgttttaaaaaggaataaaagcagctattcctctaaaaaaggaaagtctattcatatctgtgtgggaacctaatcaggctcttgtttccagtgacgatgactccacagtcgcaccaggtctgtgacaagaatgctccttttgtatgccgataatgtggaaacgataaaatttcctttaagagacatatgtgtttacatcatgagatatgttatttgacaaaatgctttgttctcctcatattttccatgcagagtttcatgctgggttgctgggctggaaatctttgattaactagaattagttgctgaaataaaatagacacttttgtcttatgattcatcttgctgagctgtaaattatagtaaaacacataagaagtgacagaaagaagtgctgatttgaacctctgacccacaacaggcataaaaacataagattattccttcaaagagctgcatagcgacataaatattccatggtccacttggaattatgccctcttaaccaactaaagctgtgattttacatcatgtaatgagagttttctaggggtgttatggcaggcacagaggagatattaagatttagaaaaatctcccctaaattagtactgtgaatgcttaaagattttttccttcattttttttgtgtcatctttaaattgacaataaaaaggataaaagaaagttcttgttccctacatgaagagccaagggtgatttctccttttccagagaagtggtgcattttataaatcttaagactctcaacaccacactggcccttagtgtgaacatcttagctctgtgaaatacagtctaggggtacgagtccaaaagaatgggctgaaaggagagatattactaaatacagaacagaaactccattagcccaaacgcttcctcattgcagggactggtgtgaattctgctagatttttaaaaaattattattatttttttttagagatgggatcttgctttcttgcccaggctggagtgccgtggtacaatcatagctcacttcagccttgaactcctgagcacaagtgatcctcccaccttagcctctggaatagctgaaattacaggcttgagtcaccatgcctgactaatttttttaaaaaagtcttagagacagggtctccctatgttgcactgtgcctggctatttttaaacttttagttaacaaagggcctctttctggggcttcactgtgagtaaagcctacctaactgttcctctgtccaaattaattgttcccagtgatggtgtttcagtagtaagttgtaaatgcttccattataccatttattatattatgtttttctccctgtcttcttcccatccgtgctgtgagacagcatatctttgatgtcctgaaagacagcatatcttcttcatctttgcatcagtaatatatttttgctaaattaaataaaaatgccaataagtatttttctgaataagatctttagagtgatttctgttaaagaagaatgtacctttaagaataacaagagcctatgagtattaagtcttcataatgtgcctatgttttaagcacattctgcatgttaattcatttactccatacaaaaatctttcagagtaggttctattgttatccccattttcacagatgtggaaatgtaaggcccagagagattaaataactgcccaagatcacacagctagttaacagtggtttactatactattctttctctcatagaaacttgtaagacctcattttttctaaatttctttttcagtcttttttttttttttttttagttttcttaaatatttatttataattgacaaataataatagtccacatttatggggtacagtgtgatgttttgatctatgtatacattgtagaaagagtcaatcaaggtaattaacatatctatcgccttattttttttttggtgtgatgagaatgtttttttttttaattatactttaagttttagggtacatgtgcaattttcagtcttttatattaactgttacctgctttacctgctataggaatttttcaaggtggattattgtgctgtatatcagtatcatatctaatgacaataaagcacattgtatgcttattatatactatttgaatgatttttactatggttgatatatataaggtatcatttctttagctaattagagagttaagccacaggtattactgtaggatacagatggcatatttacgtgctgcaaaatgtgctgaagttctccagttggcagtactaataatttgcagtttaaaaagtgatggttagtaaagttgccttgaaatggggtaaaacattttttttaatttaaaaaatacagaagaaaatgtaagaagaaagtaagaagacgatattttatatttcttgtctagtctacctgatcacttataagtaaattcaaaatacttccttatgtctcgatatttataacaaacacatattttactttagtattaacatgaaatttatatttaataaatctatgtattattatttttgttcattagcatgatttttgtttgcaatctttcaaagtctgctgagaaattaaatacctagtttagcttaaaaacagtaaaaacattttgatataataagcatgttcatttccaactagtaatatttgttctgtccaataattaagtgaaaaaatagcattcgaataatcttatactttccttttgtgcaattttattttatcaagtatatatatttcacaatttaagtaaagacctttttcttgtcattacacagttacccatgcttgcctttattctgtgttcttttggaagcttcattatggatggaaatcgaagggcatagaagctgggcagtgtacattatttttcaagcaacagcatctggttccttggcagtcattgtgggccaaggcaaggcagccctggcatatctccagattcttatgtgggtattgctgagggatttccaggtctgccatgttgttttaatggtgtttcgtagaaactcagaaactcagaatggaacacaaagtcggtttcatggtatataagacctacatgatctggccccattgctatctttctgacacctgacatattacctcttgcccagctcagctacactggtctcttcattattcctcaaacattccaagcacaagtacacccttgccataggactttcaattatactttgcctctgcttggatgctgtcctcatataatgacatggcttactctctcacttagctcaggtctttattcaaatgtccccttctctgagttttcttgacctctctgaaagcctcccagcctaccccatactcatatacctgatcactttatatttcatagcacatatcaccaccagatttacatatctatatgcttatctgtcttgttctcccttcctcctcccacaaagtcactgcccacgtctgcttttccaaaaccaaaatgatacctggcccatagtagcaactcaataaataatatttgattgaatgactgaattaaccttttgtttactaagaaattacacattcaaatattggtaaattgacatatattcatttactaaaaatacatgattggactcagcacatgtactaaaatatatgtacacattgagaacttccttatgactcttagtttgtgggaaataatacttagatttcaaatctaatttctggactcattgatgagtttttatatcttattagaagagtcaagatgtacgtatttaaagtttacctgatgagctgaagctttgtgacaagagataaaggaacattacaaatataagccgtaccacttggagcaaattcagagaactgaatctcttcagcatggtctgcccagctcttggaaacaaaaggaaaacacatctatccccataatgctgattttcaactgccctaattatcacctttttgtatttcttacttcaagaactaaattacaaattgtttcaataactaacttttatttctgtaaataaggcattatatgttaacatattttatttagcaccctgaaagaaaaaatacttggaaaaagcagagagagagagattgagtatttcatctccacctttttttttggcaagtttgttatttagatagattgcatgtcacaagggtttgttgtacaaattatttcatcgcccaggtaataagtgtagtacctgatagatattttttttatcttcttcctcctcttactctctgccttcaagtaggccccagtgtctgttgttcccttctttatggccatgtgttctcaaagtttagctcctacttgtaagtgagaatatgtggtatttgattttctgttcctgcattagtttgcttaggataatgactgccagctccatccatgttgctgcagagaacatgatctggttctttttcatggctgcatagtgtttcatggtgtctatgtaccacattttctttatcaagtctactatgacgggcatttaggttgattccatgactttgctattgtgagtagtgctgcaatgaacatacacgtgtgtgtcttggaggtggaatgatttatattcatttgggtttatgccccataatgagattgctgggtcaaatggtacttttgttttaagttctttgagaaatcaccacactgctttccacaatggctgaactaacttgcattcctacaagcagtatataaccacaccagtatctgttattttttggctttttaataatagtcattctgactggtgggagatggcatcttattgtggttttgatttgcatttttctaatgcatttctctagtgatattgatatggtttggatttgtttccccacccaaatctcatgttgaattgtaatccccagtgttggaagaaggacctggtcagaggtgatttgatcatagtggtggatttccctcttgctgttctcataatagtgagtgagttctcatgagatctggttgtttaaaaatgtgtagtaccggccgggcgcggtggctcacgcctgtaatcccagcactttgggaggccgaggcgggtggatcatgaggtcaggagatcgagaccatcctggctaacaaggtgaaaccccgtctctactaaaaatacaaaaaattagccgggcgcggtggcgggcgcctgtagtcccagctactcaggaggctgaggcaggagaatggcgtgaacccgggaagcggagcttgcagtgagccgagattgcgccactgcagtccgcagtccggcctgggcgacagagagagactccgtctcaaaaaaaaaaaaaaaaaaaaaaaaaaaaatgtgtagtacctcccccttctctctcttcctcttgttccagacatgtaagatgtgcctgcttccctttcgccttccatcatgattataagtttcctagggcctcccagccatgcttcctgtacagcctgcagaaccatgagccaattaaaacttttttcttcatagattactcagtctcaggtatttctttatagcagtgggagaacggactaatacagatgttaagcacttttgttacatgcttattggctgtgagtctgtcttcttttgaaaagtgtctattaatgtaatttgcccactctttactggggttcttttttttttttttgcttattgatttaagttccttatagattctgcatattagacctttttcagatgtatagtatgcaaatatttcccccattctataggttgtctatttattctgttgataatttctttagctttgcagaaggtctttaattagatctcatttgtcattttttgtttttgttgcaattgctttggtatcttcgtcattaaatctttgccaggaactatgtccagaatggtatttcctaggttatcttccaggatttttatagttttaggttttaaacttaagtctttaatccatcttgaattgattttagtatatggtgtaaggaaggggtccagcttcagtattctgcatatggatagtgatatggtttggctgtgtccccacctaaatctcatcttgaattgtagcccccataatccccacatgtcatgggagggacccagtgagaggtaattgaatcatgcggaaaggttcttcctgtgctgttctcacaggaagtgaataagtctcatgagatctgatggttttataaagggcagttcccctccacacacacttttgtttttgttttgttcctttttttgaatttctttattattattattatatactttaagttctagggcacatgtgtacaacatgcaggtttgttacataggttaacatgtgccatgatggttagctgcatgtatcaactcatcatttacattaggtatttctcctaacgctatccctcccccagcccccactccccaacaggacttggtgtgtgatattcccctcactgtgtccatgtgttctcattgttcagctcccacttatgagtgagaacgtgtggtgtttggttttctgtccttgtgatattttgctgagaatgatggtttccagcttcatccatgtccctgcaaagaatgtgaactcatccttttttatggctacatagtattccatggtgtatatgtgtcacattttctttatccagtttattattgatggacattgggttggttccaagtctttgctattgtgaacagtgccacaataaacattcatgcgcacactcttttgcctgccactatgtaagatgtgcctttgctcctcctttgctgtccaccatgattgtgaggtctcccaagccatgtggaactgtgagtcttattaaacctctttttctttataaattacccagtcttgggtatttcttcttagcagtatgaaaatagactaatacagatagccagttattctagcaccattcattgaatagggaatcctttcctcattgcttgtttttgtccactttttcaaagctcagatgatagtaggtgtgtgactttttttctgggctctatattctgttccattggtctatgtgtctgtttttgtttgtttgttttgtttactagcaccatgctgttttggttactgtagccttgtagtatagtttgtagtcgggtaatgtgatgcctccacctttatattttgcttaggattgccttggctattcaagctcttttttggttctatatgaattttaaaatagatgtttctatatctatgaagaatgtcattgatagtttgataggaattgcattgaatctatttaattgcttttggcagtatggccattttaacaatattgagtcatcctatccatgagcaaggaatgtttttccattcattttccattagtatcatctgtaatttctttgggcagtgtttcataattctcattatagagatcttccccctccctggttagttgtattcctaggtatttaattcattttgtggctattgtgcatgtgattaagtttttgatttggctctcagttgggacattgttggtatatagaaatagtttcagtagaaatggcgccacctcttctttatacatctggtagaattcagctgtgaatccatctgtaaatcctgggatttttcttgtcggtaggctttttattactgattcaattttggaatttgttattggtgtattcagggatttgatttcttcctggttcaatttttggcagttgtatgtttttaggaatttatccgtttttttctaagttttctagtttgtttgcatagagatgttcatagtagtcactgagagttttctctattttgtatcatcagtggtagtgtcccctttgtaatttctaattgtgtttatttgttctgttttctttattaatctagctagtggtctattaatcttatttattctttcaaataacaaactaccaggtttgttgattttttgtatggttttttgcatctcagtttccttcagttcagctctgattgtggttatttcttgtcttctggtagttttggggttgatttgctttggtttctctagttcctctaggatattgagttgtgatattgggttgttaatttgagatctgtctaactttttgatgtgggcatttagcactataaactctgcttttaacactgctttagttgtatcccagaaattctggtatattgtatctttggtctcattaatttcaaggaatttcttgatttctgccttaatttcattgtttactcaaaagtcatccaggagcatgttgtttaatttccatgtaattgtacaattttgagtgattttcctagtaatgatttctatttttatcatgctgtggtctgagagtatgtttggtatgattttgttatttttttaacttgttgaggattatttatggctgattgtgtggtcaattttagcatatctgccatgtacagatgagaagaatgtatattctgtttttttgtggggtggagggttctgtagctgttaggcccatttggtcaaatgttgagtttagggcccaaatacatttgttagatttctggctcgatgagctgtctaatactgtcagtggggtgttgaaatctatgtttgtatgattctctaactctcttcataggtctctaataacttgctttatgaatctgagttttcctgtgttgggtgcatacatatttaggatagttaggtcttcttattgaatagaaccctttaccattatgtaatgccttcctttgtctttttaaattgttgtttatttaaagtatgtttttttttctgaaattagcatagcaatccctgcttttttctgttttctgtttgccttgtagatttttctccatctctttacctttagcctatgggtgtcactgaatgtgagatgagtctctgtagacagctcatagttaggtcttgctttctttatccaatgtgccacttcatgccttttaattgggcatttagcccatttacattcaaagttaatattgatatgtgcaggtttgatcccatcatcatattgttagctggttataattcagacttgattgtgtggttgctttatactgtcactagtctgcgtacttaagtgtgtttttgtggtgggtggtaatggtctttcctttccacatttagcactcccttaagggcctcttgtaaggcaggtctgctggtaataaattcccttagtacttgcttgtctggaaagggtctgatttctcctttacttaaaataaagcttagtttgtctgaatatgaaattcatggtgaggatttcttttaagaatgctgaatataggcccccaatctcttatggcttgtagggtttctgctgaaaagtttgctattagcttaatggggttccctttgaggttacctgctccttctttctagctgcctttaacattttttctttcattttgcccttggagaatctgatgactgtatgtcttagggacagtcatcttgtatagtatctcacagaggttctttgcatttcctggattcgaattttggccaagctagtgaggttgggaaaattttcatggatgatatcttcaaacatgttttccaagttgcttgccttctattcctctctttcaagggcatcaaagagtcatagatttggtctctttacataatcccatatttcttggaggtttcattcattcttctttattatttatttttttgtttttgtctgactgagttattttagagaagcagtcctgaagctctgagtttctttcctcaacttggtagattctggttgatacttgcaattgtattatgaaattcttgaagtgagttttttagctctctcagttcagtttggttctttttaaaatggctatttgtcttttatctcttgtatcattttattatattccttagattccttggattgggttttgactttctcctgaatgttgatgatcttcattcctatccatatagaagtcagaaatgaattctgtttttgacatttcagccatttcagcctggttaagaaccattgctggggtactagtgtggtcatttgaaggtaaaaatgcactctggctttttgagttgccagagttcttgcgctggttctttctcatctgtgtgggctgatgttccttcagtctttgaagctgctatcctttgaatgtttttcttttttttttttttaatcttcttagatgcccttgggggttggattatggtaaaaggtgggttcagttgactggctttgattctagtctgggtcttgaaggagcccctccaattactgtctccatgtctacatttcttttgttaggtgttctggtctatgggggtccctcaggcagggacgacagttggaagacaagctgtatccttaccaggtcagccctgattttctattcaagttattcctggggaaagactgggttgtaccttcctgtagaattcaggcatcagcaagaccactgggctggaagctttagtgggagtggcctgtctggatacaagaggtggggttcagtggagttgcctgccctgctatcagggtgttttcaaggcaacaggaggctgtgtccccttgcaaatccaggcagaaataggaccactgggctggaagttataacatgtgttgctcacctggctacaagaggtggggttgagtagagtcatccaccctgccttctgggcacttcccaggacatcaggaagctgcacctgctggctaagttcagacagaagtgagaccactgggctagaatctctagcaggtgttgcctgcctggctaccagtggaggggtttggtaaagttgcctgccctgctgtctgggtgtttcctgggacaagaggaagttacagctgctggctgagttcaggctgaagtgagaccactgggctagaagctctagcaggtgttgcctgcctggctaccagtggaagggtttggtaaagttgcctgccctgctgtctgggtgtttcctgggacaagaggaagttacagctgctggctgagttcaggctgaagtgggaccactgggccagaagctggtgctgagccctgtctggtaaggggaggtgaagcaatcttactgctctcaggcaccacaactgtgacctctgttggagctatggtgctggtgctgatctgttctcagtcccaagacttgtagaggtccccttggactcaagaattgcttctgtaaaatggctgggtagctctctgcctcagtctagaagtgtgatgggagggatatagggggttaggaggattctcccattcctagtcttgcacaggtccctgtggagagtgtgcccccccgccagggggctctcaccctttcccatgttagagaagttctcctggctctgcgttgagcccagacagactggtgcccagtttcactcgtctctgctctcggtgtccttctgttgccttaatggatactgacgtggtttcagagatgattggcttgcagggtcagtgttcactaacccttttgtttcttctctgtgagagcagcacacatgggctgcttctagtctaccatcttggccccctctccccacattgtttcttaattatttgcaactatgttccataaggaaatgctctcctgaatgcattccaaaataattggtgcaattcaagaatgaattccagcttacttttgtaacaatggactgggtgatttgttatctgatggattcagattttttttaagtttcttagtgtaagggtaggacctttggtctgagcctattctctttccctttctacagcttctcctcacctccacacccaatgcagcctctgccccattagctcaaagagttatgttagaggagcaaactacccagtgcttggaaaaatagtcaagaggacctttagctagggaaactattctttcaatttatttttattatttatttatttatttatttgagatggagtctcactctgttgcccaggctggagtgcagtggcgcaatctcggcacactgcaagctccgcctcccaggttcacgccattctcctgcctcaacctcccgagtagctgggactacaggcgcccgccaccacgcctggctaattttttatatttttagtagagacggggtttcacgtgttagcaaggatggtcgcgatctcctgacctcatgatccacctgcctcaacctcccaaagtgctgggattacaggcgtgagccaccgtgcccagcctcaattatttttctgttcttgacattcttgagctggctgcaggggttaatgaatgaatcaaatgggtcctggttctcatgggttacagtcaatgcttgttccatttttcttttggttgttgtgaaaaggcaattggcagaagtctcaaagtgggtgaaaataaatctgctctcacctgagacaaatttttggccctttatgtgtatttgcataaactttaattttaaaaatctgaaaacaccttaacatgattataattaccttaacctaattactaaggttgcagtttaaaatatgtacattttaaaacaaatattaaaataaaattctacaacctaaattatcctacggtgcccaaagattgctttacgagtacttgtaaggtacatttctctttaaggataatggtagaaaaaaacatttttttcatataacccaaaccaaaagttgtgatagaatgtacaaattctatttgcagttcactaagagaacagaacacaacgagaaatgagtatgtatgaacagtcgatagagaaagtaggaaacctgggttctagatttcattctacttactgttcaccaagctgatatttttatgcatatcactttcctttcctaggcatgagcttttttccttctgtgtagcaaagagattgtattagaatatgatgttcacaattctttcttctgctaccattttgttttctggtgtttgcaagaaaatcagtgcattacatggtgaacccacatgcttataactgtaagaagacagaaacaaagaaagatgacctccatctctggaggtcacctctggagaaaagggtgtgggctgaaatgatagcaattccaagaagatagaggcaagaatggatatgaaagaggttttaatggtcagcattaacagaacctctgaaaatgtcaggcattatgttaggtgctagggacataaagataaataagcctcagggtttcccctaacgaactcagaatttggtgggagaaaaaaatatgggaagaaaaaagaaattccataatttgcacagggtcaaaggttgagctatgataggagcacaaaggaggcagtagtcagataacgcttcaaggaaaaagtggttcttgagtttagactgaaaagatgagtaggattgtgacagacaggtagttttaataagaaaggaaaaaatggtgcaatagaaaaatatgcaggaggggcaaggagatttacttgggaataaacctaatatgtaggactgggagtgtagtagttcttcccctactcccgttctctcatctcaaatattaggagtgtagttgaacaagtaccttctatgctgaaaaaaaggacttcagttctttctttccataaaatcacagctatatttcctagatcattttgttgacattggagatttatgaaaagtaaaagtatttgtgatctttttcaaataattatttgaagctctctccctacccttcctttcagtctgtaatgactcgttatggacacactttcttctctgtgccaaacaagcacaaaattaggctgcttaattacgcctgtcaccatttccactttctcacagcttaacttgcccagctttataatatgtcttgcttggtaggcaaagaagtggtcatcagcattgttttgagtaggtaacaaaatccaggatatccctggagaactgaactaggcttgaggcttggtgttaggcagcatcaatcaaataaatgatgacatctccttaaggatgcctccctaccctaccctaccgtaccctacttgtttcctccaacttctattgtccccttgaatgatgtctgtcacactagaagagaatctgttacagggtaacttggctaggcctggggttccccgatattttgtggaactatagcaaatggggataaatataagggtaagagataatgtctttcagtagcactgattgaatctgtttctatagaatagtaattttttttcttcctttctttatcctctacaaataggaaggtagtatttgaaggggaatttttttaaattgaaattttaatttttgtgggcacatagtaggtgaatatttatttcatgtatgagatacatgaaatgtttggatatggacatgcaatgcataataatcacatcatataatgtggggtatccatcctctcaagcatttatcctttgtgttacaaacaatccagttacactattttagttatttttaaaatgtacatttaaattattattgacttgcattagtccatcctcatgctgctaatgaggacataccagagactgggtaatttataaagaaaaagaggtttaatggactcagagttccacatggctgggaaggcctcacaatcatggcagaaggtgaaggaggagcaaaggcacgtcttacatggtgtcaggcaagagggtgtgtgcaggggaaccgctctttataaaaccatcagatctcccaagacttattcactatcatgagaacagcacgggaaaaacccagcccccatgtttcaattacctctcactgggtccctccacaacacatggggattatgggaactacaattcaagatgaaatttgggtggggacacaacaaaaccatattattttgccccagtctcctcccaaatctcatgtcttcacatttcaaaacacaatcatgcctttccagcagtctcccaaagtcttaactcattccagtattagcccaaaagtccaagtctaaagtctcacctgaaacaaggcaagtttcttcttcctatgagcctgtaaaatcagaagcaagttagttaattcctagatacaatgggagtaacaggcattgggtaacttcacccattccaaatgggagaaattggccaaaacaaaggggctacaggccctatgcaagtctgaaatccagcagggcagtcaaatcttaaagcttcaaaatgatcttctttgactccatgtcccacatctaggtcaaactgatgcaaaaggtgggctcctatggccttgggcatgactatagtcaccctgttgagatatcaacttaggtcttatccattctttctatttatctgtacctatgaaccatccttacctgccccaaaccctcccattatccttcctagcctctgataaccatctttctactctctatctccatgagctcaattgttttgatttttagatccataaataagtgagaacacatgatgtttgtctttctgtgcctggcttacttcccttggcataatgacctccagttccatcatgttgttgcaaatgacaatctcatttttatatgactgaatagtactccactgtgtataagtaccacattttctttactcattcatctgttgatggacacttagattgcttgcaaactttggtattgcaaacagtgctgcaataaacatggggatgcggatatctctttgatatactgatttcctttcttttaggcatataccagctgtgggactgctagatcatatggtaactctattattagctttttgaggaacctccaaattgtgctccatagtggttgtactaatttacattctcaccaacagtgtacagggattcccatgtttttgccagcgtttgttattgaccgtcttttggatataagtcatttaactggggtgagatgataatgtcattgtagttttgatttacatttctctgactagtgatgttgagcaacttttcatatgcctgtttgccatttgtatgtcttcttttgagaaacacctattcaaatattttacccatgttttaattggattaatatattttttccaaagagttgtttgagctccttatatattctagttataaatcccctgtcagatgagtagtttgcaaatattttctcccattattgggattgtctcttcactttgttgattgtttcctttgctgtgcagaagatttttaacttggtttgattctatttgtccatttttgctttggttgcctgttcttgtgggatattactcaagaaatctttgcccagacccatatcctggagagtttcctcaatgtttgcttgcagtagtttcatacattgaggtcttgtctaagaattaagtttttaattcatttggatttgatttttgtataaggctagtgatggggtctagtttcattcttctgcatatgaatatcctgtctttctagccccatttattgaagagattgtcttttccccagcatgtattcttggcagctttgttaaaaatgagttcactgtaggtgtgtggatttgtttctgggttctctattctgttccattggcctatgtgcctgtttttatgccagtactatgctgttttggttactataagttttaggattttttttctatttctgtgaagaatgtcattggtattttgatgtggattgcatggaatttctagattgttttgggtagcatggacattttaacaatattgattcttccaattcatgaacacaaaatatctttccattttttgatttcctcttcactttctttcatcagtattttatagttttcctaagagagatcttttacttttttagttaatttttaggcatttaattttatttgtgactattgtaagtggcattactttttaatttctttttcagattgttcactgttagaatatagaaatgctactgatttttacatgttgattttatatcctgcaactttgctgaacgtatttatcagttctaatagggtttttgtggagtcttcaggtttttccaaatataagatcatatcatctgtaaacaaggataatttgacttcatccttttcaatttggataccctttgtttttttctcttgtctgattgctctagctaggacttccagtaatatgttgaataacagtgttgaaagtggacatctttgtcatgttccagatcttagaggaaaggctttctgtttttctccattgagtatggtatttgctgtgtgtctgtcatatacggcttttattatattgaggcatattccttctatccccagtttttttagggtttttaaatcaggaagggatgttgaattttatcaatgctttttcagcatcagttgaaatgatcatatgatttttgttcttcattctgttgatatgatgtatcacattgattgatttgtatatgttgcgccatccttgcatcccagggataaatcccacttggtcatgatgaatgatattttttaatgtattgtcagacttggtttactagtattttgttgaggatttttgcatcaatattcatcagaggtaatatggcttcatatatatatatggcttcatatatatatatggcttcatatatatatatatatgtatggctttgtctggttttggtatcaaagtagtactggccttgtagaatgagtatggaagtattctgagagatgatttttatttctttctttccggggtggattctggtaggctacttaataaattaataaattgaaatgacagagcacagaagaatctattcctaaaagaatttggtgtgtaaggttgtgccttcttttttactgttagtttttgtatactggagcatactggtcccaatttaaagcccccctcaattcccattttatcaagctctgtctacttatactttgcatagttcttctttttatcttatcagtctattaatgtggggttaattttttaggggttttctaccatggcttgaagatttggagaaggacattttctagatctgattgtgacacttattccttcaaggtgactggtggtgctgttacctctttcttgtccatttgaagattgtgaaatgccattttagagagtaactgtaagacatttgaaaatacaattttctgtttgagagctcagaatagcagtcacatcataatctttcttctccttggacagtgatccttttctgatgactaggaacaagaaattggtttcattgtggttcactgtgtagcttatttaaaataatttaattttaaaagcagaaagaatacaggcttaaaagtaagattgactaaaatggataataatttctatcttatataataattgtgaagattaaatgaaataataaatgtaaaatatccagcccagtgcctcactgagtttagttctcaatgtatatttgttgaattaatgcattaatgaattggggtgattattggaaaactagatgactggttatgttgctacatgaaaatcatatgtttataatgagaaaaggccttgtactttttctgtttggcacactccattagagatcctaaatgattgtatcatagaaagcaggtatatatatatatatatatatatatatatatatatatatatatataaaattatggtaaatatagttacatcgtgacaccacccattataatttgacatcagtttggctatatttggacaaagcatgcttctcttttcaaatacagtcatggtataacatcaattactgacacaatacatttcttaggtcctgctatagaccattatgtgtactggaaggcactgaagggtttcaccatgaggctgagtctgattggtaggacctactgctttgggttaaatctaaacaggcttggttattaaagtgtcactaacatccaaatggaagacagatttatctttaaagctagccacagcacacaaagcagtgcaaatactgttagaagtatttatttgtggattggtgagatcttcacaggactttcttaattcaatttatttaagagattggtcaaatttatcgatgctggatatgtgcttgaaaggtgcaaaacttgtctaattttatatccatttctacttttaagtgatagatattctggtaatgttgaagtgatagctagagagttcttcttctaacttcaatactaattatatgatcttgggcaagctacttgctagatcttagctcgttggcagaataaggaagtcagactaacctaaatgatttgataatgtcctttcagttctatgtgtcaaatatctcattgttgagcttaccaagattttaatgctagctactttattaaagctgccagtattaaaggtggaacattttaagccataaagtaaaatcatttcttaaagtgcttttataaaataagtaattttataattttgaaaaaatatttagctaggcttatttttacacatatacactgctggtcttttatatatcttggataaagaaacaattcaatatcccaaacaatcagtgtgaatttttcaaaattgaaacaggaaaaacattctatatttaggctgaaacagtcttcacctaagtttaaatgtttatgggactttggctaagcctgtcataagctttactatattgttgatttttaaacctcaactatgtttagaaatgaatattcattattataatcattatgactgtgaactatgatctgagaattatatgtggaatgacatttttgtagacccttatgtaatagttaatcagaatttaaccttttctgttcctaaaccattagtctgcaaagaaattttctaactaaagctatttggttagaataaatagtttttttttgttattaactagactgttaataactacactgttattaactagactatctgtgttaataactagactgagaagaaaaaatgttactactcattagttatggctcaaacagtataatttgtattagaaaattttaaggccatttgcaaaagtattctccccttctgcagattgtctgttcattctgttgattgattattttgctgtgcagaagctttttagtttaacgtagtctcatttgtctatttttgtttttgtttcttttgtgtttgaggttttagttatgaattctttgcctaaaccaatgcccagaagagttttcttaagtcttcttctggtattttaatagtttcagtcttacatttatgtctttaatccatcttgagttgatttttgtatatggggagagataggcattcagtctcattctcctgcatatgcaatccaattttcccagcaccatttattgaaaagaatgtccttttgccaatacatgttcttatcaattttgtcaaagatcagctggctctaggtatgtggctttatttctgagttctctattctgttccattgatctacgtgtctatttttacacaagtaccatactgttttgattactataggtttgtagtgtaatttgaagtcaggtaatatgatgcctccagctttgttctttttgcttaggattgccttgactcttggggctcttttttggttgcatatgaattttaggattgttttttctaatttgattaaaaatgacattggtatttttatagagattgaattgaatctctaaattctttgggggcagtatggtcattttaacaataccggttcttctaatccatgaccattggatgtttttccatttgtttatgtcatctacaatttttttcatcagtgttctatagttttccttgtacagatttttcacctctttgtttaaatatattcctgtttttttttttttgtagctattgtaactgggattgccttctttctttggttttcagctagatttttttaggtgtctagaaatgctactactgttcagtgaagctaacagttactgagcagctgtctagtcaaaattttagcaaactacttcaaaagaataatttcctgtgaaacagtgtgattaaacttgactaaatttttttgccttttattttttaaccttaatatcataaaattgtttgtcacatatataataaatataatgatgtaccacttgtgttgcctcatttatagatgctgtctttccttcctaatatgcaatgattttgtatagtatgttaaatcagaaactattgattgggtatctgttatttgcaaggcaccattattggtgctaagcattcaaaaataattagatcatatcttcagtgagcttacagtgtatcaagcaagataagatacatgtgcataattacacatgaagtttaaaatactgataaacaccacaagaaaagtgcagatcaagtgttaaggatttatattttatatctcctttagagctatgtgctttgaattctcctcagctcctaacacagagtcttacacatggaacaaattcaactgatgttagtttagagggtgagctgcgaaattattttgtaagcttatacctattcatttaatgacattcatattatccaagacaaacttaaaatcttcaatctgaatagaatgatatttatactaaaatcatatgttttgttagacagaatatggatattttaatttttgtgaataccttctatcttttcactggactcaattttctgatttctatttcaaggcccattctactaaatcttacctgatatcctactgtccagtttactcagctttgaaaaggattatggaatgtggctgtacctcttcctttctctaatgtatcagtaatcacaactcacaagaaccagctctatggaatctcagagtttatgtggtcttgccttccttaggtacaacccacttcaaagggctgtaaaataaatgattatcagagctttaaaagaagcaattaacactactcttttcctgaaaagtaattgtattattcactcaatttgaaggattcatagtcaacttttttaaaaaaaaatagatgtatttccaaaaatatgtttttctgcatttttcactagttcaagtttcccaaaggactcaagattgagtaaaattgacatttatttgatctttttaatgattgaggtaaaaagcataaatgataaccaaggactgttagcatctctaagatttcctgactctttaatactcatagtaggatatattggttatgataccagctacaggactatatagtcaacatgtttcatctcgtaaccatcttgactccattcagtatagaactttttttcactgccttaatccaagcagacattttcagaagcttgacctgtccccattttgaagacatctggctgaatttcaaaggaagatgatacaacagagtaaaagagaaaccaaaaagatgcccccctcattttgcctaagtgctagcaaagcactgactctgcttgtgactgactctgcttgtgaatttttcttgccactgagtcattacatacagaattatgaaactttaatttctttagaggcttgttatattagaaaaattgttccaaagaaagcaacaatcatgacataagcacatctggctcttgcaaattattctttattaagctttcatttaattacatgtgctgaaaggtctgtttttgattactgtaattttttttatttgtccatctgaatgatagaaatgctggaaattacattcaaaccacctgttttttctcccctactcatatggcaaagtttgagctattttctccgtggttgatgatctaggaagctttctatttattatgatagaaatgtgaccatcaaggtagtggcttaactttgattataagaagaaaagaaaatatttgaatgaagttttcaagcattaaacagtgttaagattggagtatctgacttctggttaaccacagcagattaacattttcatttattgccagttttacccaaatcctagtaaattgatggttaaggattataggtgtaaaccttcaagtagaaatggaaagagaagacaaaaaatttggaatatgagaagtggatagatgagttataactgtcttagtaaaaaagagaaagctgatacctaagctttaggagtgtaaagccaaaaagaatcaagcccagttgggagctgaacctctaaaatgcttaggaattgaaggcatcatgtatcattaaaggaacagttgtaaaaggtggaactgtagacaggatgactggttgaaaatagacataagatgatccctccctaatgtcatgcaacctggtaactaccatccctgcctcctcccttccagccccatgagcacataacctcacagaagtcactggagatttattctcttgaaaagtagaacttgagaggtttatgtcttgggacaccaggcatagctgagaatgagtgatgtgccatggtgaaaatcaggaaatctgcaggatagaccagactatgagattcttctcctgccttctcttgcttggctcatgtaatgatggcatacaagtctatacacaaatcaaggcaagaatttgaagacatctctccaagaaaatggtctagtctaagataaatgacctgtagatattgatatttgtgatttcccaatgaaaaagcagactttctgcatcattaccttatgctgaagcccataaatcaataagtctaccccatacttagaccttccagtcagctttttagaacgttgctgttatatatgaacaaacagccaatgaataccagacactttagaaaagcccctaatatgaaagagttcaaagaccttggaagaaaagagtggtaacaatgcagagaacagaaaacattaaaaacaaacccaaatctataattaatattgtcaaacagaatagagaacaggatgctataaaaagaagcaatcagagaataagagtatctttaaaaatataatggtagaaactttaaaacattcagagaagttttggaagatgaagttgcaaaaactctgtcatagagtataacaaaatgtcaaagattagcaaataaaaagaaaaaataagaaaaatagagggttaataaggaaatctaatatttatcaaatatgaatacagaggagagaaaattatcaatgaaaaacatcaaaaaagtttcctagaatacaaagacatgagtttggatcgaaaagactgaacaatgaatgtaaaagtcaacagaaggacataatagtgaaatttcagaacattcagtggaaagggaagatcctgatgcttttagagaaggaaatagattacatacaaaggaatgtatgtatcaggaagcaaaatagtgtcaggcttccttaataacaagaataggaaggcaacatatcaatatctttggaattctgaggcagaattattttcaacttagaattctataccagtcaaactacaactaagtgagaagaatattagttcctaaataattaatctcacattcacctttctcaggaagctcttgtaccaaaatgagacagttaactaaaagggaagaaaacatgatactcgggaaacaaggacaccagtacaagagaggcaaaaggaattacaagtgccatagatctgcagtaggtaggcctgaggaataaattagttcagatttggagcaagaagattgagaattccagaaaggatgtctccaagggagaaaccaggattcagagattacctgatatattcaattacgttgggtagagttttactgatttcatgcagagtttgagaattagtgatagttacataaaaattatgaaaacaaaatatgaggcaaatcttaaatctaacaaaataaaaagttgagaaataaaattaagtatagtttactacatagctattatcttcataaaataatataaaacagtaaacactaattttaaaatttgtgacattaacattaagagattggagagagaagcatgggagcacatgtggggttcaatgtaggaaagtgaaactttcattttcctttatactgtagataatgatataacatttagaatgatttacaaataaggatataaatacaagttaaaccattaaatgaattgaagggaatggtctccacagaacagggggtgagataaggaggaccagggtaggaaaatgaaggtcatcctgcaagctgtggagactgtgcactgtacattttggtcatgctctttttgttgttgttgttttggttttttgttttttaaaaccttcaagtactatttatcttgtaaagctgtatacaagaatgactttgataaaaatgaaaattatatgaaaagaggttagcccacctgtctttcaatctttggctttaatttagtgaaatcaacatattttgaggttgataatttaaagatttgtaatgtcagattgtctgcttatcatgtctcagagaagaggaaccattttaagctgagtaaatagaatgagtaataagatcattggtttgccaaagagaactatagaaaatacttcagaaaaggccttgaaacagcaatgagaatatgacgaagataaatgtggaatcccaggcaaaggcaggacctgaagagagaagtgtggtgatctgtttggaagcatgaaggaagcactttgttacctggtttgggttcagagaagcttgacttaaaaaacaacaaaactgctaccaatctggccatattctcttgaggattatgttatacgctgcctagaaataagaccctgggtaaacaatgactgccactaggccttagtggccttgggaacagcactcattattcagaaggatcagaatacccagagatgcagagtcagagctaaataagaatgatacagttcttccaagaatccttagaaatgttcaggttagtttcttaattcatgaatattaatattaaacaagtggacatcccagacatttaaataacttttaataaagattttaggcattaaaaagcatcttagaggctacttagttgaattcctttttgtacaattaaaaaaaaaaacctgaattctaaagagatcaaatcctttgtccaggatcataaagttgttgctagaaggaccagaaacagaactatggctcccatacctgtcctttttctttctgttttattatttgccttctcttagcttccttttttaaaaatagtgaaaaagaaattacaaggctgtctgagaaatctaacaatatggtaagttttttcttttgaaactcaatttcagctgcatttaaagagatcaatgtttgtcttccctgttttgcagcagctctatgccgctcagctggccagcatgcaggtgtcacctggagcaaagatgccatcaactccacagccaccaaacacagcagggacggtctcacctactgggataaaaaatgaaaagagagggaccagccctgtaactcaagttaaggtacactcgccttgcagcattgtggaaacagtttagaaaaaagtttcacaagaaagatagtgaagcaggctatgttgggcataaacagcaggaaacatagcaacataaagcaaccccaaaatgtccctctttatggtaaatttcataattgagcattgagaaacaggtgttttgataacaatagtgccgtattgtgagatctttacctcaatctgcaaactcacttctcgagagttttccccctttggattctggcttttattttttaatgatcattggcatgaattgccatgactttattgccagtctttgtcatggacttgtggcatttctcttcatgtgtcttaaacaggcagggagttaacttataggaccagagaattgggatattgaaacattagatttaaaaagaagtgcaaaatagaatttgatgtcggactctgtatggttcgttgatgaagatctctcattcaaaactagttataaatgtggacttaaagtatacttaaaaaaataaataaataaaataaaataaagaggactgtccttacaatgagggcaatgggacaaataaataaaatcataaatatgaaaagtcttaacatgatacctgatccatactgtatccttaataaatgctctttgattcatgaaaaaaaaatgtgggctttaaggaatgagttgtcattgcctaataacgcttttgatgccatatagttgtgataggataaacaggctttcccaagttatgtctgggacattaatagatgtcttctctcactaattttcagcgtcttgaaactgggcagccaggaggtacttggtgagagggaaattgatgagccactgcaattttgtgctgcagctggtacctataggtggtacttgttggttttatgattgcagttgctttctatattgaattatcaaattcaaacagaggaacaattgttttgtataattgacttatctacttggaggagtatgctaagtacaaatgctttattgtaatgtgattaaagtactgcatttggagaaattttgcaattattaaatcttcacaagggaaacagctgagaccaaccaaattaatcattggatgctatataatcactgaaattgttttgttttctaaaatttgcatatgggaattttgagattccaggaagtcttttaaaaaagtgcatcccaaataccaaagatctaaaaaagtgaaaatcactaagagaagtagtctatgttccagccaaaggaattaatttaatgccacctattcttttagattctccaaagaaataggagaacatttatgttctgctgttagaaatattgagatatgacaataggaagtttacatttaataagacagaatcacttatggaaacagactattttatgttcccagagtttgtgtttatgaataagagaacactccaactcaaagacactttgcttactcgtagttgttaaagtatgagtatatcaaacatcagtgacttgagctattgagtattaaatattttaacataaataagtcattttataagtaagttgaccaactggaactgcaccaaaccaagtctttactggatgagtaaaatgttccttggttaaattcaagtttatatctgcttttactattccatctttgtgagccagctgaattttattactcacttgaccacatgcaaattcttagagatctctctgggtaatttgacttgaccatattctatgttaataacaaaggaaatatttcttttacttattagattttttattgtatatatgggtaaaaatatatagaccaaaacataaagcaaacattttaaatttaaaatataattcatattactgaagatgttctgaaaataatcttaaagtttgctaatttaaagaactgtggttaccaaaatctctcacgtttctctttatagtcattgctttttctctgtatataacatgactacttatattaaattcagacagaatataggcaacatttgctgaaagtatcaaaaataaatatagatgatctgatgtaccttttccccctaaaacttttgtctactataactgtcaacatcagaagtcagaatgtttctgttaaaatactggttctaccacttttactagctatatcaccttggccaagccacttagtgtctttctactttagttttctcctctgaaaaaaactggagttaatattattataggtcttaaatacaccctctagtattatagtgagtattctataaatgttagtgatggtagtgatgctgctgctggtcattatgataataaagaagatggtgtggtggttttagtggttgtgattgaaatatctagttgtacacagggagagatcctaaataaacacctagaggatttccattgtcaactatgatgaaggaacaaaaacagatttactcttccagcttaaacaactaaaactcaggacaaaattgtataaaacaatggttttcagacatttacaatagtagtacaggacagtgattcctatgagaagagaaacaagtgaggcaggcactacaatttttgcagctcactattggaaggaagtttccaggcaactatgcaggaagcttcataggctccctgagtagagagacagagttcagagtttagggatgctaatgcagatggaatttgtgagacagggtaccagagaggagcaagctgcatggagaacgaatgctgaagatctgcaaaaggctgcccctgagcatttagctgagtactgatcagcacatgcatgtgagaaacaacctgaggtaaggggaaacaccagaatgtagcaaacaaaacagctgcaagattcacaaaggaccagaaatagccagagtggaaagacctcctgacacatgggcatcaagtagattccccagaagggtataacctcagtactggggaaaaattacccctacttagtggctgttctgaccttgcctaaaaatgcttagaagtaagtctagaaaaggatcaaattgttctgtgtctcagaataaagttttcaaatatttaaagaaatacagaaacttcgtcactccagaaggtaaaatttacaatgtgtagcatccattcaataaatatcaggcttgcaaagcagcaaaatatatgaataatgagaaaaatcaatcaatagaaatagaccccaaaatgacacagatgatagaattagtagataagaaagtaaaaacaactattataagagacttgcaactagagccaaatgagataagcatctgccttcctaaaaaatcacctataaagctggacaaaactgacaaaaacagtcattttggcattcttaaaaatgaccaaagttatatacaatctgagaaaatatttatgcctcttatatgtaagaatagtgggggtctgtgacattctggcctagggctattgttatttccccttctaccaggtttggttagcacaaagttgtcaggccagggcaggctgtgaggaccaagagttctgccatggtggaaagggattcacttaattgggagttggtaggtgatagccatgcccagtggtattattggttaaagtggcaattactgaattataaaactaagtaaaaaattagagtatttcaaagttaaaaaagatgtaataaactccatatgttcaagaagatagaggaaaacgtgagcatgataaagcaagacatgaaaaacctaaatcaaatgtctacagatgaacaatacagtgtttgagattaaaaatatatatatactagatgggtttagcaacagcttagacatttcagaagaaaagattagtgaacttgaagacataacaataaaactatccaaaatgaaaggcatagaaaaaagactggtcagtactgtggggcaacatcgaatagactaatgtatgcaattagaggcccagaaagaaaaggaagaaagagaaaattgtatttgaagaagtaattactgaaaatgttccaaatttgatcaaaactttaaatttagattttttagaagctcagtgagccccaaataaaagaaacatggagaaaattaagtaaacacctagcatataaatccctattatttagatgtgagtaaaggaacaaactagttcaaacatcctttgaataaagagcaaagggaagtaaattgaaattaactacataagataattttgacattcataatggatgtaaccatgttgcttgagaacctgtcctatgtataaatatacataaacgtacattgcaacgtatgtgacaaattgccttttccctatgaacacacacaaaaaaatctgtggcatcactatattatcaaacaatagacttattttctctggtagttcagtagaaaaggggcctgaaatttggagtccaataaattagaatttaaattctttcccccgttatatggccttagacaagcgattttgtcattctgacctccattttcctatttgtaaatttagaataatactggccaggctcatagtcattgacggttaaatgaactagtatatgaaaatgcttagtatgtgcttggtatataattgcttctttgcgcatgctgtttttattttctctttctaatcctccttctcaagtagtattttctggcctctctttctgttcccccttaatcaatgatattagtactggaagagaccttagagatcatctagtatcagaccctcttttcacagatgaagaaattgagccccagcaaggtcacatggttactaagggggaaaatgttctgttaccaaactctattgggtcttttaaacaacggcattaaaagctagttctctttgccttcttaaaagcaaagtgggagttaacatttgccgacaattttattttagaacacaataatgcagatcttaaaactgaacatttaaataaatatggtcatattataactaaatttctaggatgatgaaagtgttatttcaagtattttatggcaggataaatgagacaaaataaaggaaggagcttagctttcaagatcctggatgaactacagttacaagccagatatttgaatactgtctcagtgaagaaggacatgtatcttaaaatagacattctgtaaatatatgtagaaaagcatataaagaaacatcactttaaacatgaaaaataaattgcatatagcatagtatgtgtaacataattataatctatccttggtctttgcaaaaattaattttaaacatgaatagagaccagaatatagaccatgaagagtgcccacacccagaaagccacatagaagccatgctgtggcatgtggctccctgggcaggggcctagtacatcagaaaaaggctttccatgtttccatttttaaagtgcttgcaattgtttgatttaaaatatatattaagaaattagctgcagagactatttatagctacaagaacttttcagagagagtaacacaaaagcactacagagctgctgaaattttaaataattctttgtaaatgccctaggttaatttagatccctgaaaacacattaggaaattaagctgtaatgtgagctaattcagattttaatttggcaaaaagaatgatccaactacacagttaatgtaaatagaagcataacacagggatattaatgaggtttccttccgatgaatcttcaaggaggtagataattagcttcttttgttattattgtaggagaatgtggcattgtctctgaggtgtaaaataactgtggcttactaagtgataatgtgcttcatttgtcttttgtaaaaataattatttacgttaaactcttgtaggatgaagcagcagcacagcctctgaatctctcatcccgacccaagacagcagagcctgtaaagtccccaacgtctcccacccagaacctcttcccagccagcaaaaccagccctgtcaatctgccaaacaaaagcagcatccctagccccattggaggaagcctgggaagaggatcctctttaggtaaatggaaaagtcaacaccaggaagagacttacgaattaggtaaaagaaagcaaacctgtttagttacgactgatacttgtttccaaagtgctccttagtaaaagataatactcttatcttttctactgaaacataacccaatttagtatcttcttttattagaacttttggaaaaggtcataatataaatcctgctgggatggattctttagatgataatgagttcgatccagcaaatcatagacttaggaacttctatatatggtcagtgctttgacactgagataatttttcagggacataggacctggcttcaaagcaacctttcaaaagaccaaaatttatttgaaatttttatcttctatcaaagtgtatgtgaattttacatcttatcccatatgacttttgcattaaaacaaatgtgaatgacacacttcaagaacatatatgaaatactattgatatgtaggaaaagatgtcataatgtctggctccttatactcccccatatatggccaagtatctctaggaatattcatagccctatgtgaaaagtatggaggaaaaaacatgggttttggaatgaggcaggcttggacagagagccttcattttctagctatgtgaccccaagaaagttatttaatattttcaagttcagtttcctagtattactagctcataggttattatgaggattaaaacagaaaaatgcatattaaatgcctagtgcagtttagaacctagaaggcattcaatttaaaatgactagaatgaatgattatcaatacatgtacatatataagtgggatgaaacaataaatgtgaaagcagttgtcagtaagacagtgccgaataagcattaacattattgttactatactctttgtttggaaattaagtctcttaatttgttatactctttggaaattaagagacttaatttccaaacagacacagatttaaagattaaagggacaagacctagcatttcttcagattaccttccttgtattattgagtcctgaagtctaaaatgcttatttcaatagataaaataatgtataagaatagccattaacagcttaaaaaacattcttgcctactttatctgatttgatgtttcacaataatcttatgagttagatagtatattattatgcttattgtacaaatacatacattgtggtttttacaggtagaatgagttgcccacactcctgcagctgttaattagcagaaacaggactagaatctaggtcctctcacatgttactcaagtgttctttttgtaaactcacagttagaatatttgctaaattgtgctgagtctaagtgaatcttctgatagtgagatgttaatcttcctcaatgaattttggaatattggatctctacaggagcatattctcattttgagtaaggatgtctttttgggacctgaaagttttcatgccaagttagtgatatccatatagaagatagaattaaatcatttccagcatgtgaatatgaatgccccttggccggatttttggaagttgtgagatgagggaagaaagccaacaaggagataaattatagagttgaccttgaaatagccctcctagaattcactctgaaattgtttggaaagcatttgtttgctgtcctgagtatcatgagggacagagatgactgagtcacaggccctgcttttatggaactctactcagcagagcatatttcttagatcatgagctagaaatgggctgaagtaatagcacctgtgtttgaacagcactctcgtccaggtgatattggatagagatgtcctttttaccagaaaagctccaaaataaaagctgtgggaccaaaaagtgactaacttaaaaaaaaaattccatgtatagcttgggaattttttccaaactcaaatgcatatgcacatgcattgtacacatcagacatccagtatgagcttgattctacactcatttcttctgtcctgcctatgtgaggtgtatacacacacatacacacacacacacacacacacacacacacacacgctatgaaatgattatacgagccctcaagcaagtggatcacactaacatttgtcacagcagatgaaacctatcatcaaaaaattgccctctttttgtctaaaattggaaaatcttattcaaagtattcattttacccacagtaaaatgcaagatatcgttggaaataagtcagtttaatattgaagattttccttctgtgttgcttgaaatacactggaagtaaatatttattctcactttttttttgaagctttgtagttatgcgaaaaccagtcccacacatatcgcctcattgtcatgaagtgagggagctgatcacagtgggtgttcgagctgggggtggggaatgggttgtcattctcttggtaaataactgaggcagcttgatgagaagaatgcttcattaaccagccagcaactggggtactggagagtacggtgaattccttccgccccctctttcctgcagtggacatatgaacacacagatacagatatcactaaagtacacatgtggcctcacagatttttttattttttctgcgggccagaaatgactgtgttgtattatcacagcaactataatgggtagcctggacaaacatctctgcctcctgcccactcctcaaccccttcctccccataatttccccacagaagaggcaacattgtgcaccagttgtacatacaggcagagcaaataccttcccccaatatgtatacaattggagtctaggaactgtagtctgtgaggaggtgagtagacagaatccaggtaggctggagtgctggggttttctccaagggctaaaagaacccagcacagcttggttgccctggctctgtgttctatgtatattagcgtatagtttaaaaaatagcaaatgtgcaccccttccttgttcagagaatgcagctttctacaggggaggggatagtagtagtactttttaggagtctgacctcacaagcatctaataatgcatcctgtgtatgcagatatcctatctagtctcaactcccctgccctttttggggatcaggatacagtgatgaaagccattcaggaggcgcggaagatgcgagagcagatccagcgggagcaacagcagcaacagccacatggtgttgacgggaaactgtcctccataaataatatggggctgaacagctgcaggaatgaaaaggtaaaactgcttccttgtgtcactggatctgctagacttattggctcactctcatctggttctttccaggctcccaggtatcaacctgcagccatagatttgggcttccagcttgagggctgtcttgtactttactgaaatctgtcatgtagcatctgtaagcattattgttgattaacaaatacgccctttcccacccagtgtaagttgcctcccaacctacctgcctattggtgtttttctgtcacattctgaaatagatgtatcttaaaataaaggagatgtatgatgttattagaataaaagtagagtaccagaatattaaaaaaggaagacacatatgtgtttacaatgaagactaatatgttaccatgactcaccattaaatgtaatactaaacttcctgtcaaccaggacaaaaaaatgaagcaaaacaaagcaatttgcaaattgcattcatttggtttttgatccagcaaattatttattgtttattctatgatggactctgttctaggcgctggagatacagcagtgagcaaatctgacaaagacacctgctttcctagagcttatattctaataggagaacacagacaatgaagaaataaacaattaaatagaaaatgtaatggcaggaagtcaataaatgccgtgagaaaaaatagaagcaagttaaaggaatagggtgttatagggctggcatgttagatgaagtggtaaggactctctgaggaagtgacattgacatctgaatgaagcaacagtccaggccatatgaaaggcaggagcaggggcattctaggcactaggaatgatgaacatgcaggcccttggaggattagaccagcaccaaggaggccagtgtggcaggaatggcacaagagacgacacagccggggatcataaagtaaaagtgataggctgggcagagcttattattacctggtacaccctggaaaggcttttcattttattctgagtgtgatgggaatccctagactgattttgtccaggacattgacatgatctgatttacatataaaaggatcattctgcctactgtggaagattggactatattggaggttaagaatggaaacagggagactggttgagaggctattagtagactgtgaaaaattctgattatctgatagaagggtactaatctgatcatgggggctctaccctcataacctcatctaaacctaattacctcccaaagacccacctccagtgaccatcacattgcagattggggattcaagataagggattctgaggggacacaaaaattatctccatagtaccctatattgttgaatttgtattatctgttgaagttcaaacttagacactattaacttcaaattctacagattaattttaagtatttctcattgactttttaaattcatttgggagggaaaagtctgaagtttaaaaggataaaactttattttgctttggaacacacgggagagggatgagagatgaggttaagatagatacatagatgatagatagatagatagatagatagacagatagacagatagatagatagataaatttgaacttgacctaaaacatatcacactgaatataactgagtcccagaaggtaagctgcaaaattgtttcaatggaaccagaaaaccctggtttccaagttgaagggagctgttttctcagtagacaaccttactggggttgaatttggggcatgggaaaagttcattactagggatgttgtgttcatgagctctccttaacatggtctctctcctgcataatgttactgttttgcacatatattttgtgattcttgtaggctttgtttagtatctagaatcagtatctatgattgcttgctagattagttcaagtcagaagaataaatgaaggacagcactaatggattcctgtgatggtagctttggctttcttataatcaaaatatcagtcttaattttatggggttccatggggcactactttttcttctgagcatcagattttcttctgagccaaagagggtaaatattaatgtataatgtgcaattaaactggaaaatgaattatgacaaattcagtttaactctcttcaaagttattcacgttggaataatctgtttccttaaatataagatctatccattagatttatgaatttgttctttgtagctcataatacagttgtaggtaattttttgtggtgttgctgacataaaaccttataatttattaagcatacctcttctctccctcatttggacactctttgcagaggaatgtggcacagatttgggtttcctgggaaacaggtcatgagatgaagatcagcatgcaggtttattagggagtgcttttagaattgctaagggaagggagaagacaaaagcctgtacagcatagtgagaccccatctctaaaaaataaacaagttttaattttttaaaaaaacccaggactgtgcagagggagaggttgtactctggtgcagtctcaactagggtctctagcaacctcataggaagcttccaggctgccatggccattcagaattgtcctaagttggggtgagagtgtgagcttttgtacccctgcatcaaccagtcattggataagtgacgccatgggaagaggacatgaccttgagtgaggtgactctctccagctaaggcaatgctgaagagggccgacagccaagggctagctaccaacagcatttccagcagctgagggaataaatcttccagtcctgaagcagggggggatctgtgctgcacatcagtgtccactgtagcttgttacatttagtaatattagatgtgtacaagacagtctttgtatatatcataaatgtgggccaacacttactaacaggcatagggatgcttatgtctttacagtacttatagaatcatatatgtgtccatatgattacacgtttactcatgatgggtctcactgtattgggtaaatccctattttggcactttaaaatgaaacattattgacttgattggccagcacggcaccagtggagtcattgtcgactgtgtcgatgtgtcacggggtatttaggatctgttaaatatatacattgtagggacaatagactgtaatggcaccttatgagctattctgctccatcgtttcaacatagcttctgtgcatgaattgtcagtgtcctgccagcagatgtctaagttaccgccctgggttgtagctttccacacaaagaacaccagccatcttcaccccagtctaagtaccagtgcaattagatcatactatagcctaattgcttaccaaattttgttgttttgacatctctaagatagagagtattttagtcatgacaatacataacagaattttaattaggctgcttctaagtctcctcagagctaagctaagggcatctggcaagaagacatgcaaggcagggtgggcctttttaatgaaggggtagatgttaaagtatgttctgtaactctctgaccttcttgatgtttgaatgctgactcagtgaaagcattggttggaatgctttcctgcgtaggtgttatgtgagccagtagactgattacctactgatcacaactgcacatgaaaagtcagattgcacatctgtacacatgtgtcctgagctgctattcacttccttatctgggaatcacttgagaaaaatacttgacctcatcaggtgtcaaagtgagctacagtggacactattatcacactttacttgcctctgaagtatatgggtagaattaaaactgtagagtaaaagaattggagggagcattacatttgatcaagttcaatcacttcaatttgcatatgggaaaactgaaacctagagagagaaaaggacttacccacagtcatagtgtatttgtagcaggacagaaattaaatctcagctttcctgattcctagttaattgtatttccacttatagaacaataccagattcatttattaatttcctatgatatcttacattttacattggcaatctcaaagctttgatgaaataaagcaggtaataaataaaaacagcgaagcagaaaagcatttagctccctgctttctctatacttgtcaccttctacctgggtagggtattctttcctgccatggtgtccgttgctgctggcgctggaaagctaccagtcaggaaatagaggattgaatggtgctggtatagacaaagaaacaaaagaggtggctagaccaacagcagtcatagaaagacagactacatgtagattacaaagaacatggattttagagttgattaatcctgggtctcagttctccctgtgctattttctaactgtgttacttaagtaaattatttaacctctctgagtctcaatgatcatttctataaaatggagataattaccattttcttgaagggatgttttgaagaaaagcatatgtacagcatatagcttgctcagaagatgctcaattaatatcacattctttctcactttcagatggcaggcagcttgtcaaatctgttgtttagtttttaaatttttctttctttgatactctccactagtgaatgagtcaacctattggtccttggatccaaaatgtcttaaaagagaaaaaaaggctagttagattctaacaggcagcttcttacaaagtcaggatatgcatatttctttttcatttttggagtaacttgtataaactagctacctgctaggatctggctaaagccaacttgataataatactcaaatttgattatgttagtgtgctagggagcttttgttcctacttatttaatatattctttaatatgtttccacaaaagcagaattttaatctataatttttttagaaaagcttgacctgattcttgatagctatttacatttcttatacccaaatgatatttttcagtgaattaaataggaaaacaatatctaatcattggggcacattgtaaacttgttcccatttatttaagaagccattgttcattttttgaaagtgtagattcttgcatttcacccatatgtttcaaaaatatcagaatagtacatcagtattacactgatgtaatactgcccccttttattggaaaagaaaaacatactggacatcttctgcttcgcattgtcaattaccatagctccttgttattcatacaattgattcaggtattcattattgcatgacaggataaatttagacagaggatcaatatagctgtacagcagtaagtgaaaggggcttgtgagaaaattatttagcaaagtgtgttgggaatgaatgagctccttctatagctcacagactagtgaggtttggttgttttcaaaggcatatatagtcctaattaatcaggattgtcatttttgtgagcagttgactaacatgtttgtgttgcttttctatgtcaacctattctcaagacaacaacttgtactatgaagaatgcagggcacattagagatttttgcagtaagggaagaaattctaattgtaattctcatttgcaaagcagagcagtagtcactgtttaaaaaacatttgtgtactactctttctttatgtcacgacaatgaatatttttatactgctttctatgctccaaatatattattacatatatattcgctcttaaacctttccaaattcagggatgtcggtattactgtccttgtttcacagatgaagaaactaagaccagctcgggatcactttactccagcatttcctttccatcatctcatttgttccctacatctctgtgagattgatagcgcaattttacttaaaatctaaaacaagacacacatctgagtttcaaacatcaatttaatgaagtgaatgctaaaattatgagctaaagaagtctatctagatatatgtgcttcatacatatttctttgaaatgaatagctatatttatacttgcgatagtgtttttttaaaagaacatacacagatcaaaagtgctataaaattagagaaaagcaaggtaagttttattaatgttggattttacatttgaactaataacattgggcaactgtgaagttctgtatgtaggctcctggctgaatgtaatcattaagttctttttctttctgttgtcaggactacttgattggttgcctagctactagcttaaaaggccaaactcataaaaaacaacaacaaacttgtttggctcttttcttctctgtactttaaacaggaaaaaaatggtgagaatttatatataagtgtacaagttcaagatccttcctagggataggtgtaggtgtaggaataaatataaagccttgagttttatttatacatgttttagtcaaaaggccacatctagttaatgtatctctcaatgaaatggctaaaattcgatatattcagttaataatgttgcatacattctgtgaaagagttgttggttttgttatgtatggagcaaacttactaattatgaggattttatagacctaacctcccattatggcaggtagtttctaatccttaatccttctagatctaatctcttctagatgtaatctcttaatccttccagaccagctgttctcaacttttttggtctcaggggccttttacactcttaaaaattatcaaagaccctgaagagttttgatttatgtgggacttatcaaccaatatttgtcttattaaatattaaaactaaaacatcaaaaaatatttaagataacaataacaaatcaattaggtagtaatataaataccattttttagtattaactatattttcaaagtaaaaaaatagaagaatgtttttgctttacattttcatgaatctctttaatgtctgatttattagaatactgcttgattctggtatctgcttttgcatccaaattgtatcattgtcatgtagtttctggaaatctccatcgtacattcaagagagaataagaatgaataagtcaaacaatgtcttagagttattatggaaatagttttgatctagtggaccctctaaaagggtctttgagattaccaaggtgatactttgaatatatgctattctagatcatgtaatacatacacctgcattatgtgttttaattgtattcaccttaaccttaataacagttttcactgatcaaacacagtaaaagtttagaattgaccaatggctttgttctgtttgaattaaggagcaaaacagtacagttgtactatttgtgtttatacgttgccttgatgtaaaaagaattttgggtggtttgcagtgatacgtgcagtaaaacaacataaaaactaaatagagaggagattgtgggaaataaaaattaaggataggaaaataaggtaagtagggtaaagctgagataagtgaagtgcacaaaaattcttgtcatacatatttacctaattgctaaaggatggccacagactcgattgtgagcttcctggtaaccaggcaaaaaggaaatgtgttacaacagccacagtatttctacaacataaacaaaacagcttctcagaagagacataggtcttctctgggcactcacaaaagcttcagacatacctaagaatgtacctataacattcctattcagtttgagaactcagtaatttttcagggctatttcttaacagatctttcatttatcttttagatgcatttttacctacagttatttgccttagtttaggtaatgtgactgacattgaatacttgtttgcagcactttattccacagacacactttttttcaatttcattccatttgtattaagtacttactatatacaaagcatagtattagacatgtgaagtggaaagataaccagggctcaatactggctttatcactgttatgctaatatctcagagcttaagtttcccaatctataaaaatatcaggatttgagaattaaatgatttaatattcaacctcctaataaaatatcttctgtacaaattgggcatttaataaattcttactcccttcctccctctttcccagtcttcttttcctctctctcccacctttccaccttcccttctttttttctttccttcctacttttccatccatttaattaagtttgttgataagagcaaaggctttggagttagatggccctaacatctccatctgagaaatgctattaatttgcatagtttctatgcacaagggtttgttatgatgattcagtaaagtacaatcatccgtcaatactcttggagaattggtccaggaccccacctccctaccctgcagatcccaaaattcctggatgctcaagactcttatataaaatggcatagtatttgcatataacctaggcacatcctcccatattccttaaatcatctctagattacttataatacctaacacaacataaatgctatgtcaatagttgttgcattctttttatttctattatttgtattgttatttttaatttaaaaaaaattttaatattttccttccaaaattggttgacctctcagatatggaactcatggatatgaaaggcctgctataatcaacataagtggcctcattcagaacctgacacataattggtagaagagcaggctgaaagagatggttgtcatggctagcttaagttttatccttgtagataattgccagccattgtaggtgtttgtggatggggcacatttaatctaaactacattttaagaagaatatgatggtggcagtttaaataaagaatgggcgagacctttagagagatgtgcaagagtgaagagagcatgtgttttggagtcagagtgaccggggcttcagattctgcttccacaactcacaggtctgtgacttccttgagccttggtgtccttatctgtgattaataacacttagttccctgtgttattacaggttatatcaaaaagctatgaaactataagccaggtactcaggattatgcatttaaaatccattttcttctcttgcagcattcccaagaccagttctgtaggtggaactccatttgaaatttctttaaattggccttgggctcttttgcactcctgcccttccttagcttagaagctgccctgttgttgtagaaacagggcttttccagtggaaagacaaacagtatgcagaggaaggacatatcacaagtttagtgtcaggtgacttaatgctatgtcaccccacataaacaaattaatttctgaagaattcccaacctccaaattaaatcagacccatctaggtggcctttagaatccacttgttgtactaaacattttttaaatatctgagttgcagaaagaaatcaaagcacatgttgtcaggaattttttagttatttttaaaagagcacattaaagaaaatatatatagttatgattatcatcaaaacaaatattaagtttgaagtcatttgattgtaggacaaattttaaatacaaaattgagaccatttaagtgacaaattatatttttaaaagtctgctaaaacttgaacatttaaagttgggttcagtttaaaatgcaactttagaaaggctgagtagattctaaactgttttcctaagttttcacaaaacttctcaagacaatgcaagctgcctcctaagtctaacaaagaatctgtctaagttcttatttttagattcctcagagaagcatacgcgatcacttgaaaacacactgtgttgttttactgtgtgcctgcctttaggaaactgggtccatctggatttttctgagctaagaggagggtgctctgcttaaaagctatctgaactttctgcagactttgacatcccatttcatggatgttggctttggtatatcctgaagattttcctcagagatctttgcccttgggaattcgggatctaatgtgtgctctgtctaaaaatctcttaaccaatttctattcttacagaatcataactcgtccacattatctctagtccagtgatgatgatagatcttttccctttagagatatgaaatatgaacttctttgtttttgtagtagtatagtaaaaattcatatattcaacactctctcaacagaaagaccattagtcagcacttcttcatcacactataagaagagttgaatcaggccgggtgcagtggctcacacctgtaattccagctcttttggaggccaaggcgggtggatcacctgaggtcgggagttcgagaccagcctgactaacatggagaaaccctgcctctactaaaaatacaaaatgagctgggcctagtggcgcatgcctgtaatcccagctactcgggaggctgaggcaggaaaattgcttgaacctaggaggcagaggttgcggtgagcagaggtcatgccattgcactctagcctgggcaacaagagcgaaactccatctcaaaaaaaaaaaaaaaaaagagttgaatcagagctaaaagagcccttagagatcatttagtacagccgctcattttatagatgaagaaacagaagtgaagtgattgcccaaatccagccacagggtgttactgagactgggaccagtcctctgtctctctggcactcagtcctgtgtgctttccagattctgctctaatgttcacggtcctaagatgcttatggtggtgaccctaaggcatcatatggtctcaaagtgctaaattcagtcttagtgctgcttatgttgttctatactatcatccttgctaatagagataagtatggaatatattgtatctgatagcttcactaatcagagtgtaggttaaatagaacattacatttcctagacatgcctggcacatagtaggcactaaatataatattaattgatttaagttgatgccagtaacacaattttctgtaactacattttgtataaatatttagttccctaaagatcaatttttaaaaatagatttcattaagtgttcttagtaataggtgaggtggataatactttaactttttcttttcctaagaggctttctttgctcgtggcagttttaagaacataataataacaatcactaaaatgtcagtgttttaaattgtttgcaaagcatttcacacatttattaattaaagttaattctagcaaacatcctaagaagtggaatttttattatttctcttctacagatgagtatgaggttcaaagagctcaaatcattttcctacattcacacagttaatattgaacttgagagacttcaaagttttttgttttgaatcccatattctgtctgcaataacagacggacttcaccttcttcccccaaacctatccctgcccatgtgtcctgatgcgccttgaaaagaaggtcacacattatatatggctgtacatgagtttgtgtgtgcatgtgactgcacaatgcgtgtaactctgtgagtgttcatgtgagcaaactttgtgaatgttcatgtctttctcattgtgggtataaatctatatgtgagtctgtctctgtgagtctgttccttgtgtgtgtatgtgcatttattttgcctgtttttccataggtctgtttgtatctatagaagtgggtacctgctcctgctgtgcgtctgtctatccgactatgcatctgtagtgtgtctgtgtatttgtcagtatctctttgtgtctgtgtgtctatctcagtgtgcacctctctgcatttgtatgtctgtaggtatgtctgggtccatgtctatgtctgtctctgaatctgtatgtctgtctgtgtcagttgacctgggtgtatatgtgagacggtctgtatgacagtgtatgtgtgttgtctgtataagtcttcgtgtatgtgttctactcccttccctttgtggtgttgggtattactatacttgattattttcattttcagctggttggcctagggctgtgaatagagagtatatgtgaaaactttgcacatggatgtactttatatattctttacatcactgattccctctcagcattgtcttaaatctggttgtcaaaaatgtgccattgagagcagtctggcagaagtttacttttagctaagatccagtttgcaatctttgacatttgcaactaagattagaatttcccaaagtgctgtcttcccactatggatggaaatgcttgattttatttttagtgcaaccctgatttgccctttatatctttttataaataatgtcaacagcattggttctgaaataacacaaagggtgtcttgtaaaatgcattgcgcaatggccttagttctcatatcttctaggttgcagtagtcccctgtagttctcaacaaaggagatcatttgaattgttatcttcccatattgagagtcaacataattttttaagaaaagaaaccatatatttggggttctcttgcctatgttgagattaaaatatcaacaattaaattagtatccattttcttatctgtaaaatgggggcaagaagacaaacctcatctctagttcaaagaaacattttagtgagctcttacatttacaaaatcacattggtttctcaagtcctttctgttcttctaagaacatgagttctctgcttctttttcttttcttttcctttcttttctttttctttctttctatttatttattttttgtttgtttgttttggagacagagtttcgttcttgttgcccaggctggagtgcaatggcacgatctcggctcaccacaacctccacctcctaggttcaagcaattctcctgtctcagccgccccagtagctggaattacaagcacctgccaccatgcccggctaattttttgtatctttagtagagatggggtttcaccgtgttggccaggctcatctcgaactcctgacctcaggtgatgcacctgcctcagcctcctaaattgctgggattacaggtgtgagccactgcgcctggccgagttctctgatcttaataatactccttcaagggaggttggtagcaagtttagcctttcttattccagaccaccaatttgattgccatgaaatgatttctccaggtctaggcaaacatcaggaatgaaataaagaacaggagcctttgaaatcggtcatgtctaaatccaaatctcagcttctcagcctaattaatgatcaacaacatgtgtattactaggtatgccacctggggcctgttacttacttttctgagactatgtttactcacttgggaggtggaaatgatgaacatactgtataaggttgtggaaaatattaaataagataatatatgtgaagtaaggtagatgcaaataaatattcttctggttcccttattgttgtttgcaaccacatgacgtcacagagcgttaggtaggaagtgctcaccatttgatgtatgggttaggtgttaggtgctagggattcaggtaaatattgactggtctctttctgacctacaggagagtgtagtctggtagtctgatttgggaggtaagacagatccatgaaaaggaaccagacaatagagggtctgtgtgccaaatgagtgaatgaaaagtgtcgtaaggctaattaagctaatgaagataaaaggaggccgtcctgatcaatcccttggtggaaaaaaagttctgtagaagaggagagacttgaaatgccctcaaaggaaggacaggcaggctggagtaggtaggcaggagtgtctaggcagggtcctggcatgagtatggttggggcatgtgtctgcatatggggaataatggctggaggacagctcaatcaagagagaagtgtactctgagttagagaggggcaggattcagatgatggaagccttgaatgcctggctaagaaagttaacccagaggctgtatgtatggttgtatgtatgattgtgtatgtgtgagaaagagagagagagagaataaaggataatgatggtagtggtggctgaggtaaatggagtgtatttctccacatagataaacttggagacagtcaatctgttacacaattatagaagcaactaataagttgctcccactcttctctctgggagaaacctcagggtgatataggattgtaaatctacatgaaaatttgaaataattaacataatttataggcatttgtgactgatgaatttttaatacaaaaatcacatttgatgttcacagaaatcctgtgaggtaaagattattgatatcttttattagcccccattatagactaacaaatcgaacaaaaccctgaaaattcatgcaggtaactctaggttcaaataccagctctgctctatataaattctatactttttactgcaccacactgttaccattattggtaacttgaaggaagagcccatgtcttactctttgctcttcccctaacactgagcctaaaatgctcattgattgtgtgcttgtgactagagcccagactttggaagaagtagttactcttacggagatgaaaatttattttcatctctctgcccttttgaatgtgtctggcattcctcagatagagtaaattcatattataggagggttgcctcttacaaggccctagaatactgaagtctgtttcactgtctcaatttgcttgtctcactgccacttcctcatctgtcttctattctggaggttgtggatgcatcgccctcggtccacacttctttgtctctgcctcctggtatgtgtgagaatagatttctctcctttcctttctccctccctaacctccttcctaccctctctttccatttctgctcccccattgccctttcctgttccccttgttcctcttatttttccaccctccctctctccttccttcacttctcactgcaatcttacagcctactgcagttagggtgcagtctctgatcattgatgatttttctgcaagttcttatagttacaggaggcagctgctgcctctgcattcttctatggcagggctctagtgtgtaatacctgcatacctacctaccctactcctgtgtccttgatagcagcacagttaacaggagctcttgggtgtgcatctccaatgataagtcctctaaagccgcataagaattaaccatatatgaaacagttgcacagcctaggggggctgagagacaaccagtacacatttattcagaatcaaatgctgatgtcatttatttaaatggctgtgcaatgaagtactggatttgaatagcttcagaaagttaaatttataaaataaataccaacttgcaaagctttggaagtgaacatggatgctgagcttcctgatttcatgtacctaaaactgagtaaagtttgacaaatgaagctatgtgaatcgtagaaggaatttagtcttgatgttaaagctggagatctgtcttctaggcctacatctgagtatctgtgtcatcttggggaagtctctaaatcttactgagtctcagtatgttctgtaaaattaggatgattgtgccttacgaattagataatatgtgggaaaagactttacaatttataagatgctaatggccacaaagtctgaccatttaccatatttattgtgtgaggaggaagggaaatgagtctgatttctgcccagaagggaagctttatgctgtgtgcctcctgcctcctgtttcattggaatgaggtagactcaaagctgccttaggctgatagcataaataagtagcatgtcatcacttttttttccataaataaaacactttttgtttatcatctttgtgggtggtggtgagaaggagagggtgtagaaaggaagtgaagtctatttcaagcaaatcaggtcggttgtaccaaatatctctggctcaaagaattagctgaggactgaggattagctaaatgtagatggatttacagatcagcataatacaatgagatcaaaacactatgagttagtgaatttcatatggttttgtacaaactggttttccagaatcatttcctcaagtttatataattttaaaaggtaatttaatgagctagaaattttctatagttgatatttgaggcagtattaaatattgctttaccttcaagtagaaaccatactaaagagaagtaaagtttgcagtcaaatcagcttacacagaaggcaaactatgtaactgtttagaacaatagacaatgaatttttagaattttgtattatttttagttgagaaactataattgtcaatgaattttaaaataattgaaagtacaagtgtgagtgcttcaaacatattaatcttcaagggaagactaatatttcaaacctaagcatttctaaatagatcatatttattcaaacctaagagtttctaaatagatcatatttacactaagactttatttggtttaagcaatctaataatccaccccttcatgtcacattgccaattagagaacacaatgtacaacctgaagccttatataagtgacattttaatattcagatcccgaagcagtcgagaagtttggctctctagaagcaatttttcttctactcctttggtcatcacctcagttatgcaaaattaaaattttgatcataacgcaaattcaaatatgagttttatttaatcagggtgaaaagcagatttactcctttcctaggttatacacttctttgtgtcaaatatatgcagtagagttaaataagaggtatattataaaaacttttgtagcttgtataattattatattcatgatcttctcttaagtcattaattggtctgaaaatgccattaaaaattttacagagatttaaaaacggctaattataacattcacttgggaagttatttgttctatgaacaactgcctttttccctgagactgttcaaatccattttagttaattctcgttagacaatcggttttttttttgtttttttttttgagacggagtcttgctctgtagcccaggctagagttcagtggttcgatctctgctcattgcaacctccgccttccaggttcaggtgattctcctgcctcagcctcccgagtgcctcggattacaggagcccgctaccacgcccggctaatttttgtatttgtagtagagatggggtttcaccatcttggccaggctggtcttgaactcctgaccttgtgattcacccgcctcggcctcccaaagtgctggaattacaggcatgagccaccacgcccggccctcattagacaatctttaggactgaaggaactgtctctcggtctcacatcctgcttaggctaattttccaagtttctccttatctgggcagaagtgctgttattcaagctgtaggaataaacatgtgcttgtttattgagcccatgtcctagagcccttggagatgtttttatttcacttagagattttaacctgtgatctaagcatcatttctaattcagcgggaaggattgtttatgttgaagcacttgcttttagaccaggaattcagagtccacattttaaaatatcttacattttattttttgagaaataaagttggtgcagtcgctacccttgctggtatgacctacaatgtgctgcatttcagtttctaatttctgaatgtgaagatgacgagccttgttttttcctaatataatgacaacaaacacaaagctctacccaaaatatacattacattgtaaatatttcaagtttgtgccagttaaggacagttgtgaaggacaggtgatttttattctatttacttatttattttcaccattgtggaaacagtggaagggaataaaagcactcgcacccatccgctctgtttgctggctctctgatgacaaacggccgatatgtggagagcacatacctcatttacatcagatgcataatgtactctatctgggatattagcttctcggtcttgcagtgttgcctaacacacacagtgatcagcacattttttgagactgcaataatcagaggaatgtaacagtgatgtgggaacaagaggaaataacatggaataataatgtacccatcattgttctgttgtcatccctcctagccagtttggtttcccttagagcctaacaaaagcttcacgaattcaatggaataaaacatggaactgggtgcaaaattaatacatctattcccaagctccatattcatagaaaaaaggaaaatattgactacatagggaacagactttccctgaaagctttgtggatctatgcatatgcttatgtaatcttcaaacaagttgtgcagccttttacaaatgtgtctagcctcatttaatctcaagtaagcctgtggataccacaaaggaaaaaaaatgaaaaaaagtcagatgtaggaaataaactaaatcttcaaaaatatgcaaaatataagttcccaataaaatattatctgctacattaattagcaggctgtgtacaaaatttattcttagcatgctaacctcttcacggtttgcacacattgactcaaataatgtcagagcagttttcactcatattgtccaagattttatcaagagttcagtcctgcaagtattttacaaagtagttgcatgttcctgttctataactgcttgcagtattcccaaataagtcttacacatgagttcaataaataattggaagcccagatgtttgaaacggatatagcagatacactgtagctgtatttaaaatacagctcctttccctttgtcctcccatcaacttcacagcattgcactctgccattttcagttctcttctaattaaatctagatgcgcggtgagcatgtacgtgttcccacacgtgcccctctctcatatgcagcacgtggaggcatcctgtattattgttgctgacttgagacattccagcaaggaattctgcttcttcaaattgaactgtagcattctttgtcccttaagctcacctcctgataaggaaattacttatattgagacatgacttactgcttcacatagcaaagaactaaaaattgggtttaaattcctgtcttgaactgagcctgactcatttctgtgtctctctatagtacgactaaagcaggctcttgtcccgtgtttgataaataaagtaaaaaatattaggtatcagtaaaaactaagaacattcttgaatttggttttaaaatatagctgcctgattttcaggacttgaaagaaatgtgtaggaaatttcattttatttactatacctttagtttattaaatttaacatttttgttaatatatacttctccatccctatgcagttttttaccttataactaaaaatgatgatttctaacttatatatcttagtttttccctctttgaataattatactaattcctgcaaatgctgtgacattatcagagaaaagttgttttatttttattgtattttttaagagatagaagagtattatcgttacatttgggaattcttaatttgtatcttatttagtctggtgtgcaatgtgacaccagttaattctatgttattttatggtaactacatgttaactctgttggaagtaatggtaattatactgtaattgatatcagttctcccacatctttggaaaaccatacaattaacacatatccccacagttggacactatcttttgtcttttgtaatggtgccatattggagtactgttttgaaaagcgtttctaaatattttcttcttcttttaaactcattttaaaaatttcaatttcagaatttttttttagtttgtatgaaatgaaaacagtttctaaattttaattttacttcatcttaagaaaagcttcttccacaatcagacatagtcctgggttatttttgttttttatttgaatactcatttgtgacatcatttgaccttatttagtgcttcttttttcctagaaggaggataacagtagaatatacaaaatcttgacattaaggagttaatcagcttttttctgaagaaaggccctcttcttagcagcagtctttgcatttatgttactttacttgcagacaaaaagagatgtattctgggctagtgccaccataatgagtctcaaactagggacacagaggaatctttaagccacattcagatgaaaatgtgttccctctgattttccctgcatcctttccctgccttcccttgcctttgtgtcccttcccttctattgcttttgactatggtggccacggaacttcagaagtagccaacagatgctttttggctaagggtgaccatgctttggtaggcttgtttgaaaaaaatgcattgttttttagtgcttttcttgagatgaataattcctcagaatttttttaggcgtgattttatcaatgtgtgctgcagtatagatcttagagagaaagaaagtcaaatatcatagaatcataagatttcagagctggaagaaaccatggagataagttaacttaactccctcattttgcagatgaattatacagggactagcatagttggtagagtaagagtagctcagtggaaggagcaggagactgagagtctggagctgagaggcatgttctggatctgtcaccagccggcttcaggactgtggtaagtgtccacacctccttggtcacattgctgtttgaatgaagaggccttacatttccttctggcactaaagctttctcatgctccctatttttctttttaagatatatgttatttgtgcagcatacatatttttttaaattataggaaaagctcttaggagatacaatatgcttatatatatcataaattaaaacaaatacatggtagcagtaccttacattttcccactttttgtgtttatgtttctgagggaaaaaaatcttcaaatttatcagttttccagctaaaactgaaatggaagctatatttctaaagaaaatatttattcttggttcgtatagctttgatgttttcaacttgaataaactgcacttgtgtttccacaaataatactaaaaagtacacattataaattaaacaggtacctcagatgaggcacttagattttgaactaatagaattcccaagatacctttttggacaaagacatttgcttagctggtcattaattttattgtgacactctttgttcatatggtacatgttagaataacagtatcttattggtggtttaggtggagatagaattctccactttttaaaccatgtgttcagttttaataggagtttgtgtaattttacagtgggactttttgtgaactttttactgaaacaaatggttaatcagagaatattcaggaacaaatctgcatcatgcctctgtacacgaataaaaagttgaaaccacatataagtaggagttaggctgccacacaactggatttgcttaaatctgaacactttataactctacttgggagttgcaaacttataaataaccttgcaattggttaaaaccatattaaaaccatatgaatgagacagaaagcatttggttaaaggggttcagtaagcactataatcctgatgaaactaatttaattcagtggcttccaagcctaaaagggtctcatatcttcagagttaatgctactgtatcatttatcatctgatggtcagtgacaagagtctaaatgtgtgttacaggagatgtctaggatgctgtccttgccgggggtgtggagacagaactcgcttattttggagtactcttcaaatcctgagggaaacttgtcatacatcattggagaatgtttttgaaaggtccataaaacatctccacaagaagctctgcagacattagttcatttcagcaggcatgtgctgcatgcttctctgcttgcagcgcacagttctctctgggcatagagcaggtcgtgagatactttccctccctcgaaatgcttatggtccagtggcatatatcagcattcctagagtttatctcaacagcttatagcattgagattctgtttcttgcctcaagtataaatcttcctgtttttgaaaacctttgttaagtgcttccttccctttaaaggacaacttttgaagaatcatagataaatatatagatggatggacaaggctgtcaacagatagaactgctactagatcctaaagaaaaaagtttctagataattgtttgtgaggctaataggaccttatctctaaaatatgctgctttattatttgataattttggaaagcaactagcacctttcatggcataagaggtagaagctgccattgtattagttggccagggttgccgtaataaactaccagagacagcggacttaaacaacagaaattcattttctcacagtactgcctggaagtccaagatcaaggtgttagcaggttcatttcttctgaagcctctctctttggcttgtagatagaggctgtcttgatgtgtcctcacatgctctttcctccatgtgcacacatccctggtgtccttttttgtgtccagatgtacccttcgtataagtacaccagtcagattggattaggacccaccctaagagcctcattttaacctaaccactgctttaaaggccccgtctccaaatacagtcacattctgaggtactaggggtacctatgaattatggggaaacacaattcagcccataacaaccatatttactcagcttggatatttccaaatctcgtgaagttatttcactgggattacagtgcctaaggatctcccttgaccaatgtctttgtttgcatggctttaccaggattatcttccctaggaatgttcttgtttctcaggaggaattaaattgaaattaatataattctgttgtaacagtttattctattaccctttcataagagattggcctttttaattaattcaaagaatgaattgctaatggtgaattgctaagcaatgtaagagatgtgtaaggatattttttgtggagatggttcagattttagggaaaattcttcttggagagccctttctagtgataataataaggcagattttctgtatcacagctctgggccaaccctgaccaggagatcactctactgtttaattgacttacacaccttcctttgtatttatctgtcttttaattatttatatttcactgctttaaataggatctgaaaataattgcattttatttaaaagtaaaattaaaatggaagaagaaagagaagcaattttaccaagattaccaagattaacaaccagagagcctagtatgtgcaacatcatgagaggcacttatgttatagagataataagacatggatactgtaccttgaggagcaagttgaggagaactggaaacagacatagaaaccaataattgtaatatatatttttctataaatgtggtgatggaacaccacatttggtgttagaggaaaggggttaggggtgttagaggaaaggggatgatagattcttcccagggctggtggaaggaagtcaacaaaggattttgtccagagcagatgttttaattaggcttagaaaggactaattatgatgtcatctggaagggaagacatcataattagaaagaaaaagtggcattcggaaatacataggattttggaatatcatagctagttcagggagctacaagaaattccattttattgtaacagggagtataaactagagtgaataggatatgaagctgatgagggagcaggagccagatcataaaaagacatgcataatttacagagaagtttggttcttatcatacaggtgaaggaagacttgagtgcttaaaagtagtgaataattatccagctcctacatggttactaaggttgagatttaaagttacttctgagttacttagcagccaagataaaatggaaagcattgattgggcgcagtggctcatgcctgtaatcccagcactttgggaggctgaagcaggcagatcacctgaggtcaggagttcaaaaccagcctggccaacatggtgaaaccccgtctctgctaaaaatacaaaaaagttagccgggtgtagtggtgtgcactgtaatcccagctacttgggaggctgaggtaggagaattgcttgaatctgggaggcagaggttgcagtgagccgagatcatgccactgcactccagcctgggcaatagaatgagactctgtcaaaagaaagagagaaagagaaagagagagagagagagagaggaagggagggagggaggaaggaaggaaggaaggaaggaaggaaggaaggaaggaaggaaggaaagaaggaaggaaggaaggaaggaaaaacaaagcatctttggttatgtattgttctattgttgatacaggagaaaggatattgacctttggataaggacactgtcatcgtagtttagctttgagatacttagcaacattaagtaatatctttaacagaagtggatatgttatgagttgctgtattttttgcaaagcactcacatgtataatctctcatttaatcattaagcccttgtggcatgagcattgtctattccattttacaaaggggggaacaggctcagagagatcacatggtaatctagagttattattcaaaattcaccccagtacaaatacatatctaaattttgattaaatgacttaacccatataaaaattctttttgaacctcaccttcttctggttgataacaatagtattttctctgtagtattggtatgagattaaaggaagtactcattggaaagggctttgcacattgtggatgatcagtgggtggcattcttccctgcttctacaccagtagatatatttatgctgtgatggcaaacacagttggaaaacagcagttagtccgtaactaattcttaagtgctagcacaattttggtgttaaaaatgtatgagaaactagacaaattaatagctttagctgaaaaaatattatttaaaaatgaggttcaataatgaacctcatttcctccagccaaagtctatattatcatgattacttactctagaaacatcacaatgtcactaggaaagtaagtcctatacctctaaaataattccctcaaaatataatcacctttaaaagtacatgtggttgctttccagtgtaaagcctacatttttgatcattcattaaattactaaatgcataataaaggatctaaaataaagtataacaaagtgacagtgtttgttaagtcaataaaaaggaaaccacatgtctggttaagtgatgtttctggagaatcacagcatggcaagatacgtctagaacaaggaattaaagaaagtcattcagagtaagagacagaatatctcttagcattgtacttagcattgtcttgctttcaaaacaaaacaaaccttttattttgaaatgtgtacttctttttaagccaagcatctatgatatgtagtatcttcttttgccagagttttgcgaagacttcacaaagatggattgtattaatctgcagaaattccaagttaaactcaaaatatctttttcacattaaattatataatcaaattgcatttttctattgtgctcttctaaaattgcttatttacctcttttataaaatatttaaggtgtttttctgaatttccttgttttgattattattgcccttttagatacttgtgcagcatgtttttgatttatgtggctagattagttatgtggccttatataaacctgcaagtatttatgaacactaatactaagtgttctgtgagatatatagaaaaggtctaagatacaatctctggcttgaaaaatcttttgatgttgtcgagggagacttggtggtgcacatgaaccaaaagtccgattctttaacatagtatgtaactaggggctaattacgtaggcaaaactaagactttttgtatagcagagagtaggtagatcagagagtttatagagttcatggaaaacttgggtttttccatatgaataggatttggcgaaggagaaacgagaaggaaggatgatcgtggtattattattgaaaggcaagtcactgccaacctcaaccagaggatatgtgacaggagaactgtagaaaattgagtttaaaaaggtgtgtggggagcagtgtatgaaagatcttgaaaaccatgtagaggagcttggaggaaatgcagtagacatgggaagccacggaaggttttgaatcagagacatgaagtagaactctgtgaagagtgtgagtagaaggactggggaggacagtgccaaggatcaggcagatcagaaaggaggctgcagcagtgagataggtgtgtgggcatgaagacatgtgctggggtagttagtgatggcaggagggcattgagagagggttgagggcaagaggctatgtggaagaaaaatcagcaagcctggatcatcgcctggacagagaagggcaagaaaagcagtgagacaaatcacactgacccctcagcaccaatgtgaacacaggaaaggaggggaagctgggtaaagagaaagctgcttttgcaggggagtctttactttcagtttaggaaagagttttcctgggttggaaatacatcaaaatacacaaatggaaatcaaactttcataaaaattgaagctaagagctaggatgaaaacgacaagacttatttagcttccactcaataacctagacatagctgaaactctgaggataagatatcatctcagaatattgtcatggccttagagaacttttatttataatacatatatttgttatttttcttagaaaattctgcgtcaggaatacacacaaaacacgattagtggggctgtagtattaaccttccctgcaaaattccttatcattccacatttgaaagatttttaagtctttaatatttaaatatgtattttaggatgcaacaacaaaatccttatttacctaagaaagaatcataccagaatccccatgtagaaattaggtgtttctaaatccataattatatgagcatagaaattatttactgtcttatatatacataaatagagtatttggcaattagttcataacacagatttaggtttatttaagagagtcaatgtagagagtatcataattataatgcattttacacataaaaataacatgagataatcattttttacctgtattagctatgctatagataatggccccttagttgtatgttccatggctgccgtgaatgatcccccatattcagacactccttagaaatgagcttttgaataaaggttagtaaagtacctctcattcagaccattggaatgaaatataccacatcattgaccagacgtgtacttaaatgaaatatatttgtttgtaaagcagcaaacaaaaaacctctcagcgtgtgccattttccacttcagtttgtggcaaaggggaccatgttgaaataatttgaggcctggtacacactggtcagtcttggtaatgcagaagggagggacccagtgcattattacatttcacgtgttgtttttcaggagatggctgcaatcagtcacttcgcatatggtttgaaaaaggcttgtctctctggcaagcaaactgttatttaagtacacaatccactctactactgaaacagttttgccaaacttatccaagtattctcacatgcttaaagatggtataaatatcatttattgctagccgttttcttcagactatatggaatgtcttcctgctgcctgatctaagtgtcccagtttacattatggtctttactgcctctgtttgatggagtgatcagtaaaaatttaatgacactataaaataataaaaatgtcattaatttaccacggatcttggatgcagtggttgtaaagttacattaataaacagaatattttttacaacaaaaagcattgttacgtgggaacgtataaataacacacataaatttaagagcaattttactgttagcacacacattattatggaatagccaataagtgtataaaacatagtatataaaattttattaaaatatactgtgcacatcaaaaattcagcttttatctaagtgcaaagaaaagccattattgtgtgcttactgtttcattgctgttctttccccagatcacaattttacatttgatgccagtaagaggaagttgatttttttcctagatgaaaacaaacctctgttcttttagttaccccaaattcattctctctctccacccatgcaaagacaaaattgatcaatcttgccatggtagggagggaaaagttgctaatttaatgcaaagttaaaaataatgcccgaagagttgaatggtttgttcagtgactctggaaattagggataataatacagcagtctatctgtcatcagtgaggctgccccgtcattgactctgataatacgtgaagatgatggatgctaccgtcttgtggcttgtaacatttaacattcatcagctctcactaaagggggctttatcatttaaatatctttatttaatatgcaacatctacctcatacatcataatttcaaagcacttagagagccaacagtcctacaacacagcagagctgactttaatttttttcaataacttttatgttgcctgcatgtttgtgactgacaatgcataagtaagtgtctgatcacattgctgcatgtaaaatccactgtcaacatgaagatggggcagttttcctggaaggggtgggattaaattagcattgaggtattttgcttatatctccaacatatcttacttgggaggtatgtatatggtgagagctagttcaagtgtgtggaaatttggacttaagaacttgccacccacagtctatatttgttccatataggggcatgctcatggatgcttaatgacagaagtttaagcttgttggaaccaaagtatctttatacttctctctgtgcccatgtccacatcctgtatttactaggctcatgttcaacctcactggtaaaatctttgcttagctcagctgcccagacgtaacttgtagacatcaggccctcttatcttatggttatgtggctggcaaataaatattctgagctattctttgaagaaaagaacgaaatcttctgggagactaggtggaaatttatatgaaatggcatggctttgcagggtccttctttaatctcaaacacaagtgcttaatattaccaaatctaaaatgcaacccactgcccaaaacaatttctatcattgatttattttcttcctatttaacaagtgtttcatgggatattcttccttgacttctactctgtcaaaatattgatattttaaagggaaagtatctctgcagaagatttttttttcaatgaagttagaaaaatgtatgacttcaaagacactgtgaatgtgttgttgaatgttctgaatgttttttgttatgattaaaaacaagctgatactactgaattgtgagtgcacttcattttttataaaagaaaagatattatcatcatgtaagctttgttgtcttaggattttacaaaccatggcatgtaattttccctcttctccttccttgtcaaaatattgatattctttcaggaactttattttattttattttattttactgagaatattttccagtaaaatcaaagagaatgagtgactagaaagatacttgaaatatgcatattgatagatagcacggtctgttgattttcagagaaagttgtttttcctcctatgaaaatacagttaaaggttgttcttccaagaagattgcaggtgtcacatcaaaactccttttgcatttaacatagggaaagcattcacatgcaaatatttgaaatgcgaaacaatgtgataaaacaaaggttgaatattttgctttccctggtactactcatctccactttaattctttttctttacatcatgacaaccaaagtgctactcaaaaatagaaattggctgattaaaagcagctgtcctttccctgactgcgtctgaagctcccacaaggcttatagttgctttttgttgtgtcctgcatctgggttaatttgttcttgtgcaccagtattttcacataggaagatattagggaaccatacttaacttggtttttattttcattctgttttttatgagagtcatatttcagaggtttccctacatactgctatttaaactagtgagtattacccagttagggaaactcgtgattgtaatttttgttgcaaatctttcatagaaatggtgtagattaaagcaaggtttatgctgtgttttcttccaacacagatttcaacatattccatgacgaaggggaactggaagacttcctgcacaatttgactgatgggaattaattatagaaatataatgatattcaaaaataatcatattagaaagcacaaatgtagtcaggctgtacaaatgaggcagagactctatcaagtaattgtatgtttgctctttaagaatatttccaagtttctaaacatcttacagaagagaacactcagagtgtttccatctaatgccgaacatgctcagtacagaactaggtcattgaacaatagactgaacagcaatcagcactctactgctgcataatgcattaagtataacatgcagaaaccattcccggagctggaagctgctatttcatgtctgtaaattcaagctgacatgacatttaatattgtttcatagtaatgaacaacaaggtttcattcattcataagcacaacacaaagccaagtttgagtcaggagagtagtgaggagacgagagggggacatgagctgtttttctgcagacaagaacaccatattaatgatggtcaatgagcccctctgctactgatccagagagctgcagagggagtgttcactgtggtgcttcagactcctactcctagaagaactggtgaacaagtaaaacatctctgggtttccctcctaaagcagcaggggtatttaactttcctggctccatggctggctaggagtgatgtcctccttttcagttcccagaaaatcacagttgaaattctgagacaaaatagtagtatcaatcatcttctggttggcctggtttgaaatatttgtttttgaaatcctcgtgcataaaattctgatttgtatttccccaggaataccaatgcaaactatgatctctaaatgagaaaattcctctcccattaaattgagccgtgtattttaataagaactgctctttcaggtttttgcattgttggctcaaccctctctattgcgttgtttttagattactggagcaaatccgacagagagaagatatgcatagaagctctggcaggttccctgtcacagctttcctttccctacaggtactatggtctagatgctgtcagtgctgtccatgtcacaaacagctttcaacggaatcttcctgaaagattttcagagtccacattggtcagaaatgatatttttgaattcaccttttggccattaagcaagatagaaactggaaggaaatggtggctgttttggaaactagaataagcctctgattatttgttcctctaggaaagaacgcgctttgagaatttggggccccagttaacgggaaagtcaaatgaagatggaaaactgggcccaggtgtcatcgaccttactcggccagaagatgcagagggtgagtggcttttctctagttcttttctgctgctccatgtgtttccaaatgtgtgtctgagctagatataggatctttatagtttttcataggagtcatcactagatttcttaggcaaagcaaaggaaatgtcactcttcaactacgtatgtatgtaagttatgttgtgcattatagtagaagactttaagaagcagttagatcttacattaccgaatacttagcaatccaagtacttcaagttaccatcaaagttttaaaataaaaggatcctctacatttcaatgaacagcagaattctgtgtttcatccatctcactgcatttgtatttaaaaagggaaaacttagaaaggaggacttttaaatattattttatctttcattgacaagtaataattgtatatatttgtggggcataaagtgattttgatacatgtatacattgtggaatgatcaaatcagaatatttagcatatccaaatcaagtgattcccaggtacaatcaaaccattttggggattaaatgatagtttgcagcagttttagcataaacttaataattgtttggggaaggcccagcctgtgcctatgcactaaccatcactaacgtctttcagaagtctgggtggaaagaccagccttcctctcagaatgtttacccgcaccaatatcaatgcctgttcgcttcttttccctttttgtttgtttgttttaaatgcacaagcagcacatcagcagaaattgctccccagagtctgggtacaatttatgggttaggtcagcacttcagtagtaatgttgcctggttatttactgtgtcatcacagagtagagactggttttcccattagctgttcctttggcagaatctgtcccaccagtcagggaagattaatttgttctcttcggagtaacatgatacttcacccatctcaggtcccagctaaagtccttctttagcttaaggggaagaatctcactagtatccctttaactggcagggtttcttccaggaccctaaaatccctcgaaaacacatgaagacacttcatagcagcatctaaactgggcatggcttttagtgagagcctggggccatcccaggcagcccagaaatccctggaatgaggactcagagatgaatagtattagacattaggaagcccttcagaaatttttcagaatgctaatttttcatactagtaggaaagactaatgtttgatgatagtttgggagaccaggtgttaaaataaattctgattaggatgtatatgtgtctatgggagtaaagagggagggagggaggggaagagaagagaaaggaaggaaaggaacgaagaagagggaggatagataggaagggaggcataaagattactcaaaaccagaaatatgcttgctgtcttccttgaagaatgtgtatcaacagcccattattttcataggcacttaaaagtgcaggttttccaccgataagggttgaggttcctctgcctagggagccaggaagtccaaatgatgttacttgcacagttaaccatccgagtgcaacacagagattgtggctggcctaaaagcctgtgtggaagtgtttcaggtctggcccatctcaattttattgggagattgtactgcagagtacctaaattgttgaccatatgtaattaaataaatatttttcattactttggagtattcagtctgtttatttgacaacagactggtagttacagagctctgtcaccttacccgcgctgtcaaagacttttctaatttgtcattcacactttttcatttgcttccttaactgcatatttggtgtaaatatagtcagttatctctcagtaatgtcattacctagttagtgatatcatgtgcttggtaagttaaaaatcatggtcagagttattaactatataagaggaaaaagttaaaaatttaactctagagaaacatactgcatataaatatttttggatattctattcaatgcctagattgtctagattgaaaccaatttccctggctgttttgtttttagaaaactttttttatcaagtgtttatatactagaggatgtcttacgccttttacccacattttctcatttaatccttatacacattgtgaagaaggtattactttttccattttacaggtgagaaaactgaggctgagaataattaaattactcgctatgagccacatattaagggtagagctgagattctccccagcagcctgccatactgcccccactgtttatgcagaaacacgtggtcccttcatttttctgaacaaactccttgtgaccttcctcagtacagcccatttcctctgccctaaatatagcaagtcatgccatacaccagctctcatgttactctgtcacacatagcagcagtgcctgatgagtatcatagtagaagggctgtagtggcccaggagcttaaggagcatgtgaaaacctccctttagaagcttgcccagaagttgccattgagacctcatgtgcttttgggggttcacgaatggagtcaagttacctgttctaataccgaccgaagtgcagtgcttctgtgaggactgctagcatgggtagcagccttctgctgacttcaggatatatcctggcatctgttcaaggctgagctgattgcaaagtctgctggagttacacttcatattaaagtcagagtagataacaggtacatatgatactttctctacttcgttccttcatatttcccttaacagtaagattaagaagaaactaaagtatcagaataactaaaaaaattatttgctccttcacttagtctttggtctaaaaaaacaaccagccaacatttcttgagtgcctaccatgtgccagcccctaaactagacttaaaacaaacgatgggcagcaaagcagagatgtccttgacctctttaaacatatggtctagtgaggaaagacagaagattaaaagggaaatatgtacatacataattatcatggagaaaagtgctaagaagatcaggacttctttgtgctgtatagaggatttggagtgagagctccttagccgggctgagttgataagtaagttctgtgcctctggcccaggatgtcttctccctcagtccatacaggtttcctctggctttggaacagcaattttaaggggctatgccctccccccatgtctacccatcctcctatggggcttctgaagtgactaaagtaagccagcccagaaaatgaggccctgcttccaccaggcttcccagaaaaatgtctgccagccatgaaaatgacaatatcacttagtaagcaacttgtagacatgcttcatagccctgagcctggaggcagtgaggaaaaggtcaccaaaagaggcagctgtggatgtgtattaaccactcatcaaaatcatatgacaaaaccataggcaaggaaaacagaaattaaaaatataaaaggcaaatgccttcaaaattttatttttaaagtccagctgttatttggcttgaatgtgacaagacagcatttcttgttcaccatgatatttataaaactacaaattcattggtgccggggacttaggaaacatgtttaaggttttgttatactttgaagcagttgaagtcttaacatgtattgagtatacataatttgttagctcctatgtaggacatgtaaggaagagagggcttgattagttgagtctgtcaccatataattaagaatagtgaacagctgttgaactttttatggacttttcgtatggcatttccccttttcttattctgcttaggcaagagtgcaattcttattccaactctcctaatttcaaggttgcctacagactagacagagttctagcctgtttaatgggagatttgagttgaagttcctttgctaaatgactaaaaacaagaacctctgggcttaagtttctttatcttttaaaaaaggtatgttggatttgacttcatctaaggtcctttccaagtctgcgattattattagaatcttgataaaacactgagtgaatttcttatcagaaagatgatctatctatcataggttccatttagggtttttttttagagaagtaaaagaggagagtaatggcttagaggttgtatttgtgccacttgctgaattgagttttcatgttccttgagcttttgtttttattaatgagaagatctctccagtagtatttcccaattacctttcacagatgggctccctcctctttctctctgctctcctttcccccagcaacaatagttgagacttggctttttaaatatattctttccatcctgtttcttttttctcttatacctggggtttctaaaggggtacttttcttttgtttctgttttgctgcatggtttgagtaagaaaacattcttctaacacctttaaaacaattttcacatcaattactctgtcccagcctttttgggaggttgtacctcattttgatttggggcatagtgaaagataagcctagcatttatggatgagctctgaaagggattatatttggccagactgttggaccctggatcagaactggaatgatgtgctgtcctccatgcattaaaactttgcattgattcaaatggaaatagatatgtgtaccaagaataccctcttttgggactattgctctcacatttcttcagaagcattttatagatttatactgaatttgtgaactggaacacagccaagatgaccttacccttctgaagctttatttgtgtgtgtgtgtgtgtgtgtgtgtgtgtgtgtgtgtgtgtgtgtgtgtagctccaactgcttctaagttttatatctcaggatattttttttattttcggcttaagctctttgtttaagacaaatagcagagattgtaatagttcttcttttctttaaaacacaccgcttaatatgaatgccctctcttaaaaatcctgctcattctttgatccatatacttggaaattgttgaagctttcctcattcccctaccctccctagatccttattcctggtagaaaagattgactctatgatacacgactcattcaaggcagcagaggcaaactgtagcctaatctggggtgggatttaaatgctataactgcatatactttggaatgtaaagatcattagttcaagcctaccagaatatagtgcttcacattgcaactcttggattctcagatttgaaataaaggagagaggtcatcaaatctgtaattcagtccaagaaatcacttctcatatccctgacaagtagtcgttttacatctgttcaaatgcctctgagagtctgaagacagaatactggccacttcttgagaggctcgtcctaattcaattagctgtttgttaacaacttataactaaaatttgcctcactttcttgtaacttctactcattggttctagtctgacttctagaccctaccaataaaacttatcatttcttgatttgacaccccttcagatatttgcttaagggctagaagacttaaattctggttgttccatccttgacaagtcattttcttcccctaaattttctcatctgtcaatgaggaagttggtctagatggtttctagttgacagtttttaaaactttattattttactgctatataattgaaaccattcaccttcaaggcaactagagtataataagtatcaattagggatgatgcaataatcaaaataaatacaattattgtgtaattatatcagagatgacatgcctttgcccaagaaggtatccaactactagatactaggaataaaagatgagaaattatacacgtaaaaagataagactcaggtaaatcagagggaacattaactagagctatgctgtgggcatatgggtctggctttccatagctacccaaaatggcgtccaggcatttcagagaaatgaataggcaatagcatctctgtggaaccagcagactggtgactgaggccaggatgggtagtgagggaggcccaagacctggtgaaaaggagtaacagccacacaggctgggatataagcagagtcgacaaagccctgggctctggactaactctgttgtatgagtatcacaaaactgtattttactgtggatataaacagttttagaggatcctgtgcaccagtttatatcagcactatatataaagtgcagctctcttaaacaagcaaataaacttctcttaaagaaatatatttgctgtgtcttaaaagctccgaaataacttttaatgttggtagaaaacaatttccattgaaccctccaagtgatgtatagtcctgatggggcaagatagtgaaatgtcaagattcttgtataactccatctcctaatactccataaaaggaactcaacctgctgcttattgttgcttaagatagaaagcccaatcaaagacccagcctctctttagtgaggaatctagccctactggatagctggtttctcattgggctgccttttctaaagaagtgtcaatggcagtgtgaataattaccacaaaaaaagatctgcttttctgactgaatgttctttaccctggggaagaaataactgtctatgtcattactgaatcacatagaaatatagtctgccgtctgtatctgcaagttctgcatctgtagattcaatcaactgtagataaaaaatattcacacaaaaaatggctggttgtgtctgtactgaacatgtacagactttttccatgtgattatttcctaaacaatgcaatgtaacaattatttacatagtatttacattgtataaggtaacataagtaatctagagattatttcaggtatgtgggaggatatgcataggttatgtgcaaggactacaccattttatataagggacttgggcatctgaggattttggtatctgtagggggtcctggaactaatctctttcagatactgagtaatgactgtacttctccaacttgctacagcaactgagcaatgaaagattaatactatctaccatgaaaattaaacccaagacaaggatagctagcatatgttcccgatgggactgcaaaatcagcccttgcttcctcagcagtatgtatgtctgcttcacataaaccaacacattagattaaaccctgactgatagagttctgtccgacatatttggactgactgtagcttttgagattgtggaccttgcccagattcttctctcctggcagtaagagccacttgactttctacctgcaagctgtggaattcagcctaaccttaaggtaatgggatttaatgagcatcaagctagttatgaatgtgctttaaattctctctgtttaaggtcaggattggaattgagaccaaactttgatcaattggccgtttccttttcttcatgttctgataactgtgtttctaacttgttccaaagagtcagtacccacccagtcctcccccagtttctgttactgacttcctatcttttcttaaccaaggtgttcttatacagtcatgcaccacttaatgacatttaagtcaatgatggcccacatatatgatggtggtcctataagagtacaataccatattttttctgtaccctgtctatgtttaaacaaattacacaaatacttatcattgtgttgccattgcctacagtattcagtacagtaacatgctgtatgtgtttgtagtctaggagcaatggactataccatatagcctaggtgtacagtagactataccatctaggtttggtaagtacattctatgatgtttgtacaatgacaaaattgccaaaggattcatttctcagaaggtatccccatcattaagcaatgcatgactgttttttaatatctccttctagattcctcttcttgtttggttctgcttgtctatcactgcctgcactcactatctgctgtctattttcagcctctttagaggtgggtctctgtagactgaatctccggtgctaggaaccaggactttctaaccaggatctgtccctactcatggccttccaatcttcagttttacccatatgttcaaccaagttataatttactgattatctcataacaccatactgttatgggcatggagggaaaggttttttaaaaaatatagaccacattatattcttcaagagctagtaatgtagttgggattacaagcttagtatacataaaaaccaaagcagtttaaggcattaaatgttcaagtacatcgttaaagaaacagaaaagaactgctatttagaggaggaagctttgtggacagcaatggttctggaaaacctgatagaagtgtggctggagataagcctaggtttggataagcaaagagaagaggaaaagctttcatttgagggaataatctaagcagacacagacattaagcagatagaccttcataggaaagctccagaagggaagaatcgtctttttcatctttgtcttctccactaagcccaacacaaagccttgcacacacttgcaattaataaatatttgttgaattgagtatgctacagaaatagatgggtgccatattaaggagtgccttgattaccacgctgaggaatttggactttaccaccaaataaatatgcattaacctttaatcattcaagactgatttagactagagaggttaagaataatggaaatgcagtagttaggttgtttttggagatctgttagtcactttattcctctgctctctttaatattatttcagagaggatgttcaagtggatatctttccatgttataacatgagaaagcttagcaggtgttaggtgggttttcattcaaacgcatactagaaataattcctttcctcctctcctcctggatgcaagtaagtatgattttcactgtctactgtgactgatcgatgccttacagatcagtcttgtacttttgcctctcacttaggagtgcgggtttttttttaattgtttttgttcaatggatatttacacctgagacatgatgatgccaaagttaggtcatagtaccagaggggaaaagttatgtaagaatgcatcatcatttgctgtatactataaactgctacatttgggaataggctatggcatgtaactctgaacaaaaatgtaatatcccaagtctcagacctggaaaaaagcatttcataagaaatatgttcaatcattttaaatttatattagaaattcaaattgaagcttactggtatcaatgtattttttactttggtggtagagaaattgctcatggtgcttcaatataagctgactcttctgtgggaaggttgatcctacacagggacaaaataaacaggataatagctgctccatgctggagagctacagacctgttagtggggaagaagaaaaacaattgtcaaatgtccctgaaacttcattgccctccatttattataatttcatagtcaataattcaaatccttcataattccaatgagtcttttataaaaaagcctatctgtaggttcacaagataatggtctcttcttttcttctggctctgtatgagcagtatggtctgatttctgttcccatatatgggaactgcggagatgtgagatggtctttctcggttgagccttatgcctagtcattatattttcgtctatatcgtagagaaccttttgaaatatatttttagcatttgggaagaagagaggctccattaaggagtaaattgcattcttccgttaacttatgggtttatttagtaactacatgaagaatagaatgtaaaatatagcaaacatcacccaggtatgaggaaagtctataaagggaacacatatgagttaagcacctcctatgttcttggtactggaataagcattctactacttctgttgccattattactgctacctatttctaaaatgaactactgcttagtgagtaggtattgggttccagtcactgtgctaggaaatttacatgtatgcccatttatttctcacaaagatgctgcaaggtagaaattattgctctcttttatagaaaaatgaagctacagtttagagaaagaaaacaatttatccaaggctacttagctaggaaagatcagatcaacaattcaaacctagatctgtctatatggcatctgagccatactgcctcctgtttttctccaagatgagctgactaaattggttgcctttgttggattagctttttcctatagttttcattaaaaagcagaaaattttaattagaaatggaaactgtgaaagtgtttttaatcctttaaaccacagaaatattaggcacttttcaaatactttcaccagttctcggggtgaagaagtattggtgggcccatcagattggattgtctctaaaatccttgagtgatctcctttcagtactgttcattcctcaaccctaaccttaaaaaaaaattagtttctgctactcccataatatgtattttccattctaatgaaatacagattccccagacaaatgaaatgaagagaggccagttaaattagtcatgttaggagttttaaaagctaagtttggatgccattgaaacaattcagctgaccattgaagaaattcattctgatggaaagtgtgaaatttggggatagttacatttgagtgcccattgtgatttttgccatttattaaccgtgagacttggacaatttaatctctctaaacctgaaagtttcctcatttggaatgaggagtatggattaggtaatctttaacatccatctcctgttagagttctctaattcaatgagcgtgttttatctattttataatgaatctgctatttaaggaaagtcccattgtatgcttacttgaatacagtacatatatatgtatatatatacacacatatatatgtgtgtgtgtatatatatatgtattatatatatatttacacacaccctacatcattagaatagttttcagatttaatatttccaaaaatctcagacatgccttaccatccttccaaggtttttctagaagtagggaggctggcatctcagaactgcacagtatggctagtcaatcaaagaagtaagattggaaccaataatctctgagtcccacaccgcaactatgggtacattttccacatcaaaattattattgttttatagatgtttcaagaaatgacacttaacagaatataagaaattaaatttctacaagatctgatttcagaaattcccaggttctaatagaacatgtgggcattagagactcactctaaaattctcactgttgaagatgtccactgtactgtattagtaagcatttgagtatttaccttatgccatcctggctactagaccctggggataaggataagcagctaaggataagacacaatgcagtcaccactgttttggggtacatagtctagaaaagaaagtaagtacataaaactggtaatttggataaaatatggcaaatgttaagatggaggtacgcatagggtgccacctgtcagagcctaagctacttattctaacctggcaaccaggtaagactttcatgggataaataatacctgagacgagtcttcaataatgagtgattgcaagatggccaggtaatttcaggaaaggagaaaactcagatccctagtatgtacacacacaacacagtgtgtggagaactggaaatagttcagtgttatgacacaaaaaatgttccaagcagagtagccagagctggtactggagccatagttggagggccaggtcacggaaagccatctgtactgtactaaggagtgtgaacttcatcttgtgggcatgagggagccattgaagtgttttaaatatagcagtggcctagtctgaattgcatttgtgacagatcattctggctgaaattaagaggaggtatttaagtggaggttaaaggatttaaaactgggtgtaagaatatcagccagaaggctagtttttataatagtccagcaaagatagtgaaggctaaggcaatcgataaagattgaaatgagaggatggattcagtagtatctgtgttaactaactcctgagacttgcttcatcttgctttgcacttcttaatttcatgtagagtctatgacaggaggtagagctggttaaagccaaaagctgctgaataacacgaattattcagtctaccagctttttaccagcctcattattctccaagggcatcttcttgaacctgagcccagttgtcctgaaaacttaggaagccagaacttgttattgccttatttcaacctcagtggtctctggttcaaacttaaatgatgcctttttacctgggctcaacagcttgtaggccctccttctatgtataaatacagcatatagataataagtgggatgtttgatgctctatgctcccttcaggtcattaaaataaagaatataagttatcccagctgccctgggattctgtagttgaaataagataaaggactctgtttagctatctgtgtaaagtaaatataacttgagaattttgaaaaaagtaaacacaggcatcaaaactgaaagcaagagactcttgaaaatacagactggtatatcactggttagaatttccttcattttgcaaagccacgagccacatgcatcagctcaccacaaagtcattaagcctttttaagctcagatgaaaaacattaacaaataccacaaaaggctttagtatagcccctttgttcattcacatatggcactttataactcctgcgccactccggtcgtgtgtttgtttaagctgcctccatcaggctggtcctgaaagaacaaaagacatcttgagcaatcctaagcaggaaatgggctaatctaaacatagtttgtgacactttaagtagaatagaaaggggagggattgattagtcattaatgtccaattggctccatatggatgttgcaataataaagccctttttcagagcagtagcagagttattgaattagaggtttatgtttcctcagagctgaccttagggaattccctttggttcctcttgttgatcttttaaagagaatggagtttctaatagaaaaaaaatagaagtcttatccacaataacacttgctcataatcctgtaaccaaggaatgcattaatttagcattgttttcatcccagctataattttagtccttagtgctttctcgacatgcccttgcatctttggtggggcagtatttcagagaacaattagacagtggcatgaacttcataactggtcatgggctcttctaatgtgcttagctgggcagggaagtggcatccttaaagtgggaaaataatgttccagccaagaaatggtgggctttgaaattcagagttatttcagattgccgaatagtgattggggtagctttggtgaaggggtgatgtactaggctgaaagtcagaagatctacgttctagaactggctctgcttcatattaccagcaactggttaatcagaggaaggtgctatcatgtctctgagtcttgctttcctcatccataaagtgggtgaaaagatatctgccttcctacacattttaaaagattgtaatgaggatgaagataatgtaatcagtgaaagcactttgtaaatattattttatgcaaagttacttagcacagctggtgttcctatcctagaaactgacctctggcctagtctatcaaaaaggtaaattgctctttaaagaaatactttggtactctgattaatgaaatgtttgtttccagccgagagcagtggctcacgtctgtaatcccagcattttgggaggccaaggcaggcagatcatttgaggccaggagttcaagaccagcctagccaacatggtgaaaccctgtctctactaaaaataaaaataaaaaaaaattagctgggtacagtggctcacatctgtaattccagttactcgggaggctgaggcaggagaatcgcttgaatccaggaggcagaggttgcagtaagccaggatcaccccactgcactccagcctgggtgacagagtgagactctgtctcaaaaataaataaataaaataaaataaataaaaataaaaagtttgtttccaaagtgcccaatggaattttttatgtgtacattatatataactaggcctttctattcatgtctctgtctctcacacacacacacgcgcacgcgcgcacacacacacacactgtcatcctctctctctccctagtttatttagtgaatttcttgatgtagatagcttcaacagttgaagtaaatagggatttgtttttagtagggctaaggaaccttaagatgaaaacaaagatattaaactttacttatggttttcctcaacattcagcaaatgaagaattaacactttaattaaagtaccacaggtaattcaccttttgttcctgtaccatcggctcttatatattcaacaatcactatctcagaagaattgtgtatccatattttgcatttgcctaccttaagtcatttcacctgtcactagatcactctttgctaatacatctaggtaatttttataaaagatacagagaacaaagcatactctacatctctggcatttcttcttctcagaagatgaacacatcacttcctcacttccttaatgattaaggctcttgctccgccatggaatgtattttgcctgccaaacaaaccactaggatagccaaatcctttttctttttttttgcaagaagaaatcaaatttgaaatccaagcagccttcctgtaatgaaagtaagttcacattctggcagaacaggaatgagaagttagcagtaggtttccataatcatagacagacatctatcagccattacttcaacacaatgaattggacctctgttgtattaagataaatttggtaggataaatatggtgaaaaatcaaatctgtgtagtattagtactctcttttctaatttcaatccccttttaaaatttcaccttctacatttttgtttctaatgcattcggtatcatttttctctaataacccaagtaagggactatcaaatgtattgtgtgactcttcagaatctcacaggagaaaatcaactattctattaataaaatgaagtagtctgaaatactgtgattgtcaacagttccatcaagcaacccaatagtgatacttatgtctctttctcttcataagcaatcaattatagttttttgctcttcttaataattcattttagtaaatgagattatctttgagttcacaatggcctgaatatgtcacctacttttcaggtccacagaaaaaagaacctttcaaaaaaaagagcattttatttgttggatggttggttttctgctttattttgtggggtttttgtttttggtgtcatttttgccttttttaaactaagagttacaatagttttattttgagtagtatcccattgtatggatatatcacaatttgttcattctccagttattttccttttttctattattgataaaactgctatcatattcttatataagtctgtttttgacagaagctttaatttgtttgctgggtcatacgtaaatatgcattttaattagaagaaattgccagaaaatggttatgctgttttatactttcactaccagtatattagagttacagtatattagagttgctccttatccttgccaacatttagcacttaagccattccagtgaaatgcatctcattgtggtttcaatttgcattttcctgatgattaataatagggaataccttttcatctgcttattggccataactatatccttttttgtaaaatgttcatttaagtctattgtccattttaaaattagatttttttggtcattctttatatatcctagatgcaagttcttatcagatatgtgtgttccaaatattttttccagtatgtgctttgacattttattttcttaacaatgacttttgataagcagagttttaatttttataaagttcagtttaacatttttcttgtatatttagtaatttatatgttgtatctaagagtcattttactttaaagtcactaaaatattgtcttatgtatatttagaggagtgttatagttttttctttcttgatttaagtcatgattcatctctaattgttgtatataatgtgtgatacaagatgcaggatttttttccaatgtgtctatcaacttgttctggcggtatttgttgaaaaaactatcgttttccactttaacagccttagttttcattaaggtagtttgaatcctctaattttcttcaagtttgttttagtttgtcctactgctttatttttcatataaattttaaagtcagtttgtcaccttatatgaaaaaactttgaggaatttttattggaatttggttgaatctgtaggtaaatttgggaacaatcacattgtaacaatattgagtcttctgattcaggaaatggtatattcctccatttatttatttatttattttttttttttttttgagacggagtctcgctctgtcgcccaggctggagtgcagtggcgggatctcggctcactgcaagctccgcctcccgggttcacgccattctcctgcctcagcctcccgagtagctgggactacaggcgcccgccactacgcccggctaattttttgtatttttagtagaggcggggtttcaccgttttagccgggatggtctcgatctcctgacctcgtgatccgcccgcctcggcctcccaaagtgctgggattacaggcgtgagccaccgcgcccggcctattcctccatttatttaggtctttaagttacaaatgttgttttgtttttagtgtagatgtgttgaatacttttttcagttaaatttattcccaagtattttattatctgatgctattataaatatatatttgaatattattttttaattgtttgttgctagtataaagaaatatgattgattttggtattttttattgttcattgcaatactgttaattcacttattagttctagtattttgtaaatcccttaggattttttatgtaaacaattatatatgaacagatgacattatttattcctttataatttgtatgctttttattttttattttattttattttatttattttattttatttttttgagatggagtcttgctctattgcccaggctggagtgcagtggcatgatctcagctcactgcagcctctgcctcccgggttcaagacattctcctgcctcagcctcctgagtagctgggattacaggcacacgccaccatgcctggctaatttttgtatttttagtagagcagggtttcaccatattggtcaggctggtcttgaactcctgacctcgtgatccgcccacctcagcctcccgaaatataaagtgtgagctttttagttttttaattgttgattaacaatggtgagagtggacatcttcgccttgttcttcatttttagagaaagcattcggtagttcactattaagtatgatgttacctgtaggtttttcttaaatgccctttatcagactgggaaagtttccttttaatactaatttcctgagcatttctaacatgattgagtattgaatgttgttaaaaccattttctgaatctattgtgattatcatgtgttttcattccctttgttctgttaatgtaatgagctacattgtctgattttcaaatgttaaaccaattttacattcctgagataagttctacttggtcatgatgtattatctattttttacatttggctggattcaatttgttaacattttattttaaaattttgcacttacactcaaacctctgtcaaggtatgctgcctcataaacttaattaagaagtgttccttcttcctctactttcatacctttacgcaatattattcttattttccttaaatgtttgaaagaatttaccagtgaaaccattcggggcttcaattttctttgtggataagttcttcgttataaattcaattgatttattagctatcagtgtattcagattttttatttattcttgagtgaattttggtagtttgtgtctttcaacaaatatgttcattttatctaagttgtcaaatttattgaaattaagttatttataatattccctttttatctttgtaatatgggtagtatctacagtgaaatctcctctttcagtccaaatactggcatttttgtcttctctctttgtctgttgacccatcttacttaggatttattaattttattgtacttttcaaatttctaaccttggctttgtaagttgtctttattatatctgttttctgtttcattgattcttactcttcatccattcagagaaatcactaacttttaattagataatttgatttatttctgtttaatataattattaaatctgttgggcttaggtcttacacttcagtatttttttcactacttgtatttgttccctcagttttttgtcttctatttctcctctctgctttcctttgtgttaattgaatccctttttaagtcttttgtttgaagtactctggtagatttttagctatacttctttgtattttttacttttgtttgtttgttttttgttttgagtcaaggtcttgttccatcacccaggctggagtgcagtggcccatcctcaacctcctgggctcaagcaatcctcccacctcagcctcctgagtagctggaactacaggtgcatgccgccacacctagctaattttttaaccttttgtagagacagagtctcagtatgttgcccaggctggtcttgaactcctgacctcaagagatcctcccacctctgcctcccaaagtgctgaaattgcaggcataagctaccttgcctggcctctttgtatttttttaaattggtttttctaaggattcactatgaaaccttaattgagtatccttacagttaaaattttaccacttcacgtaaaatattacgacctttaacaatctaattctatttataccctcatcttttgtggtaatatgctattgttgttccatatttcacctttttatatgttataagtcccacaatacgatgttatattttgtattaaatagttccttgtcttttaaaaacattagacaattagctgtttattagtgaaatccagagaagaaaaaatggtcacaaatcatttttgatattcttcctttctttctgtatatctggtttttattgagtgttatttcttttcctcttgaataatttccttgaatatctcttttggtgtttgtctgctggtaactcatgcttttagcttttaatcatttgagagtatatttcatattcatttttgaagcatatgttcactggataaaactctgaatttatttccttttatagcattataaagatgttgcatagtctactagtcttcattgtttctagtgaataatcagcccttatttgtaattttgtttccccgtaagtaatatgtcccttttctctggaattttctctttgtctttggttttcagaagtttaactagtttctaggtgtggttttgttgtatttatttggcctgcatttccctgaatgtctcaaacctcttagttgatgtttctcaccaaattcaggtaattttcagccagtgtttttcttcctttatttttattttttgatctctgagtcacattttcctggttgtttgtacaactcatactttttaattatatattgtatgttgtggattatccattgtagatactctgtattctattatcttcctctgaaaatttttaactttgggggcaggaagcagttaaattacctgctgcacacgttgaacttgtggaaacttagtttttgcactgttagggagagtcttttttaattttgtttttagtcttagggcaaatccttagtcctggcatattgaatttattcctaaggagttgctcctctggagtttcagtggaaagcccaaggtgtttatgaattctttctaacttgataggattccaattcaaattctgtttctcttgcaaagggcatcagctgaaatctcttttcagattttccagatacacagctctgtttttcatgggttcatttgagtcttccaaatacatggcaagttcaggggtcagcagccacctgtaagttcaaactctgtcttctgacacattaagccaattaaactgactttctatttgcattctagccactccatgctatgaagaccagaaagcgtcttcatgggaaaaactatgaaaacagaatttcatttagtaaaatgcctttcattctaggatggaatccactccagtttctgtttaattttggtagctctcaggaatcttcaacatctatgggtttttttcatattttgttcagagtttatatttattatctattggaggacagggctgatatgagctattctgccattaccagaatttgattttataatagaaccttttgcgccaatattttgcatgtatcacattaattctatctgacaaaatgtaagttttaatgggcccttgaagaggtagtcactttatttttcctctattctattctttattatcaattcactggtaatcattgagactattcagtggtaatttctcatttagttttccattttgatctcttctagaacatattttttcatgttactcttctggttaaaaacctcaaaagacttcttagcttggcattcaaggtgcttagcaaatttggtccctatttacttttctaatttcatctcttagtactccccttttttttttttttacataaacccaagccatcgccagcttctttttattccctaaaatgtcctttgctttttttttttataaccctgtgcctttcctcacactgatttccaagcccaaaatagtttcacattcatacctgctggtaaattattacttctcctttaagatgctgctcaagcaccgcttcaactctgaagcctccctaatattcatctctgtccactccaattgtgttagtagcttattttccctgctctaatagtatttttaaattaccgctgttagcatcgtttgtaatttttaatttatgtgtcttctcccattggaccaaattccttaaaaacaaagtgcacatgttatttatctttgtataccccatcacaatgctgggtacatatgaaatgtgtcagaagtgtttattgaattaatacataaataaattattactaggcacattatagaattaactagaattcccctgaggaataactttatatgtgcaccaggcactcactcattcactctgatatcccttggaatttaaccacgaaggggcctctccaggattagttcaggaccattgccagaggctatgatggtgaaactggccttctttccaacccacctggaaaaactcaatttcgtcttctctttaaatcattcaaatcacagatttctaaggagatatttgccttggcaatttctattttctctctgcagattaactatctttaatctaaccgaaagtttgcctttacacaaactgagatgaaggatgaattaaccaatttgagccttctaggggaagttgtacagagcagcctctcctggcatacgggaccttgctttcccttgaagcctactgtggtgctgttgatctcttggcctttcagcaactgtcatttgggactgctgttgctggtaattaaagactcttaggtcagctggaaagccgtctccaggtacataactgtgggtctaggcttctaactgctttccatgaaaaatcatacgctgaactcacaaatgacccctctgctgttaaaaggagaagaagctgcctcatagaattatgagccattccaagttctggattctgatgcagactactggctatttaagaatgaaatacttggttttttgcacttaatgatgaatggagcagaatgaaatcatacaatatgctgatttttaaaattaattataacaaagtgaattttagacttcagatacacagattaatagtataccttttgaaaacaatttatagtatgctgtaaaatttttcttatctatttataagggttttccagatatataatttccatttttaaatttctgaatttatacacacacacataatcatatgtatttctactgcggcaacaattctttaaccattttgtttcagaagcaaagtttagggacactttctaaatgttcttttgactttgtggcctctaatactttcttaaaattctgaatctaagtttaattcaaacttagattgtaaattcaggtaatagataagttgtcagctttaaatgaaaaaaaaagtaatattgggagatgttttctatcagaatattgaagaaatatttgttgaaaacatctatctttctgcatagtactcatatggatgcttcagtgagttccatataagccttatatggcatagtcacttcgaaaagacagaaaagcagaaaccttcaatatgtatttgtggggcatttgtggtttatattactgtattttctgtacattacccaggtgttaattcagatattataaatctagggaaggatagactccctttctaggatgttagtggtggtggtgaaagcaaaggtgagaccatttttatatgcaaatttggtttgttgttgttgttttcattgactttctaattaaggagagtgacctcctgggcataatttgcatagtcataagatagtgttagagtactacatatttgggagataggacaggaagggggcaaaaataggaagagtggtagaaggaaaaacaggaaaacattttccaagttttgattttgcaaagggatctgggcattgcaatctgtgtggtgttaaacgtcgctgttgtagttgatcaggtatcagattcaatttaaaagtagtttcaaatgttggcctccctgggtaaatctcttcttcccaaatcttggttcatctgatacaacatttctagtttagcttaggatgtccccattcatttctagttcactccttctggaagacagaagaggtgaccagaaaaaagcaatgtgcacatgatctaaagcattttctattcttctccttcttaattcatgtttttgttctgtgcactgtgctcgaattttgcaacttctggaagcattacatgtgagtcccagagaattgctgtgaaatcaattccttgtccttcagctcctgaagataatatgtgatgtaggaggaaaggaaaaggtcagtgcagggtagaggtcagacttgagctctgttcctcagaaaaaggtagaaactggtaaagtagaagagagtaggaaggatatgtgaagactgtggtacagcatgtgtgggagagagattgggcatatgtatggcatatctgggagactctattggtatggagtagagaatctagaatgtttataccaaagccagcatctaaaaatccactatgatctctgtcagtctttgagacagtaaaacttcccatttacgatgaaatacatattttaaatgaagaaataaatggaagctgactatttggttttgctagaggtggagagaaagctacaacagtaaaagcaggctcaaatgttaatcacctgtggcatagcagttaacttagaataatattgaaatgtttttgcatctgacattctccacaaacctgtctccttttatgtgaatgcatgtcagtatataaattgctgaatccatgtcagttgtaaagtaatggcactgagggcatcataaattaccatggtgatcctcaggagaagacactgtcgtatctgaatgagtgtttcacttccagagtaatgtatgccttcatctggcccagcagtcagcatattgccctgtgttgatggatattgtcagctggaagctacactacatttcactgcgcaataaacatggctgtcaaacccatataaagtgaaatcaatttatcctgtatggtcagtgcattttaaatgaaattaatgtactgtgggtatcgtggcaaaaaggtatcatattagttatgcatcttgggatctaagacttttcatgtaaaggatcattctgtctagtaggcctaaaagaagggctgtttataaaatatgttatttttgtataatcttcagaaagtagcctttctgccctccttcctgtttagaaaaaaattcatgttagccaatcccacccttttatactgtcttttgtttgcagtaaatgataaccatatttgctaaataatagtgcactataatgttgtaatttattactggctttgacacaaacaaatgtctacttaaccaaggtatctaaaaatagagaggaagggccagagattgattgaatcatgttggtcctgtataataacttcactgagcagaaaggatttactttttccagaaaatagaaatgttggttttaatgtatattttgcttctaaacttctgggcgtagactttcctgttatgcggtagaagccttgtctgaggctatcagtctgaccactttacctttaattatagaagttctcagtctgtaggagatattcaggagttgccacatcacaaagtatacatcagtatatcgccctggtatagggtgcatgaaaacaagtaagaactatgttcattcattcatttatttattcattcatgcattaatataacatattttactaattgaaatcctatgtgccaagtactttattgaatcctaggaatacagcagtgaataagacccatcccttgccctatcttcagggagctttcaatctagtatgttactagagtcagctctttggaaattatatagcatcaggaatttaggcatagtttcatagatgttaaagaactacccttaaacaacagaaaaatagaacaggacgcttgaaataaatgcctcttagtctatgacttttgcatatgagttgaaaaccaaataatctttgcttaatgaatattttattatctattatgtgaaaaatcctgaggatacaagaataagtacagcataatcattaactttaggtatctcgtattcctgagaggagtggaaaggagggagatagtcacataaacaataattactatggggcatgtctcctgaaagcaagaggactgagtgcagcctggggagcatcactgcaagtgctgttcctttaccctgaattacccttcccatcagactttactccctctcccactcacttgttgattcctattcatccttgaagactcggtttagacatcacatctcctaggaagcactagctgaccattctatctggtgcttttttggtgccctgttaatgtcagtattgtagcacctctcacccactttgttataattgtctgtccttactctgaactgtgagctccttaaaagcaggagctgttttatttaccatggtctccttagcacctggcataaaacctaggttatagtaattgctcaataaatatttttcattgaattaattcattcaatcatgaaacatgattgaaggttgaatgggatttagcatgaaagagtaggagaagtgtcttctaggcagtgagaagagcacaggtcaagacaatattgtgaaaaacaattctatttttgggaaacatatagagtggttgtgatctggggcaaatgagtctaaaatgaccagtaagagcatgtttttgaagaaaggaattacagcaggaaagtttaccataaggtaatgtcattcattgctctgtgatcacctaccatttattgtagtaaatgtggtagggtgtataaaacacacacaaaattaattcttagtgtgtctttgagggctacatcagaagagcctgtagaactgtcatttgaacctgccttctacttccaagaagtcacttagaaaagaagaggaggacctggggaaaacagctgacccaggcggcaagctgtgtgacattatccacaaaataacgctttccactcatcttgttcttcctgccctgacattacaggaagtaaagcaatgaatggctctgcagctaaactacagcagtattattgttggccaacaggaggtgccactgtggctgaagcacgagtctacagggacgcccgcggccgtgccagcagcgagccacacattaagcgaccaatgaatgcattcatggtttgggcaaaggatgagaggagaaaaatccttcaggccttccccgacatgcataactccaacattagcaaaatcttaggtgagtgcagcagtgcagctaaagctgatcttctcccctgcaaatcccatgagtgccaccagggtgggaagcaaggggataactaggatcctaagggagattgtggcgggcgcaagttagacgaaggtcagccagctgccgcaggagccttcgtcatcacgtctgcctcccccaccccataatgtggcatgtaggtttgggagttattatatccaccaggtgccagggcaggactgtctgaacacttatttcagagacaaaactatttatagtatgtgttaatactgtgaatttagcaactcttgagaggtcactgctaaacaagaatcgtggagacaagctttatctccttttactgtgcagttctcttaaattcatatgttgctatgaagtactcatagaccctacagttttctgctttagtgttcttgggtttatatgtcccactgaaagaattcatcaaggactagaaacccaaaatggtatgaaattcatggagtgcaaaacagtgcctctgatgatcactttaaaacttgtaaaataaatctacaattattttaataagatatgactagttcaaatttcatagcagtgagctgaacacacgagctgcaggggagaggcccagtttgtggtaaattgccagagtgattctctatttctcaggattaaactcaagccttgttctattagtgtagagcttgcctagtgtggattgtacagcttggaattattgtgctcaacatgttaaacatattttattcaacatgcagcattacagtcaacatgtttcctctttaaaaaggaaaaacacagaaggcactgctctacttaaagctgtcacgatgtgacaaaatctcaaaggaagccatttaagaagctgaaaaacattagagacttaaactgtggttttaattttttaaatgttttgttcaaaagtaataaatatttaacctgagtaaatatcagtgatctggacatgcacagatacacatgttttgtcactgtataaataatttaacttgattctgaggcattttgaggcagtgacctctaagaaaaatttaaaacatacataagatcaaatagtggtgaaatgttaaatatgtttttcttttttttttgattttctaatttcaaaatggatactaaatgtcattacaattaagtgtggtttttatttttagagcttcagagttatgcatagggatgttattttgaatttaaatatctttcaaaccaaaatgttcctagtggacatacatttttttttttctagttaaatgacattctaaaaaaaaaaaaaatcagtgcttctctggccttacagttttatatctaacttgaagattttcatatttttctgcccttttagtagcaatatgagtaagccttcagatgggcacagagcctctctgtttccattttggcagctgtggggaatctatattatttgtgtgcattctgtgaaaaaattattaggaatatagtaagtatattcattaaaatgtaaagttttaagtgcaagcgtttcaagagcaccaagaattcttcgttaattggggctttaagctgctggaaaccagcagaacacagagaagcctatctgcttaggccttctacacaacttttgaacaacaatcaggaaagagcagggatgcatgtgctattaaagcagactaggatattgctggctgcagagaatatttgtacaacttttccatttgtttatgtatgaaaaatctccactgaagaatcgctaacatccagtctgcacagctgttaccgctttattcaccagcgagacacaaaaatgcaatttgatacatgtaaaaaaacacatcccctcttcatcaagtgtttagataattctttataaacaatattagagaagtgaatacttatccttcttcctgtataaaccgtattaaaatttttgtacttttattggtacagctttgaatgagcgtttatagtacttgaaaatggtatatataattccaatggtatcttccggttctaaagctataacttcttaggtagagcttaggttttttaattacctaggccatggcagacttgtgcacagtagttttttatatatggaatgatttcaacatctgctgacatcttgtcaaaggatagtttcactaaagatacttggagtttgggagatgtttgaatttctaggacaaacaaagcttttcctgagaatcctgtcatgctcaaaagtatgcttaggaggtttagccttttatccctgttgagagggtaggcaggtggatggggaaagaccttggtgtaggcaatgatctttaagcagcaaagatatattttaaaatactatagtagcatcagtcttaaactattgagataaataacacaagaaagtatcatacgcaaaattgttctttgtgttatagactaaaagtatagttgggacagccagtggtatgtgggaattggagccacccagcgcacagatgagtgaagtgatgggaaggtatatctagttgtgtttgcctagaatatgttgccttgaccacttgggtacttaaggctatttttatttctaggatctcgctggaaatcaatgtccaaccaggagaagcaaccttattatgaagagcaggcccggctaagcaagatccacttagagaagtacccaaactataaatacaaaccccgaccgaaacgcacctgcattgttgatggcaaaaagcttcggattggggagtataagcaactgatgaggtctcggagacaggagatgaggcagttctttactgtggggtaagtattcctgaatttagccacctgggctttacttttgcggtaagtaactataggatggctactggcagtatgtttgggaaggagattagggaaagaggaggttgtggcatactgaaggggcttggccatgagaatctttgctgtgtcataggggcactgccttgcaccatggcttttgctcaaatcaagccaaacctggaacagttcactcccagctgatcacccctgtcattgtctcccaagccaatttaagatgctcagtggccacacacagagtttctggtagtttatttaagcagatacacagggaggaaaaataaaaactaaccttaagaaatccccataagctttccagcttctctgggtggtgcttctgactctaatcacaatagtctgcttttgttgtgggatctaccacaagataattggcctcgacattggttagaggacctcatttttggcataagatccagaactcctgttgcagtaaattattctgtggtgggagcagtaacaatgtgtattttcttgcttaaatcagaaactagacatgcttttgatatcttcaagtctgatttcatgtcattttgtttaaaaattaggtaatagatttctggtataaatttcaacttggctgactggctgtctgcattcaaaagaggcccctcataaccacagtagtcaggataagtggggatgcagatgactgtagattccagcatacccagacctagaagcacagcagggtggcaaatccagagggccatttgaggcacagacctgaagcagctggactcagagtagggaaacacttgggaaagagcttgagagagagaagcagagtaagcaagagggaagttgcatttgctgtgaagttggaggagaattgaggagctgtgctgtgccaggaaactaagagagcttcacttgaaggtagaaaaagaggtaccttaaaggagaagccaagagctattcacttttaagggcactcaagaggtaaccctgtggaacaaaaagttgttttcagagcatgtgtttaaaaggaatagtaaatagagtaagaaaacaaagccaatgaacgtagtctgggtcatgaatctgtgcaatacactgcagtgttttcgggaggagcgtgggctttggagtttgacttctggggttcacatactgactgtgccacctacctgggcaagttattaaacttctctaacttttgttttctcatgtgtaaaatgaaatgaatagtggaaactatcttgtatgattgttgagaagatccaatgaggcaacgcttttaaaagtactttatatagtgcttaatacgatatcaataaaggtgaactctagcattatcattactatttaatatgtatttcctatcacagaaaaccatattttatatcacaccagatgatcagtgaatttctttataccatggcagaaccttttagaggtagagagaagcttaagccactttattataaaagatcccagtatgttaataaatgaagacatgacaaaataggattatcaaattcctctgtattataaatgtttgcatttttaaaggtaatgcgtttaacgctaaaaagggcaatgtggtataattgggctattcagctgataattagaggatttatgaaaaatactaattcatagtccactttaagattatgtgataaacattctcttttaatcccgttagtacacctctaagattgtgtataatctcttttgaacaatccaaagtttaagtttgggacctcttgtgattcctgccctccctcagtcatgttccctgtgtatgtagtgatacatagtggggctgttccgccagtctggaaggctactaaaggtgctgttttaataccttggtgtaatacttatttgaaaatatgagttgcagtaatactattgaatttagttccctttactaaagggtacattaaaacagctctagatcaaaataccacaacatgtaccaatgcatgtaaaaataaaaaactaaaacaatttaataacatctattatttattgactatctagtgtatactaggattttagatatataagtcacataattctctaaataagataaagaagttgagttttagagagtttctatggctacagaaaggtgataaagagcaaaggttcaaattcaggtattggcccccatcatgccaaatgactgaggaactgtctttactactttgtctcaaaatatgcctcatagccctatgctggcagtcatgagtgtggctatgccatctgagcaagagctcttagcacttggagaaaatgaagtctctgcttgtggtatatggtacataaaaagaactttgaaatttagagactaagtatcctgttctcaatagtgtagaacagtcctttatggaaggatcattttagactgcagaatagggctactgaagtgcaggcaatgatcagaatgtcttattctttcatctcaatgctgagcattttcctctgcccagctttgataatacttgctatgtagagccaggtgttatttctgcttaaggatttgtattctcttttaagtagttgtagttgatagattattaatttcctgaagtttttctttggaaattgatctttattacatatgaggttattacaagagttgagcaaaaaacaaacaaaaattcaaatatttctattgacgttttgatggaatgggttcagatcaatttttatagctgattttgaaaagacatgcataactttcaagccaataaaagtgcatatactgctcaacattttcatgcattttactgactacacaactgtggctgatgagttagttttttttattacttagctattatgaaatgaatttatcaataatatggaagggagcaatgttagcccttgccttggttttaacctcttcagttcgcagagtaagtatcagaatgttgtaataatctggataagattattatctggattattcaagataataaatgtgtgtgtgtatgtgtgggtataacacactattatatgctaatctattcatgtatgtatctggctttgtatatttgtttgtatgtatctggcttctccaactacagaattctctgaaactcatgtgtacagaaataatgcctcatttactatactaatttaataaagtgttggacacatagctggtttcaaataggcccttaccaattctgagtgtggtgtccagaatattccctctactattaatgtagagggaatattcattagggtacatgtagctacaatgacgtcttcccaaagaactgtgaccgaatatacttccatttatttgaaacttatttggtaatttacctatgaactcatagagaattatgcaggtacattcagccctctgtatctgtgtggattcaaccaattgtggatcaaaaatattttttaaaaaaattcgagaaaatgttacattattgctaaagtacactatgtagttaggtctacagtggttgcatctgtatggaacatctacagactttttttttcttgcgtttatttcctaaacaattcagcataacaagtgtttacataacatttatattgtattagctattataaataatgagattgtttaaagtatataggggatgtgtgtaggttatatgcaaatactataccactttataaaagggacttgagcatcctcagattttgttatctgtgggggtcctggaaccaatcccccatgatacagatgtaaaactactataaaatattaaatttggggctacttttttagcaatgataaagatagattattgaatacttactgtgtgctgtgtactctgctgagtggattatacagattattgcaaatacaacaaatttacaagatagggaatatcattctcactattaaattgaaaaatgcaatattcagagatgttaaataatttgtgtagggccacacagctagtaaatggccgagctgagatgtaaaccaggcttatgtgaatgtgaaacatatgtcccttttaccaaaggacattggtaaggacacgacattacacacacagaggcggtatagcattgtggttaagagcatcaattctggagtcagactagtctggctcaaatactagatctgcaccttcttggctgtaggaactaatacatggcaatctttattcctctgaactctccccttgcccttgggaaacatttaatctctctctaaccagtttcttcatatgtagaatgagaatgacaataccaatgacatatgcaggactcttcttgaagcctgagtaacttactgtttgtaaagtgcttagaacattgcctggcatatgaaaagctttaaattcaagtaaatattattattctagaaaaataatactgtgtgccaagtatatattctatgttatattacaataattattttagtgccttgtactataagtgatttgaacatttgcattttaatcttaattttaaagaggtcgaatcaatcctatttaagacacctataaaatacaattacattagcatagattagccatgcttttttaagtattgtcctcctgtaaagaccctggattagaacattcaataggtaaagtgaacagattattattatttctgttccttcctgcagtatcagctacagagatatgtgacgtataggcttatctcctaatgaaacaaacttccttgtctttatttatacactttgaagggtctgaagggtcagcaaacaatggggctttgccagcataaatatgtagttactttgtaattggcaaagctagattacactccagaaatattcctgtaatttggaagtcatgtagcaatggtgggctctatcagggccagcttttactctttacttagactgggaggaagggttcttaaatatctctgttcatatcaactcatgtatatacttttacaaacatccacaaatgttgttttgatgtgcacattcattatttgtaaagcccaatacctgccagctattcctgtttgtgaaatctgcagtgtttgaattttgactttgaaattgatctataaaggaaggaaaaaatgctttttaggaaagcaatttctgatagacaaagcttgaacctgctggctggatttcttattttgttcattgatttgttagttaattggtaagggcctatttgaaaccagctatgtgtccaacactttactaaattaatatggtacatgaggcattatttctgtacacatgagtttcagagaattctatagttggagaagccagatacatacatgaatagattagcatataatagtgtcttatacacacacatacacacacaagacatggcacagcactgcatataacatttaatgaactactaatcttcattttgtagacaagagcaaataaagctcagaggaagagagattattatgcattatggccaagcatgggacattcttgaggaagggacttgaagtttgggtaggtcagacttatgggaagtagattcctgctttagcatagaggagagcatgaacacctgggggaaaatgtggatatattcaatagtaaaaaaaagaagcagcctaaggctttttcctggcagtaaagaaaacataagatgggtagggtggaggaagattttggaagccattgaaagccaggtttcttcaactgtaattagctatgcacagttagtgtggtttttttagtctctttttatgctgataatgataaaagagagcaagatcagcgtgatggttagcttctgattttgcatccacagaattagttgcaacatagaaggggcctcagatgttatatacttcaagccattggaggagtcttccctaagttcttgaactcttccaagggtagagagctcactgcttcccaagggagctagttcctttgtggaacatttcctaatactagaaagttttcttttctgttaactaagccataatcttccttcctcctactttgcagattggttctaatcttcttctttcgtgtctcctagaacaaatctcccctttatttataagaataaccattcaagcgtctaaagatggttattttcatacagctagtctcattacatcttttcttccctgaaatagattacttagaattttcatttgttttttctcattcattcattcatcctatgtatttaacagatatttactgagtgcctcctatgttacaagcagtctgagttctggaactatgtcagtgaaaatttttgtctcatgaagcttatattctagtgatagaattcaaacaaataacaaacaaacaaataaataatagtgagaggtgccttagaacaaagtaaagtagggaaagggataggaagtttcagcttatagggtgcaattttaaatagggcagtcatggaaaacctcactgagaaagcaacatttgagcaaaggcctcagtagggaagggagcaagctgtgcagatatctgggaaatgtgggcagagagaacagcaactgtaaaggttttgaggcgagattgtgcctagcttgttccaagaagaaataaataggccagaatgacaggagcaaagtgagtaggtaggaagaatagtagaaaagacttttaagccatagtcttcataataaggaaccaagttatgaaaagacttgtaagacattgtgaagactttgtatttgaccctgagtgagatggaaaggcattgatgagttttaagcagaggaatgctttcatatgacttaggttttgaaaggatcactctatatgctatgttgagaattttctgaagggagaatggcctgtagcaaggaagctagcctcttacaataaaccagattggagttgatggtggtttgttccaggtttgtaggggtggaggtggtaagaagtagatgggttctagatgtattcctgaagaagaaccaataggatttgctgatcaattggatacagagtttgaaagaaatacagttaccatagattggcctattcaactggaaggatgaagtaatcattaaccaagaacaggatggccatgagaggggcaggtatgtgggagaatgatcaggactttaagttctgcacctatgaggttgagacagcatttagaaatccaaatcaaataagcagttttatatatatatatatatatatatgtaaaatatatataaaataagcagttatatatataaaataagcatgtatatatgcttatatatatgctcatatatataaaataagcattatatatgcttattttatatataatatataatatataatgcttatatatattatatataatatatattatatataatgcttatatgttatatataatatatattatatataatgctgatatgttatatataatatctatattatatatagatatatatttatatctccagtgagccctttgctcctaaattctagactcatatatatatataataagcattataatgagtctagaatttaggagcgaagggcttactggagatataaattgggacgttgtcagcatatagataatatttaaagccatggaattagatgaaatcaccaagggaatcaatttagatagagaagagaagaagcaaggactcaatccatggggacttcggtgcttagatggcagggagatgggaaggaagcagcatgggaacttagaaggagcagccaattaggaagaagaccaggagggtgtggcatctgagaaaacaagtgaataaaatgtttcagcaaggagaaaatgatcagctatatcaaatgctgcccgtgttatagatctgggtaacatgaggaccaagaactgacttttggatttaacaatatgaagattattgatggtgtgaccttcataagctctgtttcagtggtgtattgggagtgattgaagtgggtttaagaaagaattgagtagaagaaatgaagaaagacaactttttaaagagttttgctttaaaggatatcaaagaaatgaagcaagagctggagggggagatgtgccgagagaggtttttggttgttttttatggtatgagtgattatagcatgtttggtgggaattctataaaaaattaatgattcagataggagagacaattgctggagagatatctttagtaaacaaaaacagatagtttcagtgcacaagcagaggggttagccttatattggattatgaactgattcaaaatatggaaaggcaggcagagaatggggcacagatacagggaggccagtcaacgtgacagtgggagtttgtgaaaagtttcttctgattgcttctaatttctccatgaaatagaaagccaggccattagcttggagtgagaaagggggagaagttggatatttgaggaaagttaagaaggtaggaagtaattgtctaggaggctaagagaaggagtaggctagaacaatgtgcaatatgatggctgaacagcaccagaggcctatttgaagtacagcattgtaaatttagagactagtaagtatggcagtgtattttctccagccaagttcagctgtgtggctaaacagagtaggcagagagttaaattgaactaaagttgaagttttgctatgtaagagaatggagagtgtctgcaagggagtgagtaaccatggaattggaactgggtaaagaggtaagtgggggcacaagcagggagaggctcaagtaactgagggcagtgaaggtgggttgaaggatcaggaaaccgtagctcctcagatggggtggggagtgaaatcataaactgggtactaaagggagaaaactagaacaataagatgtggtggttagagagtgggatatttaaaactgagattagggaggagtgacagatgaaaatgacaaggtccactgtatgacaagagagcgagcaactaagatagggaggggcccagattatcacagtggcggggaggtcacactgagatagtcgggtgttggaatgaacatctacagagatagcaaagacatcaaggatcatggcagaggttatgttgaagaaacagcaacagtgagccaggagctaacatctttaaggaatgagggggattgatcaggcagggggtagataaaggtatgagtgggtgacatagtctggtgacatgagattcaaagatgagatttttaggatggagggattaaaaagtaggttggacgaggcaatgaggagctaagaagggaactaccccacctccaggcccattcatgtgagggggatggaaagcaaataaccaactcttccgagggccttagggagactcgtggcctagagagagagccaagtttcagttagagtaagaaggtgagtcagtaaggactgacagttgagttccagagggtataatggaaatatttcaggaattagagaaaggagggagttagggttagaaaaagggttatacagaaccaaatgttattctttggggacttttttctttttaaacatttcttagaagatgtcaacattttcccttctcagatgcccttctctacagttctgcggtaaagaggaagtcctctcctggccaggcttgtgaaccagagtattgttttacaattaaccgccaattccaaatggcttctgtgggctggcactcacggagagtccaaagcattaccttgtcatttccttggtgctcccccagacttagaacatgcttgctctctgtgaggtttacaccagcttcccaaaggaggaaaggaaagggaattaacattttcgtctactctataatgtaatgctttgcatatatgttcttacttaatcttcacagtcctgtcaaatgtgaatgttctaatttatagacgaggagaggcaatgtcagtgataataattagcctgcccaggatcacacagccagtaactggtgcagctgggatttaaacccaagccattctgactccaaaacctgagctcaccataccacataaccttcttcccagaaggcttggagaggcaaaaatcatctctcacagggataagttctcactctagcatttatgtacaacctcgaacagttgtatgtgaatgtgagaaccttaccagagctggactcccttcatttcctcaaggtggggagtaacccctgggtttttaccctcactggcttttagcactgtctgggggcttaaaacagccatatatatctctccactcccaggactaggcttttgaatatcatgcatctcactctcactctagaaagtaaattgtacagatgttttatttgcttgtttatttatttttagcattccattaccagcttaaagtccaaatactctgaactatgtggagcccagtgtagaagattttgattccgatttaaattgctaagttttttctgatagtgtgagcttgcctttctcaccctgatcttgatatgtgctagggaatttgtgacacggggaaggttcaactcctgattatggtacttgcgtggccttgaacaaacagcttgaattttctgaaacttaattggtcacttcatgtgtaaaagagggaaaatgatacctacctctcaggcttattatgaggattcaagaagataatgtaaaaacacctaaatatagttcccagcacataatacgagctcaatttaaatttattcagtagacctattgatatagatattctggtaaaaatactgcaaaaagtgaccatctattctttgtgaaaaggaaacgtatcatttgatagtgtgtttttatgcagagtttgtattacagatcagcttgccaaattgggaaatctgtaaaatgggttaacattgcagtaaaagctttccctctacactcataatgtgattaaggcaaaaacattttattgcagttatccaaattcagtaaaaaaaccaatgaggcattataaggttagcataaaatttaatttgtgttaatttgcccaaaacttaggaagccagaagtatactgttttaaaatttgattcaataagagggaactaatattttatatgatgtttctatacatagatttagattcctctattatctgcttccttcaggcaaccaaaaaactcaccatgagaatcataaaaactgggtcaatgtcaagtgcttagtgtcaactaggtgctgacaggttctatagaagtcaggcatttttatgatatacagtgagcttagtgtatctgtagattgaatatctataaaggaaagagtgatgggattcaagtcagccaatggcttagattcacattctggctctgctggttattgaatgcagggcttgaagcaaggtctgattttcttcatctggaaatggaaaaaataataacttatggggccatgatgttaattgggtgagttggtatacctgaaaatattttatatgttatgttagggatatgatgtgccttgtggtgattaaaagagattgctaaattcagcgtgaaccaatatctcacagagtgtttctaaaccatctgcatcccttctccctctgccaggctggagggcatggaggtctttgtgagaaaattatgttcctctggacatgtcaaagaataaaccaaacaccgcatattctcactcataggtgggaattgaacaatgagatcacatggacacaggaaggggaatatcacactctggggactgtggtcgggtcgggggaggggggagggatagcattgggagatatacctaatgctagatgacacattagtgggtgcagcgcaccagcatggcacatgtatacatatgtaactaacctgcacaatgtgcacatgtaccctaaaacttagagtataataaaaaaaaaaaaaaaaaaaaaaaaagagagagctaacagaaaaaaacaaaaaaaagaatggcaggtagctaagctacttcttcatagattcagagtattttcctgtttgagtgagatggatagaaagtttcagtgataatgtgtagggtgagtaagaattgtccaagtgataattgacctgaagtcatgagtacaaaaagtggaaggaccttccagaacttccctgaccccggcttgtataaatatgtagaaacaaaggctccaaaaggatagttacaatgacaacttgaaacaaattcaactataatttactatccattaaagattgagaaactcttggtgaatattgcatatatgaaaataatattttcgccatagtctctgagttaggtagatgtttcattcctgtgtaccagttataatgccttaagtgaagttaagagacagtaatcatgtctccctgcagaggaagagattgacctccacaaaggatctgttaagtttgtttaaactagggtaacattatggaggaatgaactggtgtccaggccttgccaccctctgggatctagggtgaggcagcgtatctggtgtctactctgcaactctactctgttgagttgcagaggtctcactgctctttactcccaactctcttaatcccaaccccagttccagcccagggtctcagcagtaatgacatccaagatgatccttccacagggattattcctaacaagttcagccatggaaatatgtagacatttacatgaataacaaataaatgctttgctgaatctcactctttgggacatgctaggtcccttctcatcttgatttatacatttctcaaaccaaggtgaagacacaaacctgcttaatagtgtcattataatatgtttcatgccactagtctaattttcaaaatgtgctgggagatcttcaaaaattatttcacatgtaacattgtggaattcactacatcatttgttcctaatgccaggtgttatccaaactttgccatatttaccaagttaaaagaaccctgcctttatgttgcaaagtcatcagtaaattgctccatcatattgtttaacccctaacatagcatcaaggagatttgcagtactcctccagggaacacctttgtcacattttatttgcttagaatgttatttaacatttatttagggctcccttttgaaagtgtagggtgtgaattccaatgctgtacatagcacatatatagatatttctcccttgtctgattttgtttcttgaatctatataggcaacagcctcagattccaatcaccacaggaacaggtgttgtgtatcctggtgctatcactatggcaactaccacaccatcgcctcagatgacatctgactgctctagcacctcggccagcccggagcccagcctcccggtcatccagagcacttatggtatgaagacagatggcggaagcctagctggaaatgaaatgatcaatggagaggatgaaatggaaatgtatgatgactatgaagatgaccccaaatcagactatagcagtgaaaatgaagccccggaggctgtcagtgccaactgaggagtttttgtttgctgaattaaagtactctgacatttcacccccctccccaacaaagagttattaaagagcccgcatgcatttgtggctccacaattacatcagcagaatggtcttaattgtttcgtaaagtgtgagacagattaagttttccctgatttttcatgaacttgagttttttgttgttattgttattgttgttgttgttgtttttttaatttaggtgaagacatattaaatatgagacaccaggacttgaaacttatctcaacccgtagatgtcttacaagtcttatatttttgtcttactttttttttcttttggatgttgataaaggtttaagttactgttttagatggggttaaacattctcactcaggtatgctgtgccggcctacaggttgtgaatgtgtttttattctgaattattttagaaaacaactgaggatttcatattgtgaaacagaacaagtccacggcgtgtgcagctgcatgtagagcatattcaaaaggcctcggaattccaattttccatttgtagagttaaactttgaatgtgccaaactttttcgtaacttttgaatcttaatattttgaaagtcttaaaggagacactgcaaagtcttagacaatctttggcatcttaaaataaaatagcaaaccaacatttttttttccagaaaatggtaaggtactcaggaatctggagacaagatattgtaaggaatgaacaaggttgccacagtgcatggacccaattgtgtttgcctgttgacgtgccatcagtgcgtgatgtggtatgacatacacacaccagagcaaccgccacaccagatatcgacagagtggtcttctctgcctgagaccacctctcactacatccattatccctttgcctttaaccctgacattcagtcttaacacattttatcttaaataatttattcattccagaatgtcaagggtccacttgctatttattttttttcaattgttggtggcattaatttaataattcttgtttttcaccttccttccccgaagaacttttccgtccttttcacctccttctcctgtgtacatagtgattttatgtccccagaacgcctggaagcatttctgaaaccaagatattattaaaaacctattattgtttttaatcatgagtatgtatctggctgcagggctgtgtattgggatataggtatatagtcttacacttaaacaggtatgcccctgaggttcactgtgacctcaagtcttttgccagaattttcccctaattcagttcacaagtggtagggtctgcatcagtggcatttccccctgaattccattcagcagcaaggttcaacagtggtgactgccaggcaggagagtcctgcggccaaacctgaagcccaaggctcgtgggccatgcaggaatctcagtgaagctgtcatgggctggcacctttacactgagttgccttgtcccagctggcacatctagggagttcattgcaaaatccccaggatgcaaaaagccacatgacagcctcagagcaaagatggtggcaaatagtcatgatacatctagagaatgaaagaaaactgtaagggaggagaaggaggggaatacattccctatatgggatgttcctactgttaactctggggaacagatagctccgggggcagcagatgagttcctctggctgactctatctgtagccacatggggacctgcctacgtgtgaacaaaatgaactgcacttatcacacaaggatttctttgaagacatgctactggggtgggaagcagtgaggttttattccccatctcctaactacagggagctctgccatgtcattttggccttcctgaaactaggacaggttgtctatcggggggcttcccccagagaggtttagtgggagaatgtcagtgaatgggatagttcacctcatgggacaacccagaatctgatcaccaggacataggaatggccccatcagatttcttgagccattttgtcacttggaagaaaatagtgtacctttgtatttatttaagagtgctcaaggcctaatagcaataaacaggtctagccaagaaattacaagctattctgttagctgggagtgctctctataagctgattaaggtactgataggaactctttgttattcatgttggttggggattagaaatttgtttttgtacatttatttcaaatgaggaggaggtcattttttctctcaaaaaatgagtatttattattgtcttactgatttctttgattatatacctctcctcctcagttcactcttgttttttttctttctctttggcttttgcttttgctctctctcacttctttcttattttgttgcattggtagagtgttgtatggctagcattgtattgtatgtaattaattttgcacaaaagcaaacatttagcatagtaggttaattttgtttgtttttatgaccatgccaaaataatattctgggctggtggagaacaaaggactgttctttaggactgaaacttgattttgctcatagtaagtaaaaaaaaacaaaaaacacacacactcacagatgttgtttcgtaagtgttataagcactggatataaatggtattttttatcacttctgactaatgtgaaactgttgtacgaaaactacatgaacaaaagtcatctgtttcgactcgtgtgggcttgcctcacagttgccggatttgagtcatttttatgtcttgttatttcatttatttatgcaaaatacatgtgtgtatgaacactttgttttagctccagctctgcctcagtactggggttcatttacttttagccatgttcttaaaaatgaaaggctattcaggaatgatctgattgtaaacgtctttttcattggatcaaacagtaatgctgtatttgaatctaaattttgtgtataagcagtttatttattagccaagtttggctctaaatatccatggaaattaagaatgacaatcatagggatcaattcattttattttcagtggggcttaaacaaagtttatatgactttaccatctcattttagatttttctaattgtgtaaatataacatagaaatagaatttatttttggttcatgaatacttagtgagatataagttatgtatttcctttttgttctctatccatagatgttggtccaaactgaaagttgatgagtcactgtgcctctcggggtagtgagttatcagctacagtgagagagcagtgtttggcctgcagctgggacagcaaaacgtttcaccagggttctcatgcagttcagaacccactgtccacagatccagacatttcccttttttcttacagaaagttgatgattggacatactaaatttccactacagttaggagacagtcagtttgctttgggagtctacataaatcttctaagatagttctgtgaccatttaatagcaagaagcatgaatgccactacaaaggcaaaaatccacctctgagatcggccgttaataaacgtcccgtcatgtcagtttagattcaagaatgttaagcaactttgtttttgcggtgctccctatttcatagtatcttcaaatcaaaaataaaaattatctccattttgttaaagaacttacagggtcagggttctccttgtcacttagaattgggacactgccaggcaatcctctcccaaaaaaaaaaaaaaaaaaaaatagccatatggaatggaaggaaaaggagaaaagaaggaagaaaggaaaaaagtaggaagggagagagaaaaaaaaggtcgctttgcggatacgagccgctaggctgacaacttttctatttcattggcagatatgaagcagtgtcttttccagtaaggtacggaagctttgttgttttcatgtgtacccagctcagccttttagaagcacctcggtttgcttcattaggtatttgatactctccagccttgtcctcaggcctgatttgatttgccagggtcctgacaccaaagcccaggccaagttctaaattcaggtgtgggctcacagtgctattgagcttgtcgaattctggcctcccctgaacattagccccacgggagcctgagggtgtttgaaaagggcgtgatcactctagggctgaaattaaaggctgctttcttttccttctgaagccaggctgcttcttcggagtacaccctcctgagccaggagcacaagcactagcagaaagcagggattgtttcaggaaagcccatttaccctcagtaggaaggcagcctggtcacttgaacagcacagctgaggctgcttctctcaatttactcattttgcaaagaattgacctctaccaactcattagggagaggaaaaagaatcacttagtaattttaaatcatatgagaagtcctgtaccaagtgccaacaactgcaaagaaatgcagctagaggaatgtattgaaattactactgggtcttcctttttaatgagaaaatgacaaaaatggttgctgtagccctgcctgattttgtacacgtttgtctaagaattgagttggcacttaagctcacttctcaaagtataataatattgtatgacctcatttgtcctttcacaaaagcacttgcatcatttccttaagtcatctgctccctgacatgttttcttccctaataaacaacttctgtctgttattcctgccaatgatgttctgtttctgatgccatatcctattgagcgtgcccctgtactaatatcattgaaaatattgatatgcaaacacatttccttttcatccccattctatctttccctttggggacagattgctttccaaaagctcatgaacaaatatttggaatgctggtacctttggggcagaggtaagggtgggcggggtgggggcagaaaggtaatgcttaatgcagataactcttctaatcagtgtccatggcaatatgaacgcttgaagaaaactcagtgacatatcttgctcagtagtttcttattcctgaagaaccacaagcataaagtgaggcctcagtgctggtgctcttggagtatggggaatgtgcaaatatttaactgttttgtatgctgcacattgcaggtctgctcatgtgcattctccctttgtcttcctttgtcatatgtgtttttgcttttttgaaagtgcagtctttattgtaccctcctccagcttgtagcaaattagaatgcttagcatttatgttcattcattattgtatttgccatgtaaaatttttattaccttagacaagcttataagctgttactacataacttatcttactgtaactcttttatttcccccgacgttgtaatttgtttgtgatgtatattgtgaaattgtattctatgttaatttaatcagcacaattcactgacatgctggactgacatgctggctgctgtttcaaagtgtaaagtttgtgtagggctgttgggacaactgcaactctgttgtcaaggtactgtgctttggttcctatagcaacactgggtgtggcccttgaattgctaagggcatttaatacatcctggagcaaattttaactgcagattttctttgtagaaattctatgtataatgcaggtacctacttggcccatggctggtaactatttgggcaattagaaaaaaagaaaaaaacataaaaactagtgtctattgctgctttgaatatgtttgaaagtctgaaaatgtaaatagtttatcaaaaaaaaatcttgtacagtccagtgtaaagtttttaaatgaccttaagggttgccatcacatctttctcacactctcctcttgataataataataataaaaagtttgctaaggattaaagaaatgggaaaaataaaaaaaatctcttcaaatttacaggaatgaatcattgttcttagctttgttgcatacacaaacttcttggattttgttgtgcagtattgacgtgagataaagctcaacattgaataatctttcagtggtacttttcaaagtcttcccctcctctgcctcataattaagggaaaagacaaaattgaaagacacactgtctttatctatcctggtgtatgttggcaccttagctactttttttttttcctttttgcacaaggtgctttcctgatatgttcaacatgccatctttgggtgataatgtatatgccgtgatggggctcaggccccttaggggagtgtctataagaactgcctatttatgctcatttacctcaagactgtcctctctaccctaatctagttgtcatcactccatcttttgtactgctgttgacacttacaaattaaagataaattttgttttatgacctctgtgtatggccttgtctgtgccctgcaaactgtccccaccatggggccccagccagccctgaatgtgccaccctcttgctgctggagcctgcagagctctcctgccctctgccattgcttctgcctggcccaagggtaggtctctgaaagacatggaaccccttagcctggaaagacttgcctgctcttttcgttgtggagcacacctggctgcagcaggaaatacttgtggatttagaagggaggaacgggatacaaggtggatttttgtcaagagaagataagagagcatggcattgcctctttacctgacttcttcgtgtcagtgaaacagcttagagccttttggagtatgaacaactctcaagggccagcctctcatctgacgccaccttctacgagcctagcagccaagagtggaaaatgctgcacttatggaacctttccctccactgtggttggcagtagttggctgattactcagtaccttctgcctcagagaagaaagagcccatctttttgtccagcaatgagttgcatccagagtgaaactcggttcccagtgatatcagcttctaaaatgttgccaaagctatttcattgtgctgagtctgagtggggacggaaggtgggtagtggggtgaagtgagcagggcccttaagggagacttgccacaccagccaagccagtcctgtgagtctagagatgagtaaccaacacctagagagtgaaacaaaagtgttcaagagagaggagaggcccagccactccttttgatatttcctattaaaaaatgcctcaggaaaaataaatccaagaatatgtgggactgactttattccagtcacattgcaagttagacgcaggctcctgtaagttctgaaaatctagcattccgggacctccctcttgccccatggctttttaaaagcccaggtaagtacaggacattggaaagaacagggactttggagtcacaccagcctggctctgccacctgccagctgcgtgaccttccctgaataacacctctgagccacaatcctctctataaaatggggtaacaattcttacctgtcagggtgctgggagaatgaaaagaaacagcaggggtaagacatccaggagtggatggcacacagagggcatgaatgcccactgcctcctctgaccagaaaatgcctaagctagggaggttggctggtgttaccactgagtaaagtgaaggaggtgcctgaggccttctctcagagcctggtcgcatacatacctcagggccctccctctaagctagtctccaagccacaggttttctcactcccagctcatccttgccattgctgcaggtcttctttctaagcctgtcccctctcatccttctctaaaaccttctggctttctgctgctgactagataaagtcccaacttcctgccctgtcagccaagcctccacagacctgccagccccatgttccaccgtgaccccacacaccttccatgctctctgctgctctcacacccccagcctgtccaccactctggggcttttacttctcctttagcctggaaggaatctgtccccttctctgtttgggaaattcgcagttatctttcagaagccacccaatatcaccacttcctgagaccttcttggccccctggtttcaagctctccctacggagaaagcaaagagctctttgaaagaatctcacgatgagcacattgtaatgatttgtctctgtgtctgtcttccctgctagacgacaaactgctgaaaccaaaaactgtaccttggcctgccctgcccccaacacagtgcttggcacatagtaagtgctctacacttgtttgtggaaggaatgtatgagggattgcaacttggtctccctgtgtgttttagatgcctgtgaatatcggggtctcaggtggtgaggctgagggatcttgtaggtgtaccttggtattacttacttcatttggagaacgttattagttaaaaacatctctattcatattgggagagccatttttcaagttggcatgacaagcacaaggcactgagagtctctatgcttttaggatgactcactgcagaatgcctgagcctctgaacccagagccacggctctattcttcctcctaggcatcctggctgaagtatgaaaaggacagactaggaaggggaagtgtttatcagttttccttaccttttaccttgacatcccagatacgcaagattaccctacagtctgctcagagacaaggggttcttggaggcttgacctctgggcctccatcatggaaagggaaggagaccagctgcctctgcctgctgtggagagccagggcagtgatcccacgaggctgcaatgtggacagctgttcacttagtgtccgttccttcctctttggtccaggtaatgactccttctctcagtagtgctctagagccttgctggctcaaagtatggctcacagatcagcagttacagcatcacctaaggcatattaaagtatgggctaatgtggcatgggctatactgagtagaaagctcctagcagttgagactccatgaactgtcatctacgtcctctaagtcaatgacacatcatatgtgagataggattttcctcatttgaattgtgaaggcccagagataggacatgacccacccaaagtcacacacagattaaatgtcagtgtggtaacatgcacttgtgttttctaattctaaacacaggtgaacgtgttgcatatgacctcacaatagtctgtggaaattgctcatcactggaacagccctggatctagagctcagttatcaccaggtgtcctggactgtgtcacactatgggagcaccaaggcatctaggggcagtggcctctggcatctctgactgtcatcctctaccctggctgtgcccagtgcctggcccacaagagaccctggatcaatagggtggctctctggagagcttgttcagagcccccgctgttagctagccacccagtaatttttccattttgacaccaggatgagtggccatggagtagatcaatgagaatatgtgtaggttctgggggccccattcctgagtctgggaggaggacacccagtgaagagagtgatcagggaaggtgtctgagctagtgtcacccagggcttctaggaacacgtgtggattggttatccactggcttcctaaactcaccccgggcaggcacactgactccccagcctgtctcccccaccactgtctcccctcagccactaaagactgagcactgtccctgccacctgttcggattggtttatccactactaccagctgccattcccacttccagctctatcctttcctctctgctcccagaaggatcttcctctcatagatgcaggcagggcatgaaagacacaagatcaagtctacgctgtttgcattcaggcaacggccttcctgaagcccccaggtcctgatcagcctttccagtcccatctccagcaggctccccacacagacacagcacattgcttgctgagatctgcacaggccacacactgaaatatttcctgtgcctggaagtccctctctcacttccaccaaccatcacagccccatgcattaaagcccagcccaaacgtcaccttccatgggaagccttctctccacattcctcttctaccctgagaatgtgaattgcactgaaattgtctgattgtatttcattatgggtcacaatgaatctgattgtcacacttttttatccaacagtcctggcacatagtaggtgcttaatcaatgtgcatattctttttaaattttttaaatgaacactcctgctgttctacgtgtatgttatttttttaaaaaatgaaataaatgaaggaatgaattctttctacttgaactcaaagtactgcacactctgccaatggctagtttttcagcctgatcttctaaccccacggcttctagctctctaaacagatcagactattaatttgaaacatgttctccaacctctttgggcttcaagggtcccctgtctcaactgcctttcccccatatctgtcaatcatcatcttccctttcaggtccacctgcttcaacaccatacaaaatactaagagtctatcatgcagcaaaaaattttataagcatttcatttgacccctaataatggctctgaacattaaacattgttattcctgttttacaaaagattaaactgaaactcagagaagtcaagccacttgttcaggatctcccagtgagtcagaatgtctccttctgcatggacaagctgctctcaggcctctccagctcagaatgaatctcttcttccttctagtttggagttcctcggccattttttttttattatcgccacctaaggaagcttttaagacacttttttcctcccagtactcccagtagccctcctccccccattaaattgtaatataatagatttactatctgcttaagtactctatgtatatctgtgctttattttttcaaagtaagattttttttaatctcctaagaacaaatttttctcccttatggaaggtggcattatcctgttgaaaattcctgttctatggctgggcgcagtggctcatgcctgtgatcccagcactttgggaggccgaggcgggctgaggtcaggagttcaagaccagcctgatcaacatggagaaacctcatctctactaaaaatgcaaaattagtcaggcatagtggcacatgcctgtaattccagctactcgggtggctgaggcaggaggttgaacctggaaggcggaggttgcagggagcctagattgcgccattgcactccagcctgggcaacaagagcgaaactccatctcaaattaaaaaaaaacaaaaacagaaaatgcatgctctatatcaccttctctttgaagtgtggcccttaccctagagtttgtaacttgttcccccctccactgtgagttctgtgttccaggtactgtggcttagtaacaatttccccaaaacttagtgacataaaaccattacttactctattcacaaattccgtgggttcacaaatttcagacagggtaaagtgggaggctttttctcttctgctttgcaatgtctgggatctcagctaggacactccaagactggggctggagcacactgaacgctcatttcctctcgtgtttggcagtcgatgccagctgttggctggcaccctagctgaggctgttggttagaacacctacatgtggcctcttaatgtggcctgggctgcctcacaacatggtggctgagcatcaggggtgagcagctgagagaaaaagagagagggccaagtggtgtcctcttttacggcctgaccttaaagtcatggagcatcacttccactatattctgtgtatcgacgcagttacaaattcatgcctagttcaagggaagaggaagccaactccacctcttgattggggaatgataaagttttaaatatatatgggactggatatgttgctgtggtcattttggggaagtaccgtctgctgtactctaatatctgctgatctgcaacccttgtgccccactcccaacaaccaccccatcttcacatggccttgcacacggggtaatgctgatatacatgtctgaaatttatttggatgctctaagttgagaggatgaagccccaggccttggtccattcctgccaatatcaatatgtggttaatatggtccagagatccctggagaggccagatgtgggcaagaagctcactgaggcagaagggtgccctagaacaaatgggaagtgagaacaagcattacaagaaaggtcctggtgtaaagtgtttggatctttctttttcccctctcaaaagcagttcagttatttctggaaatgttcaaactagtcatttcccatatatatatatatagatagacagagtgagacacccagaggagttgcaatagaatttgacttatattctttttttttttttttttttttttttgtagagacggagtctcgctctgtcgctcagcctggagtgcagtggcgtgatctcggtttgctgcaatctctgcctcctaggttcaagtgattctcctgcctcagcctcccaagtagctgggactacaggcgcatgctgccatgcccggctaatttcttttgtattttagtagagacagggtttcccgtgtttcccaaatgagactatcaatgaaactaatgttgtcactaatcagcaaaataccagtcaactcccatttggcaatatgctacctgtattgatatttctgtcaacaccactgccatccatacagcacagcatgttttaaaatggcaataatctgtacaaggagccataatctatacacaaaaataatttcacatttttcaagctcaggaaatattagcttaatgttctaagagtccctaatatgatctatgtcatcaattaaactcaaaaagttttactgggaaaaacagaaacaacctattcagtttctgactttgggttaacattaatcagctaatgcatattatcataggtacccaaactagatctgtagaagcaaggacaattatgagtgccttttttatttgaatcatttattattttattttaaattactattacatattaatttcataaaaactcattattaccattataagtgttattagagtgaaaaggataaatgaactgtgatccttattatgaaatgccaagtatagaatttagatgtatttttggaaataaaagaagcactgatgttattaatgaataacacagacaggtaggaaagttaggccgagaaaaaaacaaaacaaaataaaacagcaaagaagaacaatcaagatactgatccatcgatgagcccattgttctcctgtgctgtagcattacacggacctgattgacacttgagttagaatatatttaattgcgaaaagtactcttatgttctatatttggataaaagtccatatgaaatcacttaagtgcatttattgtacatgttaaataaattaattcacttagaaaaggtacttgtttataaatattgtaaataacaatacttgctaaatatataggtttgagccactggagaaatgagaactaaattcccaagcatccatctctccttaggtctggggctggggcacttctgcttctccacctgcagaggtaactgggaccctccacagatgccaggaaggcaggtagtggacatgctgctgtattgttggacaagcacactagccctggacagagctgtggaaaacacaagtggttctggaccttaaactgggtgagata

SEQ ID NO: 2016 - DNA, 6467 bp, Homo sapiens
atacgtagacaatatccaacctggacaaaacgggcttcccttgcgagccgacctaaaccgcatcccccaaagaatagagactaaatgcaaagtgagaagaaacagttgaaggactaggaagaggatcctctagggatgagctggtcactttcatgaattcaaaggcaatttaccagtgatttctgggtgctggggctgatattttttgtgcatatttctcacacagtttgatataaacttaagtgaatgaattcattaataaaagcagattttctatttttatttcacctctgggctattttatacctttggagcacacaagcacaacaaaagaagaatgtcttccaagcaagccacctctccatttgcctgtgcagctgatggagaggatgcaatgacccaggatttaacctcaagggaaaaggaagagggcagtgatcaacatgtggcctcccatctgcctctgcaccccataatgcacaacaaacctcactctgaggagctaccaacacttgtcagtaccattcaacaagatgctgactgggacagcgttctgtcatctcagcaaagaatggaatcagagaataataagttatgttccctatattccttccgaaatacctctacctcaccacataagcctgacgaagggagtcgggaccgtgagataatgaccagtgttacttttggaaccccagagcgccgcaaagggagtcttgccgatgtggtggacacactgaaacagaagaagcttgaggaaatgactcggactgaacaagaggattcctcctgcatggaaaaactactttcaaaagattggaaggaaaaaatggaaagactaaataccagtgaacttcttggagaaattaaaggtacacctgagagcctggcagaaaaagaacggcagctctccaccatgattacccagctgatcagtttacgggagcagctactggcagcgcatgatgaacagaaaaaactggcagcgtcacaaattgagaaacaacggcagcaaatggaccttgctcgccaacagcaagaacagattgcgagacaacagcagcaacttctgcaacagcagcacaaaattaatctcctgcagcaacagatccaggttcagggtcacatgcctccgctcatgatcccaatttttccacatgaccagcggaccctggcagcagctgctgctgcccaacagggattcctcttcccccctggaataacatacaaaccaggtgataactaccccgtacagttcattccatcaacaatggcagctgctgctgcttctggactcagccctttacagctccagaagggtcatgtctcccacccacaaattaaccaaaggctaaagggcctaagtgaccgttttggcaggaatttggacacctttgaacatggtggtggccactcttacaaccacaaacagattgagcagctctatgccgctcagctggccagcatgcaggtgtcacctggagcaaagatgccatcaactccacagccaccaaacacagcagggacggtctcacctactgggataaaaaatgaaaagagagggaccagccctgtaactcaagttaaggatgaagcagcagcacagcctctgaatctctcatcccgacccaagacagcagagcctgtaaagtccccaacgtctcccacccagaacctcttcccagccagcaaaaccagccctgtcaatctgccaaacaaaagcagcatccctagccccattggaggaagcctgggaagaggatcctctttagatatcctatctagtctcaactcccctgccctttttggggatcaggatacagtgatgaaagccattcaggaggcgcggaagatgcgagagcagatccagcgggagcaacagcagcaacagccacatggtgttgacgggaaactgtcctccataaataatatggggctgaacagctgcaggaatgaaaaggaaagaacgcgctttgagaatttggggccccagttaacgggaaagtcaaatgaagatggaaaactgggcccaggtgtcatcgaccttactcggccagaagatgcagagggaggtgccactgtggctgaagcacgagtctacagggacgcccgcggccgtgccagcagcgagccacacattaagcgaccaatgaatgcattcatggtttgggcaaaggatgagaggagaaaaatccttcaggccttccccgacatgcataactccaacattagcaaaatcttaggatctcgctggaaatcaatgtccaaccaggagaagcaaccttattatgaagagcaggcccggctaagcaagatccacttagagaagtacccaaactataaatacaaaccccgaccgaaacgcacctgcattgttgatggcaaaaagcttcggattggggagtataagcaactgatgaggtctcggagacaggagatgaggcagttctttactgtggggcaacagcctcagattccaatcaccacaggaacaggtgttgtgtatcctggtgctatcactatggcaactaccacaccatcgcctcagatgacatctgactgctctagcacctcggccagcccggagcccagcctcccggtcatccagagcacttatggtatgaagacagatggcggaagcctagctggaaatgaaatgatcaatggagaggatgaaatggaaatgtatgatgactatgaagatgaccccaaatcagactatagcagtgaaaatgaagccccggaggctgtcagtgccaactgaggagtttttgtttgctgaattaaagtactctgacatttcacccccctccccaacaaagagttattaaagagcccgcatgcatttgtggctccacaattacatcagcagaatggtcttaattgtttcgtaaagtgtgagacagattaagttttccctgatttttcatgaacttgagttttttgttgttattgttattgttgttgttgttgtttttttaatttaggtgaagacatattaaatatgagacaccaggacttgaaacttatctcaacccgtagatgtcttacaagtcttatatttttgtcttactttttttttcttttggatgttgataaaggtttaagttactgttttagatggggttaaacattctcactcaggtatgctgtgccggcctacaggttgtgaatgtgtttttattctgaattattttagaaaacaactgaggatttcatattgtgaaacagaacaagtccacggcgtgtgcagctgcatgtagagcatattcaaaaggcctcggaattccaattttccatttgtagagttaaactttgaatgtgccaaactttttcgtaacttttgaatcttaatattttgaaagtcttaaaggagacactgcaaagtcttagacaatctttggcatcttaaaataaaatagcaaaccaacatttttttttccagaaaatggtaaggtactcaggaatctggagacaagatattgtaaggaatgaacaaggttgccacagtgcatggacccaattgtgtttgcctgttgacgtgccatcagtgcgtgatgtggtatgacatacacacaccagagcaaccgccacaccagatatcgacagagtggtcttctctgcctgagaccacctctcactacatccattatccctttgcctttaaccctgacattcagtcttaacacattttatcttaaataatttattcattccagaatgtcaagggtccacttgctatttattttttttcaattgttggtggcattaatttaataattcttgtttttcaccttccttccccgaagaacttttccgtccttttcacctccttctcctgtgtacatagtgattttatgtccccagaacgcctggaagcatttctgaaaccaagatattattaaaaacctattattgtttttaatcatgagtatgtatctggctgcagggctgtgtattgggatataggtatatagtcttacacttaaacaggtatgcccctgaggttcactgtgacctcaagtcttttgccagaattttcccctaattcagttcacaagtggtagggtctgcatcagtggcatttccccctgaattccattcagcagcaaggttcaacagtggtgactgccaggcaggagagtcctgcggccaaacctgaagcccaaggctcgtgggccatgcaggaatctcagtgaagctgtcatgggctggcacctttacactgagttgccttgtcccagctggcacatctagggagttcattgcaaaatccccaggatgcaaaaagccacatgacagcctcagagcaaagatggtggcaaatagtcatgatacatctagagaatgaaagaaaactgtaagggaggagaaggaggggaatacattccctatatgggatgttcctactgttaactctggggaacagatagctccgggggcagcagatgagttcctctggctgactctatctgtagccacatggggacctgcctacgtgtgaacaaaatgaactgcacttatcacacaaggatttctttgaagacatgctactggggtgggaagcagtgaggttttattccccatctcctaactacagggagctctgccatgtcattttggccttcctgaaactaggacaggttgtctatcggggggcttcccccagagaggtttagtgggagaatgtcagtgaatgggatagttcacctcatgggacaacccagaatctgatcaccaggacataggaatggccccatcagatttcttgagccattttgtcacttggaagaaaatagtgtacctttgtatttatttaagagtgctcaaggcctaatagcaataaacaggtctagccaagaaattacaagctattctgttagctgggagtgctctctataagctgattaaggtactgataggaactctttgttattcatgttggttggggattagaaatttgtttttgtacatttatttcaaatgaggaggaggtcattttttctctcaaaaaatgagtatttattattgtcttactgatttctttgattatatacctctcctcctcagttcactcttgttttttttctttctctttggcttttgcttttgctctctctcacttctttcttattttgttgcattggtagagtgttgtatggctagcattgtattgtatgtaattaattttgcacaaaagcaaacatttagcatagtaggttaattttgtttgtttttatgaccatgccaaaataatattctgggctggtggagaacaaaggactgttctttaggactgaaacttgattttgctcatagtaagtaaaaaaaaacaaaaaacacacacactcacagatgttgtttcgtaagtgttataagcactggatataaatggtattttttatcacttctgactaatgtgaaactgttgtacgaaaactacatgaacaaaagtcatctgtttcgactcgtgtgggcttgcctcacagttgccggatttgagtcatttttatgtcttgttatttcatttatttatgcaaaatacatgtgtgtatgaacactttgttttagctccagctctgcctcagtactggggttcatttacttttagccatgttcttaaaaatgaaaggctattcaggaatgatctgattgtaaacgtctttttcattggatcaaacagtaatgctgtatttgaatctaaattttgtgtataagcagtttatttattagccaagtttggctctaaatatccatggaaattaagaatgacaatcatagggatcaattcattttattttcagtggggcttaaacaaagtttatatgactttaccatctcattttagatttttctaattgtgtaaatataacatagaaatagaatttatttttggttcatgaatacttagtgagatataagttatgtatttcctttttgttctctatccatagatgttggtccaaactgaaagttgatgagtcactgtgcctctcggggtagtgagttatcagctacagtgagagagcagtgtttggcctgcagctgggacagcaaaacgtttcaccagggttctcatgcagttcagaacccactgtccacagatccagacatttcccttttttcttacagaaagttgatgattggacatactaaatttccactacagttaggagacagtcagtttgctttgggagtctacataaatcttctaagatagttctgtgaccatttaatagcaagaagcatgaatgccactacaaaggcaaaaatccacctctgagatcggccgttaataaacgtcccgtcatgtcagtttagattcaagaatgttaagcaactttgtttttgcggtgctccctatttcatagtatcttcaaatcaaaaataaaaattatctccattttgttaaagaacttacagggtcagggttctccttgtcacttagaattgggacactgccaggc

SEQ ID NO: 2017 - protein, 798 aa, Homo sapiens
MSSKQATSPFACAADGEDAMTQDLTSREKEEGSDQHVASHLPLHPIMHNKPHSEELPTLVSTIQQDADWDSVLSSQQRMESENNKLCSKFRNTSTSPHKPDEGSRDREIMTSVTFGTPERRKGSLADVVDTLKQKKLEEMTRTEQEDSSCMEKLLSKDWKEKMERLNTSELLGEIKGTPESLAEKERQLSTMITQLISLREQLLAAHDEQKKLAASQIEKQRQQMDLARQQQEQIARQQQQLLQQQHKINLLQQQIQVQGHMPPLMIPIFPHDQRTLAAAAAAQQGFLFPPGITYKPGDNYPVQFIPSTMAAAAASGLSPLQLQKGHVSHPQINQRLKGLSDRFGRNLDTFEHGGGHSYNHKQIEQLYAAQLASMQVSPGAKMPSTPQPPNTAGTVSPTGIKNEKRGTSPVTQVKDEAAAQPLNLSSRPKTAEPVKSPTSPTQNLFPASKTSPVNLPNKSSIPSPIGGSLGRGSSLDILSSLNSPALFGDQDTVMKAIQEARKMREQIQREQQQQQPHGVDGKLSSINNMQSCRNEKERTRFENLGPQLTGKSNEDGKLGPGVIDLWEDAEGGATVAEARVYRDRRASSEPHIKRPMNAFMVWAKDERRKILQAFPDMHNSNISKILGSRWKSMSNQEKQPYYEEQARLSKIHLEKYPNYKYKPRPKRTCIVDGKKLRIGEYKQLMRSRRQEMRQFFTVGQQPQIPITTGTGVVYPGAITMATTTPSPQMTSDCSSTSDEPSLPVIQSTYGMKTDGGSLAGNEMINGEDEMEMYDDYEDDPKSDYSSENEAPEAVSAN

SEQ ID NO: 2018 - DNA, 6446 bp, Homo sapiens
atacgtagacaatatccaacctggacaaaacgggcttcccttgcgagccgacctaaaccgcatcccccaaagaatagagactaaatgcaaagtgagaagaaacagttgaaggactaggaagaggatcctctagggatgagctggtcactttcatgaattcaaaggcaatttaccagtgatttctgggtgctggggctgatattttttgtgcatatttctcacacagtttgatataaacttaagtgaatgaattcattaataaaagcagattttctatttttatttcacctctgggctattttatacctttggagcacacaagcacaacaaaagaagaatgtcttccaagcaagccacctctccatttgcctgtgcagctgatggagaggatgcaatgacccaggatttaacctcaagggaaaaggaagagggcagtgatcaacatgtggcctcccatctgcctctgcaccccataatgcacaacaaacctcactctgaggagctaccaacacttgtcagtaccattcaacaagatgctgactgggacagcgttctgtcatctcagcaaagaatggaatcagagaataataagttatgttccctatattccttccgaaatacctctacctcaccacataagcctgacgaagggagtcgggaccgtgagataatgaccagtgttacttttggaaccccagagcgccgcaaagggagtcttgccgatgtggtggacacactgaaacagaagaagcttgaggaaatgactcggactgaacaagaggattcctcctgcatggaaaaactactttcaaaagattggaaggaaaaaatggaaagactaaataccagtgaacttcttggagaaattaaaggtacacctgagagcctggcagaaaaagaacggcagctctccaccatgattacccagctgatcagtttacgggagcagctactggcagcgcatgatgaacagaaaaaactggcagcgtcacaaattgagaaacaacggcagcaaatggaccttgctcgccaacagcaagaacagattgcgagacaacagcagcaacttctgcaacagcagcacaaaattaatctcctgcagcaacagatccaggttcagggtcacatgcctccgctcatgatcccaatttttccacatgaccagcggaccctggcagcagctgctgctgcccaacagggattcctcttcccccctggaataacatacaaaccaggtgataactaccccgtacagttcattccatcaacaatggcagctgctgctgcttctggactcagccctttacagctccagcagctctatgccgctcagctggccagcatgcaggtgtcacctggagcaaagatgccatcaactccacagccaccaaacacagcagggacggtctcacctactgggataaaaaatgaaaagagagggaccagccctgtaactcaagttaaggatgaagcagcagcacagcctctgaatctctcatcccgacccaagacagcagagcctgtaaagtccccaacgtctcccacccagaacctcttcccagccagcaaaaccagccctgtcaatctgccaaacaaaagcagcatccctagccccattggaggaagcctgggaagaggatcctctttaggtaaatggaaaagtcaacaccaggaagagacttacgaattagatatcctatctagtctcaactcccctgccctttttggggatcaggatacagtgatgaaagccattcaggaggcgcggaagatgcgagagcagatccagcgggagcaacagcagcaacagccacatggtgttgacgggaaactgtcctccataaataatatggggctgaacagctgcaggaatgaaaaggaaagaacgcgctttgagaatttggggccccagttaacgggaaagtcaaatgaagatggaaaactgggcccaggtgtcatcgaccttactcggccagaagatgcagagggaagtaaagcaatgaatggctctgcagctaaactacagcagtattattgttggccaacaggaggtgccactgtggctgaagcacgagtctacagggacgcccgcggccgtgccagcagcgagccacacattaagcgaccaatgaatgcattcatggtttgggcaaaggatgagaggagaaaaatccttcaggccttccccgacatgcataactccaacattagcaaaatcttaggatctcgctggaaatcaatgtccaaccaggagaagcaaccttattatgaagagcaggcccggctaagcaagatccacttagagaagtacccaaactataaatacaaaccccgaccgaaacgcacctgcattgttgatggcaaaaagcttcggattggggagtataagcaactgatgaggtctcggagacaggagatgaggcagttctttactgtggggcaacagcctcagattccaatcaccacaggaacaggtgttgtgtatcctggtgctatcactatggcaactaccacaccatcgcctcagatgacatctgactgctctagcacctcggccagcccggagcccagcctcccggtcatccagagcacttatggtatgaagacagatggcggaagcctagctggaaatgaaatgatcaatggagaggatgaaatggaaatgtatgatgactatgaagatgaccccaaatcagactatagcagtgaaaatgaagccccggaggctgtcagtgccaactgaggagtttttgtttgctgaattaaagtactctgacatttcacccccctccccaacaaagagttattaaagagcccgcatgcatttgtggctccacaattacatcagcagaatggtcttaattgtttcgtaaagtgtgagacagattaagttttccctgatttttcatgaacttgagttttttgttgttattgttattgttgttgttgttgtttttttaatttaggtgaagacatattaaatatgagacaccaggacttgaaacttatctcaacccgtagatgtcttacaagtcttatatttttgtcttactttttttttcttttggatgttgataaaggtttaagttactgttttagatggggttaaacattctcactcaggtatgctgtgccggcctacaggttgtgaatgtgtttttattctgaattattttagaaaacaactgaggatttcatattgtgaaacagaacaagtccacggcgtgtgcagctgcatgtagagcatattcaaaaggcctcggaattccaattttccatttgtagagttaaactttgaatgtgccaaactttttcgtaacttttgaatcttaatattttgaaagtcttaaaggagacactgcaaagtcttagacaatctttggcatcttaaaataaaatagcaaaccaacatttttttttccagaaaatggtaaggtactcaggaatctggagacaagatattgtaaggaatgaacaaggttgccacagtgcatggacccaattgtgtttgcctgttgacgtgccatcagtgcgtgatgtggtatgacatacacacaccagagcaaccgccacaccagatatcgacagagtggtcttctctgcctgagaccacctctcactacatccattatccctttgcctttaaccctgacattcagtcttaacacattttatcttaaataatttattcattccagaatgtcaagggtccacttgctatttattttttttcaattgttggtggcattaatttaataattcttgtttttcaccttccttccccgaagaacttttccgtccttttcacctccttctcctgtgtacatagtgattttatgtccccagaacgcctggaagcatttctgaaaccaagatattattaaaaacctattattgtttttaatcatgagtatgtatctggctgcagggctgtgtattgggatataggtatatagtcttacacttaaacaggtatgcccctgaggttcactgtgacctcaagtcttttgccagaattttcccctaattcagttcacaagtggtagggtctgcatcagtggcatttccccctgaattccattcagcagcaaggttcaacagtggtgactgccaggcaggagagtcctgcggccaaacctgaagcccaaggctcgtgggccatgcaggaatctcagtgaagctgtcatgggctggcacctttacactgagttgccttgtcccagctggcacatctagggagttcattgcaaaatccccaggatgcaaaaagccacatgacagcctcagagcaaagatggtggcaaatagtcatgatacatctagagaatgaaagaaaactgtaagggaggagaaggaggggaatacattccctatatgggatgttcctactgttaactctggggaacagatagctccgggggcagcagatgagttcctctggctgactctatctgtagccacatggggacctgcctacgtgtgaacaaaatgaactgcacttatcacacaaggatttctttgaagacatgctactggggtgggaagcagtgaggttttattccccatctcctaactacagggagctctgccatgtcattttggccttcctgaaactaggacaggttgtctatcggggggcttcccccagagaggtttagtgggagaatgtcagtgaatgggatagttcacctcatgggacaacccagaatctgatcaccaggacataggaatggccccatcagatttcttgagccattttgtcacttggaagaaaatagtgtacctttgtatttatttaagagtgctcaaggcctaatagcaataaacaggtctagccaagaaattacaagctattctgttagctgggagtgctctctataagctgattaaggtactgataggaactctttgttattcatgttggttggggattagaaatttgtttttgtacatttatttcaaatgaggaggaggtcattttttctctcaaaaaatgagtatttattattgtcttactgatttctttgattatatacctctcctcctcagttcactcttgttttttttctttctctttggcttttgcttttgctctctctcacttctttcttattttgttgcattggtagagtgttgtatggctagcattgtattgtatgtaattaattttgcacaaaagcaaacatttagcatagtaggttaattttgtttgtttttatgaccatgccaaaataatattctgggctggtggagaacaaaggactgttctttaggactgaaacttgattttgctcatagtaagtaaaaaaaaacaaaaaacacacacactcacagatgttgtttcgtaagtgttataagcactggatataaatggtattttttatcacttctgactaatgtgaaactgttgtacgaaaactacatgaacaaaagtcatctgtttcgactcgtgtgggcttgcctcacagttgccggatttgagtcatttttatgtcttgttatttcatttatttatgcaaaatacatgtgtgtatgaacactttgttttagctccagctctgcctcagtactggggttcatttacttttagccatgttcttaaaaatgaaaggctattcaggaatgatctgattgtaaacgtctttttcattggatcaaacagtaatgctgtatttgaatctaaattttgtgtataagcagtttatttattagccaagtttggctctaaatatccatggaaattaagaatgacaatcatagggatcaattcattttattttcagtggggcttaaacaaagtttatatgactttaccatctcattttagatttttctaattgtgtaaatataacatagaaatagaatttatttttggttcatgaatacttagtgagatataagttatgtatttcctttttgttctctatccatagatgttggtccaaactgaaagttgatgagtcactgtgcctctcggggtagtgagttatcagctacagtgagagagcagtgtttggcctgcagctgggacagcaaaacgtttcaccagggttctcatgcagttcagaacccactgtccacagatccagacatttcccttttttcttacagaaagttgatgattggacatactaaatttccactacagttaggagacagtcagtttgctttgggagtctacataaatcttctaagatagttctgtgaccatttaatagcaagaagcatgaatgccactacaaaggcaaaaatccacctctgagatcggccgttaataaacgtcccgtcatgtcagtttagattcaagaatgttaagcaactttgtttttgcggtgctccctatttcatagtatcttcaaatcaaaaataaaaattatctccattttgttaaagaacttacagggtcagggttctccttgtcacttagaattgggacactgccaggc

SEQ ID NO: 2019 - protein, 791 aa, Homo sapiens
MSSKQATSPFACAADGEDAMTQDLTSREKEEGSDQHVASHLPLHPIMHNKPHSEELPTLVSTIQQDADWDSVLSSQQRMESENNKLCSKFRNTSTSPHKPDEGSRDREIMTSVTFGTPERRKGSLADVVDTLKQKKLEEMTRTEQEDSSCMEKLLSKDWKEKMERLNTSELLGEIKGTPESLAEKERQLSTMITQLISLREQLLAAHDEQKKLAASQIEKQRQQMDLARQQQEQIARQQQQLLQQQHKINLLQQQIQVQGHMPPLMIPIFPHDQRTLAAAAAAQQGFLFPPGITYKPGDNYPVQFIPSTMAAAAASGLSPLQLQQLYAAQLASMQVSPGAKMPSTPQPPNTAGTVSPTGIKNEKRGTSPVTQVKDEAAAQPLNLSSRPKTAEPVKSPTSPTQNLFPASKTSPVNLPNKSSIPSPIGGSLGRGSSLGKWKSQHQEETYELDILSSLNSPALFGDQDTVMKAIQEARKMREQIQREQQQQQPHGVDGKLSSINNMQSCRNEKERTRFENLGPQLTGKSNEDGKLGPGVIDLWEDAEGSKAMNGSAAKLQQYYCWPTGGATVAEARVYRDRRASSEPHIKRPMNAFMVWAKDERRKILQAFPDMHNSNISKILGSRWKSMSNQEKQPYYEEQARLSKIHLEKYPNYKYKPRPKRTCIVDGKKLRIGEYKQLMRSRRQEMRQFFTVGQQPQIPITTGTGVVYPGAITMATTTPSPQMTSDCSSTSDEPSLPVIQSTYGMKTDGGSLAGNEMINGEDEMEMYDDYEDDPKSDYSSENEAPEAVSAN

SEQ ID NO: 2020 - DNA, 6134 bp, Homo sapiens
aagaatgtcttccaagcaagccacctctccatttgcctgtgcagctgatggagaggatgcaatgacccaggatttaacctcaagggaaaaggaagagggcagtgatcaacatgtggcctcccatctgcctctgcaccccataatgcacaacaaacctcactctgaggagctaccaacacttgtcagtaccattcaacaagatgctgactgggacagcgttctgtcatctcagcaaagaatggaatcagagaataataagttatgttccctatattccttccgaaatacctctacctcaccacataagcctgacgaagggagtcgggaccgtgagataatgaccagtgttacttttggaaccccagagcgccgcaaagggagtcttgccgatgtggtggacacactgaaacagaagaagcttgaggaaatgactcggactgaacaagaggattcctcctgcatggaaaaactactttcaaaagattggaaggaaaaaatggaaagactaaataccagtgaacttcttggagaaattaaaggtacacctgagagcctggcagaaaaagaacggcagctctccaccatgattacccagctgatcagtttacgggagcagctactggcagcgcatgatgaacagaaaaaactggcagcgtcacaaattgagaaacaacggcagcaaatggaccttgctcgccaacagcaagaacagattgcgagacaacagcagcaacttctgcaacagcagcacaaaattaatctcctgcagcaacagatccaggttcagggtcacatgcctccgctcatgatcccaatttttccacatgaccagcggaccctggcagcagctgctgctgcccaacagggattcctcttcccccctggaataacatacaaaccaggtgataactaccccgtacagttcattccatcaacaatggcagctgctgctgcttctggactcagccctttacagctccagaagggtcatgtctcccacccacaaattaaccaaaggctaaagggcctaagtgaccgttttggcaggaatttggacacctttgaacatggtggtggccactcttacaaccacaaacagattgagcagctctatgccgctcagctggccagcatgcaggtgtcacctggagcaaagatgccatcaactccacagccaccaaacacagcagggacggtctcacctactgggataaaaaatgaaaagagagggaccagccctgtaactcaagttaaggatgaagcagcagcacagcctctgaatctctcatcccgacccaagacagcagagcctgtaaagtccccaacgtctcccacccagaacctcttcccagccagcaaaaccagccctgtcaatctgccaaacaaaagcagcatccctagccccattggaggaagcctgggaagaggatcctctttagatatcctatctagtctcaactcccctgccctttttggggatcaggatacagtgatgaaagccattcaggaggcgcggaagatgcgagagcagatccagcgggagcaacagcagcaacagccacatggtgttgacgggaaactgtcctccataaataatatggggctgaacagctgcaggaatgaaaaggaaagaacgcgctttgagaatttggggccccagttaacgggaaagtcaaatgaagatggaaaactgggcccaggtgtcatcgaccttactcggccagaagatgcagagggaggtgccactgtggctgaagcacgagtctacagggacgcccgcggccgtgccagcagcgagccacacattaagcgaccaatgaatgcattcatggtttgggcaaaggatgagaggagaaaaatccttcaggccttccccgacatgcataactccaacattagcaaaatcttaggatctcgctggaaatcaatgtccaaccaggagaagcaaccttattatgaagagcaggcccggctaagcaagatccacttagagaagtacccaaactataaatacaaaccccgaccgaaacgcacctgcattgttgatggcaaaaagcttcggattggggagtataagcaactgatgaggtctcggagacaggagatgaggcagttctttactgtggggcaacagcctcagattccaatcaccacaggaacaggtgttgtgtatcctggtgctatcactatggcaactaccacaccatcgcctcagatgacatctgactgctctagcacctcggccagcccggagcccagcctcccggtcatccagagcacttatggtatgaagacagatggcggaagcctagctggaaatgaaatgatcaatggagaggatgaaatggaaatgtatgatgactatgaagatgaccccaaatcagactatagcagtgaaaatgaagccccggaggctgtcagtgccaactgaggagtttttgtttgctgaattaaagtactctgacatttcacccccctccccaacaaagagttattaaagagcccgcatgcatttgtggctccacaattacatcagcagaatggtcttaattgtttcgtaaagtgtgagacagattaagttttccctgatttttcatgaacttgagttttttgttgttattgttattgttgttgttgttgtttttttaatttaggtgaagacatattaaatatgagacaccaggacttgaaacttatctcaacccgtagatgtcttacaagtcttatatttttgtcttactttttttttcttttggatgttgataaaggtttaagttactgttttagatggggttaaacattctcactcaggtatgctgtgccggcctacaggttgtgaatgtgtttttattctgaattattttagaaaacaactgaggatttcatattgtgaaacagaacaagtccacggcgtgtgcagctgcatgtagagcatattcaaaaggcctcggaattccaattttccatttgtagagttaaactttgaatgtgccaaactttttcgtaacttttgaatcttaatattttgaaagtcttaaaggagacactgcaaagtcttagacaatctttggcatcttaaaataaaatagcaaaccaacatttttttttccagaaaatggtaaggtactcaggaatctggagacaagatattgtaaggaatgaacaaggttgccacagtgcatggacccaattgtgtttgcctgttgacgtgccatcagtgcgtgatgtggtatgacatacacacaccagagcaaccgccacaccagatatcgacagagtggtcttctctgcctgagaccacctctcactacatccattatccctttgcctttaaccctgacattcagtcttaacacattttatcttaaataatttattcattccagaatgtcaagggtccacttgctatttattttttttcaattgttggtggcattaatttaataattcttgtttttcaccttccttccccgaagaacttttccgtccttttcacctccttctcctgtgtacatagtgattttatgtccccagaacgcctggaagcatttctgaaaccaagatattattaaaaacctattattgtttttaatcatgagtatgtatctggctgcagggctgtgtattgggatataggtatatagtcttacacttaaacaggtatgcccctgaggttcactgtgacctcaagtcttttgccagaattttcccctaattcagttcacaagtggtagggtctgcatcagtggcatttccccctgaattccattcagcagcaaggttcaacagtggtgactgccaggcaggagagtcctgcggccaaacctgaagcccaaggctcgtgggccatgcaggaatctcagtgaagctgtcatgggctggcacctttacactgagttgccttgtcccagctggcacatctagggagttcattgcaaaatccccaggatgcaaaaagccacatgacagcctcagagcaaagatggtggcaaatagtcatgatacatctagagaatgaaagaaaactgtaagggaggagaaggaggggaatacattccctatatgggatgttcctactgttaactctggggaacagatagctccgggggcagcagatgagttcctctggctgactctatctgtagccacatggggacctgcctacgtgtgaacaaaatgaactgcacttatcacacaaggatttctttgaagacatgctactggggtgggaagcagtgaggttttattccccatctcctaactacagggagctctgccatgtcattttggccttcctgaaactaggacaggttgtctatcggggggcttcccccagagaggtttagtgggagaatgtcagtgaatgggatagttcacctcatgggacaacccagaatctgatcaccaggacataggaatggccccatcagatttcttgagccattttgtcacttggaagaaaatagtgtacctttgtatttatttaagagtgctcaaggcctaatagcaataaacaggtctagccaagaaattacaagctattctgttagctgggagtgctctctataagctgattaaggtactgataggaactctttgttattcatgttggttggggattagaaatttgtttttgtacatttatttcaaatgaggaggaggtcattttttctctcaaaaaatgagtatttattattgtcttactgatttctttgattatatacctctcctcctcagttcactcttgttttttttctttctctttggcttttgcttttgctctctctcacttctttcttattttgttgcattggtagagtgttgtatggctagcattgtattgtatgtaattaattttgcacaaaagcaaacatttagcatagtaggttaattttgtttgtttttatgaccatgccaaaataatattctgggctggtggagaacaaaggactgttctttaggactgaaacttgattttgctcatagtaagtaaaaaaaaacaaaaaacacacacactcacagatgttgtttcgtaagtgttataagcactggatataaatggtattttttatcacttctgactaatgtgaaactgttgtacgaaaactacatgaacaaaagtcatctgtttcgactcgtgtgggcttgcctcacagttgccggatttgagtcatttttatgtcttgttatttcatttatttatgcaaaatacatgtgtgtatgaacactttgttttagctccagctctgcctcagtactggggttcatttacttttagccatgttcttaaaaatgaaaggctattcaggaatgatctgattgtaaacgtctttttcattggatcaaacagtaatgctgtatttgaatctaaattttgtgtataagcagtttatttattagccaagtttggctctaaatatccatggaaattaagaatgacaatcatagggatcaattcattttattttcagtggggcttaaacaaagtttatatgactttaccatctcattttagatttttctaattgtgtaaatataacatagaaatagaatttatttttggttcatgaatacttagtgagatataagttatgtatttcctttttgttctctatccatagatgttggtccaaactgaaagttgatgagtcactgtgcctctcggggtagtgagttatcagctacagtgagagagcagtgtttggcctgcagctgggacagcaaaacgtttcaccagggttctcatgcagttcagaacccactgtccacagatccagacatttcccttttttcttacagaaagttgatgattggacatactaaatttccactacagttaggagacagtcagtttgctttgggagtctacataaatcttctaagatagttctgtgaccatttaatagcaagaagcatgaatgccactacaaaggcaaaaatccacctctgagatcggccgttaataaacgtcccgtcatgtcagtttagattcaagaatgttaagcaactttgtttttgcggtgctccctatttcatagtatcttcaaatcaaaaataaaaattatctccattttgttaaagaacttacagggtcagggttctccttgtcacttagaattgggacactgccaggc

SEQ ID NO: 2021 - protein, 798 aa, Homo sapiens; identical to SEQ ID NO: 2017

SEQ ID NO: 2022 - DNA, 6260 bp, Homo sapiens
ccttcgtggaagggtgtggaggtagaggatgatttcaattagaaataatgacagcaatagacgcttccaatgaagatatcgtggccaccaaaggacaaaggcaagaagttaattcctgaagtcgagaagaatgtcttccaagcaagccacctctccatttgcctgtgcagctgatggagaggatgcaatgacccaggatttaacctcaagggaaaaggaagagggcagtgatcaacatgtggcctcccatctgcctctgcaccccataatgcacaacaaacctcactctgaggagctaccaacacttgtcagtaccattcaacaagatgctgactgggacagcgttctgtcatctcagcaaagaatggaatcagagaataataagttatgttccctatattccttccgaaatacctctacctcaccacataagcctgacgaagggagtcgggaccgtgagataatgaccagtgttacttttggaaccccagagcgccgcaaagggagtcttgccgatgtggtggacacactgaaacagaagaagcttgaggaaatgactcggactgaacaagaggattcctcctgcatggaaaaactactttcaaaagattggaaggaaaaaatggaaagactaaataccagtgaacttcttggagaaattaaaggtacacctgagagcctggcagaaaaagaacggcagctctccaccatgattacccagctgatcagtttacgggagcagctactggcagcgcatgatgaacagaaaaaactggcagcgtcacaaattgagaaacaacggcagcaaatggaccttgctcgccaacagcaagaacagattgcgagacaacagcagcaacttctgcaacagcagcacaaaattaatctcctgcagcaacagatccaggttcagggtcacatgcctccgctcatgatcccaatttttccacatgaccagcggaccctggcagcagctgctgctgcccaacagggattcctcttcccccctggaataacatacaaaccaggtgataactaccccgtacagttcattccatcaacaatggcagctgctgctgcttctggactcagccctttacagctccagaagggtcatgtctcccacccacaaattaaccaaaggctaaagggcctaagtgaccgttttggcaggaatttggacacctttgaacatggtggtggccactcttacaaccacaaacagattgagcagctctatgccgctcagctggccagcatgcaggtgtcacctggagcaaagatgccatcaactccacagccaccaaacacagcagggacggtctcacctactgggataaaaaatgaaaagagagggaccagccctgtaactcaagttaaggatgaagcagcagcacagcctctgaatctctcatcccgacccaagacagcagagcctgtaaagtccccaacgtctcccacccagaacctcttcccagccagcaaaaccagccctgtcaatctgccaaacaaaagcagcatccctagccccattggaggaagcctgggaagaggatcctctttagatatcctatctagtctcaactcccctgccctttttggggatcaggatacagtgatgaaagccattcaggaggcgcggaagatgcgagagcagatccagcgggagcaacagcagcaacagccacatggtgttgacgggaaactgtcctccataaataatatggggctgaacagctgcaggaatgaaaaggaaagaacgcgctttgagaatttggggccccagttaacgggaaagtcaaatgaagatggaaaactgggcccaggtgtcatcgaccttactcggccagaagatgcagagggaggtgccactgtggctgaagcacgagtctacagggacgcccgcggccgtgccagcagcgagccacacattaagcgaccaatgaatgcattcatggtttgggcaaaggatgagaggagaaaaatccttcaggccttccccgacatgcataactccaacattagcaaaatcttaggatctcgctggaaatcaatgtccaaccaggagaagcaaccttattatgaagagcaggcccggctaagcaagatccacttagagaagtacccaaactataaatacaaaccccgaccgaaacgcacctgcattgttgatggcaaaaagcttcggattggggagtataagcaactgatgaggtctcggagacaggagatgaggcagttctttactgtggggcaacagcctcagattccaatcaccacaggaacaggtgttgtgtatcctggtgctatcactatggcaactaccacaccatcgcctcagatgacatctgactgctctagcacctcggccagcccggagcccagcctcccggtcatccagagcacttatggtatgaagacagatggcggaagcctagctggaaatgaaatgatcaatggagaggatgaaatggaaatgtatgatgactatgaagatgaccccaaatcagactatagcagtgaaaatgaagccccggaggctgtcagtgccaactgaggagtttttgtttgctgaattaaagtactctgacatttcacccccctccccaacaaagagttattaaagagcccgcatgcatttgtggctccacaattacatcagcagaatggtcttaattgtttcgtaaagtgtgagacagattaagttttccctgatttttcatgaacttgagttttttgttgttattgttattgttgttgttgttgtttttttaatttaggtgaagacatattaaatatgagacaccaggacttgaaacttatctcaacccgtagatgtcttacaagtcttatatttttgtcttactttttttttcttttggatgttgataaaggtttaagttactgttttagatggggttaaacattctcactcaggtatgctgtgccggcctacaggttgtgaatgtgtttttattctgaattattttagaaaacaactgaggatttcatattgtgaaacagaacaagtccacggcgtgtgcagctgcatgtagagcatattcaaaaggcctcggaattccaattttccatttgtagagttaaactttgaatgtgccaaactttttcgtaacttttgaatcttaatattttgaaagtcttaaaggagacactgcaaagtcttagacaatctttggcatcttaaaataaaatagcaaaccaacatttttttttccagaaaatggtaaggtactcaggaatctggagacaagatattgtaaggaatgaacaaggttgccacagtgcatggacccaattgtgtttgcctgttgacgtgccatcagtgcgtgatgtggtatgacatacacacaccagagcaaccgccacaccagatatcgacagagtggtcttctctgcctgagaccacctctcactacatccattatccctttgcctttaaccctgacattcagtcttaacacattttatcttaaataatttattcattccagaatgtcaagggtccacttgctatttattttttttcaattgttggtggcattaatttaataattcttgtttttcaccttccttccccgaagaacttttccgtccttttcacctccttctcctgtgtacatagtgattttatgtccccagaacgcctggaagcatttctgaaaccaagatattattaaaaacctattattgtttttaatcatgagtatgtatctggctgcagggctgtgtattgggatataggtatatagtcttacacttaaacaggtatgcccctgaggttcactgtgacctcaagtcttttgccagaattttcccctaattcagttcacaagtggtagggtctgcatcagtggcatttccccctgaattccattcagcagcaaggttcaacagtggtgactgccaggcaggagagtcctgcggccaaacctgaagcccaaggctcgtgggccatgcaggaatctcagtgaagctgtcatgggctggcacctttacactgagttgccttgtcccagctggcacatctagggagttcattgcaaaatccccaggatgcaaaaagccacatgacagcctcagagcaaagatggtggcaaatagtcatgatacatctagagaatgaaagaaaactgtaagggaggagaaggaggggaatacattccctatatgggatgttcctactgttaactctggggaacagatagctccgggggcagcagatgagttcctctggctgactctatctgtagccacatggggacctgcctacgtgtgaacaaaatgaactgcacttatcacacaaggatttctttgaagacatgctactggggtgggaagcagtgaggttttattccccatctcctaactacagggagctctgccatgtcattttggccttcctgaaactaggacaggttgtctatcggggggcttcccccagagaggtttagtgggagaatgtcagtgaatgggatagttcacctcatgggacaacccagaatctgatcaccaggacataggaatggccccatcagatttcttgagccattttgtcacttggaagaaaatagtgtacctttgtatttatttaagagtgctcaaggcctaatagcaataaacaggtctagccaagaaattacaagctattctgttagctgggagtgctctctataagctgattaaggtactgataggaactctttgttattcatgttggttggggattagaaatttgtttttgtacatttatttcaaatgaggaggaggtcattttttctctcaaaaaatgagtatttattattgtcttactgatttctttgattatatacctctcctcctcagttcactcttgttttttttctttctctttggcttttgcttttgctctctctcacttctttcttattttgttgcattggtagagtgttgtatggctagcattgtattgtatgtaattaattttgcacaaaagcaaacatttagcatagtaggttaattttgtttgtttttatgaccatgccaaaataatattctgggctggtggagaacaaaggactgttctttaggactgaaacttgattttgctcatagtaagtaaaaaaaaacaaaaaacacacacactcacagatgttgtttcgtaagtgttataagcactggatataaatggtattttttatcacttctgactaatgtgaaactgttgtacgaaaactacatgaacaaaagtcatctgtttcgactcgtgtgggcttgcctcacagttgccggatttgagtcatttttatgtcttgttatttcatttatttatgcaaaatacatgtgtgtatgaacactttgttttagctccagctctgcctcagtactggggttcatttacttttagccatgttcttaaaaatgaaaggctattcaggaatgatctgattgtaaacgtctttttcattggatcaaacagtaatgctgtatttgaatctaaattttgtgtataagcagtttatttattagccaagtttggctctaaatatccatggaaattaagaatgacaatcatagggatcaattcattttattttcagtggggcttaaacaaagtttatatgactttaccatctcattttagatttttctaattgtgtaaatataacatagaaatagaatttatttttggttcatgaatacttagtgagatataagttatgtatttcctttttgttctctatccatagatgttggtccaaactgaaagttgatgagtcactgtgcctctcggggtagtgagttatcagctacagtgagagagcagtgtttggcctgcagctgggacagcaaaacgtttcaccagggttctcatgcagttcagaacccactgtccacagatccagacatttcccttttttcttacagaaagttgatgattggacatactaaatttccactacagttaggagacagtcagtttgctttgggagtctacataaatcttctaagatagttctgtgaccatttaatagcaagaagcatgaatgccactacaaaggcaaaaatccacctctgagatcggccgttaataaacgtcccgtcatgtcagtttagattcaagaatgttaagcaactttgtttttgcggtgctccctatttcatagtatcttcaaatcaaaaataaaaattatctccattttgttaaagaacttacagggtcagggttctccttgtcacttagaattgggacactgccaggc

SEQ ID NO: 2023 - protein, 798 aa, Homo sapiens; identical to SEQ ID NO: 2017

SEQ ID NO: 2024 - DNA, 6527 bp, Homo sapiens
atacgtagacaatatccaacctggacaaaacgggcttcccttgcgagccgacctaaaccgcatcccccaaagaatagagactaaatgcaaagtgagaagaaacagttgaaggactaggaagaggatcctctagggatgagctggtcactttcatgaattcaaaggcaatttaccagtgatttctgggtgctggggctgatattttttgtgcatatttctcacacagtttgatataaacttaagtgaatgaattcattaataaaagcagattttctatttttatttcacctctgggctattttatacctttggagcacacaagcacaacaaaagaagaatgtcttccaagcaagccacctctccatttgcctgtgcagctgatggagaggatgcaatgacccaggatttaacctcaagggaaaaggaagagggcagtgatcaacatgtggcctcccatctgcctctgcaccccataatgcacaacaaacctcactctgaggagctaccaacacttgtcagtaccattcaacaagatgctgactgggacagcgttctgtcatctcagcaaagaatggaatcagagaataataagttatgttccctatattccttccgaaatacctctacctcaccacataagcctgacgaagggagtcgggaccgtgagataatgaccagtgttacttttggaaccccagagcgccgcaaagggagtcttgccgatgtggtggacacactgaaacagaagaagcttgaggaaatgactcggactgaacaagaggattcctcctgcatggaaaaactactttcaaaagattggaaggaaaaaatggaaagactaaataccagtgaacttcttggagaaattaaaggtacacctgagagcctggcagaaaaagaacggcagctctccaccatgattacccagctgatcagtttacgggagcagctactggcagcgcatgatgaacagaaaaaactggcagcgtcacaaattgagaaacaacggcagcaaatggaccttgctcgccaacagcaagaacagattgcgagacaacagcagcaacttctgcaacagcagcacaaaattaatctcctgcagcaacagatccaggttcagggtcacatgcctccgctcatgatcccaatttttccacatgaccagcggaccctggcagcagctgctgctgcccaacagggattcctcttcccccctggaataacatacaaaccaggtgataactaccccgtacagttcattccatcaacaatggcagctgctgctgcttctggactcagccctttacagctccagaagggtcatgtctcccacccacaaattaaccaaaggctaaagggcctaagtgaccgttttggcaggaatttggacacctttgaacatggtggtggccactcttacaaccacaaacagattgagcagctctatgccgctcagctggccagcatgcaggtgtcacctggagcaaagatgccatcaactccacagccaccaaacacagcagggacggtctcacctactgggataaaaaatgaaaagagagggaccagccctgtaactcaagttaaggatgaagcagcagcacagcctctgaatctctcatcccgacccaagacagcagagcctgtaaagtccccaacgtctcccacccagaacctcttcccagccagcaaaaccagccctgtcaatctgccaaacaaaagcagcatccctagccccattggaggaagcctgggaagaggatcctctttagatatcctatctagtctcaactcccctgccctttttggggatcaggatacagtgatgaaagccattcaggaggcgcggaagatgcgagagcagatccagcgggagcaacagcagcaacagccacatggtgttgacgggaaactgtcctccataaataatatggggctgaacagctgcaggaatgaaaaggaaagaacgcgctttgagaatttggggccccagttaacgggaaagtcaaatgaagatggaaaactgggcccaggtgtcatcgaccttactcggccagaagatgcagagggaagtaaagcaatgaatggctctgcagctaaactacagcagtattattgttggccaacaggaggtgccactgtggctgaagcacgagtctacagggacgcccgcggccgtgccagcagcgagccacacattaagcgaccaatgaatgcattcatggtttgggcaaaggatgagaggagaaaaatccttcaggccttccccgacatgcataactccaacattagcaaaatcttaggatctcgctggaaatcaatgtccaaccaggagaagcaaccttattatgaagagcaggcccggctaagcaagatccacttagagaagtacccaaactataaatacaaaccccgaccgaaacgcacctgcattgttgatggcaaaaagcttcggattggggagtataagcaactgatgaggtctcggagacaggagatgaggcagttctttactgtggggcaacagcctcagattccaatcaccacaggaacaggtgttgtgtatcctggtgctatcactatggcaactaccacaccatcgcctcagatgacatctgactgctctagcacctcggccagcccggagcccagcctcccggtcatccagagcacttatggtatgaagacagatggcggaagcctagctggaaatgaaatgatcaatggagaggatgaaatggaaatgtatgatgactatgaagatgaccccaaatcagactatagcagtgaaaatgaagccccggaggctgtcagtgccaactgaggagtttttgtttgctgaattaaagtactctgacatttcacccccctccccaacaaagagttattaaagagcccgcatgcatttgtggctccacaattacatcagcagaatggtcttaattgtttcgtaaagtgtgagacagattaagttttccctgatttttcatgaacttgagttttttgttgttattgttattgttgttgttgttgtttttttaatttaggtgaagacatattaaatatgagacaccaggacttgaaacttatctcaacccgtagatgtcttacaagtcttatatttttgtcttactttttttttcttttggatgttgataaaggtttaagttactgttttagatggggttaaacattctcactcaggtatgctgtgccggcctacaggttgtgaatgtgtttttattctgaattattttagaaaacaactgaggatttcatattgtgaaacagaacaagtccacggcgtgtgcagctgcatgtagagcatattcaaaaggcctcggaattccaattttccatttgtagagttaaactttgaatgtgccaaactttttcgtaacttttgaatcttaatattttgaaagtcttaaaggagacactgcaaagtcttagacaatctttggcatcttaaaataaaatagcaaaccaacatttttttttccagaaaatggtaaggtactcaggaatctggagacaagatattgtaaggaatgaacaaggttgccacagtgcatggacccaattgtgtttgcctgttgacgtgccatcagtgcgtgatgtggtatgacatacacacaccagagcaaccgccacaccagatatcgacagagtggtcttctctgcctgagaccacctctcactacatccattatccctttgcctttaaccctgacattcagtcttaacacattttatcttaaataatttattcattccagaatgtcaagggtccacttgctatttattttttttcaattgttggtggcattaatttaataattcttgtttttcaccttccttccccgaagaacttttccgtccttttcacctccttctcctgtgtacatagtgattttatgtccccagaacgcctggaagcatttctgaaaccaagatattattaaaaacctattattgtttttaatcatgagtatgtatctggctgcagggctgtgtattgggatataggtatatagtcttacacttaaacaggtatgcccctgaggttcactgtgacctcaagtcttttgccagaattttcccctaattcagttcacaagtggtagggtctgcatcagtggcatttccccctgaattccattcagcagcaaggttcaacagtggtgactgccaggcaggagagtcctgcggccaaacctgaagcccaaggctcgtgggccatgcaggaatctcagtgaagctgtcatgggctggcacctttacactgagttgccttgtcccagctggcacatctagggagttcattgcaaaatccccaggatgcaaaaagccacatgacagcctcagagcaaagatggtggcaaatagtcatgatacatctagagaatgaaagaaaactgtaagggaggagaaggaggggaatacattccctatatgggatgttcctactgttaactctggggaacagatagctccgggggcagcagatgagttcctctggctgactctatctgtagccacatggggacctgcctacgtgtgaacaaaatgaactgcacttatcacacaaggatttctttgaagacatgctactggggtgggaagcagtgaggttttattccccatctcctaactacagggagctctgccatgtcattttggccttcctgaaactaggacaggttgtctatcggggggcttcccccagagaggtttagtgggagaatgtcagtgaatgggatagttcacctcatgggacaacccagaatctgatcaccaggacataggaatggccccatcagatttcttgagccattttgtcacttggaagaaaatagtgtacctttgtatttatttaagagtgctcaaggcctaatagcaataaacaggtctagccaagaaattacaagctattctgttagctgggagtgctctctataagctgattaaggtactgataggaactctttgttattcatgttggttggggattagaaatttgtttttgtacatttatttcaaatgaggaggaggtcattttttctctcaaaaaatgagtatttattattgtcttactgatttctttgattatatacctctcctcctcagttcactcttgttttttttctttctctttggcttttgcttttgctctctctcacttctttcttattttgttgcattggtagagtgttgtatggctagcattgtattgtatgtaattaattttgcacaaaagcaaacatttagcatagtaggttaattttgtttgtttttatgaccatgccaaaataatattctgggctggtggagaacaaaggactgttctttaggactgaaacttgattttgctcatagtaagtaaaaaaaaacaaaaaacacacacactcacagatgttgtttcgtaagtgttataagcactggatataaatggtattttttatcacttctgactaatgtgaaactgttgtacgaaaactacatgaacaaaagtcatctgtttcgactcgtgtgggcttgcctcacagttgccggatttgagtcatttttatgtcttgttatttcatttatttatgcaaaatacatgtgtgtatgaacactttgttttagctccagctctgcctcagtactggggttcatttacttttagccatgttcttaaaaatgaaaggctattcaggaatgatctgattgtaaacgtctttttcattggatcaaacagtaatgctgtatttgaatctaaattttgtgtataagcagtttatttattagccaagtttggctctaaatatccatggaaattaagaatgacaatcatagggatcaattcattttattttcagtggggcttaaacaaagtttatatgactttaccatctcattttagatttttctaattgtgtaaatataacatagaaatagaatttatttttggttcatgaatacttagtgagatataagttatgtatttcctttttgttctctatccatagatgttggtccaaactgaaagttgatgagtcactgtgcctctcggggtagtgagttatcagctacagtgagagagcagtgtttggcctgcagctgggacagcaaaacgtttcaccagggttctcatgcagttcagaacccactgtccacagatccagacatttcccttttttcttacagaaagttgatgattggacatactaaatttccactacagttaggagacagtcagtttgctttgggagtctacataaatcttctaagatagttctgtgaccatttaatagcaagaagcatgaatgccactacaaaggcaaaaatccacctctgagatcggccgttaataaacgtcccgtcatgtcagtttagattcaagaatgttaagcaactttgtttttgcggtgctccctatttcatagtatcttcaaatcaaaaataaaaattatctccattttgttaaagaacttacagggtcagggttctccttgtcacttagaattgggacactgccaggc

SEQ ID NO: 2025 - protein, 818 aa, Homo sapiens
MSSKQATSPFACAADGEDAMTQDLTSREKEEGSDQHVASHLPLHPIMHNKPHSEELPTLVSTIQQDADWDSVLSSQQRMESENNKLCSKFRNTSTSPHKPDEGSRDREIMTSVTFGTPERRKGSLADVVDTLKQKKLEEMTRTEQEDSSCMEKLLSKDWKEKMERLNTSELLGEIKGTPESLAEKERQLSTMITQLISLREQLLAAHDEQKKLAASQIEKQRQQMDLARQQQEQIARQQQQLLQQQHKINLLQQQIQVQGHMPPLMIPIFPHDQRTLAAAAAAQQGFLFPPGITYKPGDNYPVQFIPSTMAAAAASGLSPLQLQKGHVSHPQINQRLKGLSDRFGRNLDTFEHGGGHSYNHKQIEQLYAAQLASMQVSPGAKMPSTPQPPNTAGTVSPTGIKNEKRGTSPVTQVKDEAAAQPLNLSSRPKTAEPVKSPTSPTQNLFPASKTSPVNLPNKSSIPSPIGGSLGRGSSLDILSSLNSPALFGDQDTVMKAIQEARKMREQIQREQQQQQPHGVDGKLSSINNMQSCRNEKERTRFENLGPQLTGKSNEDGKLGPGVIDLWEDAEGSKAMNGSAAKLQQYYCWPTGGATVAEARVYRDRRASSEPHIKRPMNAFMVWAKDERRKILQAFPDMHNSNISKILGSRWKSMSNQEKQPYYEEQARLSKIHLEKYPNYKYKPRPKRTCIVDGKKLRIGEYKQLMRSRRQEMRQFFTVGQQPQIPITTGTGVVYPGAITMATTTPSPQMTSDCSSTSDEPSLPVIQSTYGMKTDGGSLAGNEMINGEDEMEMYDDYEDDPKSDYSSENEAPEAVSAN

SEQ ID NO: 2026 - DNA, 4012 bp, Mus musculus
gaagtggggagcaacaccaggtgcaagcgacaaccagcagagccatggtgagttctcgggggcccaggaatctagtcattcagggccagctctctccctcgagggtccccagttcaaagttaacccacagtaagtggccttactagcttttgggctcaggtggtactggggcactccctgccatgtccaagaacctcatattgtctccctttacccccacaggacaaggaatatgtgggctttgctgccctgcccaaccagctgcatcgcaagtctgtcaagaaggggtttgacttcacactcatggtggcaggtctgtgggttctggagggggtgatgtacttatgagatcatggccatcctcctgtctgaccagtgggcctgtcccgtacacaggggagtcaggcctggggaaatccaccctcatcaacagcttgttcctcaccaacctctacgaggatcggcaggtgccagatgccagtggtaaatctaccccgagtctccacaggcttcccatccccactgctgtcctggcttccctctgtgctgtccctggcctcttcctgtgttatcaggctgcattctttttctttctatctggggactttggtggcctctggttttctctgagatggtttcctcccctgaaaacacatgtgggaatggagccctgcttcagagccctacgcagccaattctctgtccccatagctcgcacggcacaaactctgaccattgagcgccggggtgtggagattgaggagggaggtatcaaggtgaagttgaccttggtggacacgcctggctttggggactctgtggactgctcagactggtgagaagggggaggggcaggagctaagcctttcttccattatggaaaaccagaggtcagttgtagggctggcttgtcacagccccttgacccaaaagggggcacctgtttctggtaacaatctagcccaaagtatccagtgtttcttgttttgagataaggtttttctatgtagctcagggacctcaaattcactgtgtagcccagactggcctgaaactcaaagtcctcctcctgagattacaggtatatatatgcatgcctggtttgttcgatgcttttgttgttgttgtggcttgtttttgtttttagccatggtgtcacattagccctagctggcctggaactcactatgtaggccatggtggcctcaaatgtgacaatcctcctgcctcagcttcctgagtgctgagattacaggtgtgcagccaccacattctgatgtctcatgtactgtggccagctgtccctgatggctttggttaggagcaaagaaatgacttgggactgcacagtcctggttagcttcatcttgtcccctggcctgtgatctcggactatctatctccttcccacacaccagctggctgcctgtggttcgcttcattgaggagcagtttgagcaatacctcagggatgagagtggcttgaacaggaagaacatccaggattccagagtccattgctgcctctacttcatctcaccctttggccgagggtctggagagcaccctgggggtggactggttggggaggctggagaaagctcagtacttgaagctgagtcctgaccaataaatccctgaaacaggctccggcccctagatgtggctttcctccgggcagtgcacgagaaagtcaatatcatcccggtcatcggtaaagcagacgccctgatgcctagggagactcaggccctcaagcagaaggtatggctgaggcccctaagtgacagccaaggccatgattcaaccttgtctgtctggactttttttttaatcttggggtgacctttttgggggtggggtgaggaaagggttatgatcctgccacaagcaccatggccctaagggctcaggctcagaacagaccggtcatacagccctggaactagatgcttgactaagaggaaagggggaggggcaccacaactcaactcctggggtctctttggttctgcgatagtgatggctgcctgtctcactgtcttcaaagtgctttcccacggacccacgtcctcgggtttttttttttttttgttttttttttgttttttgtttttttttttttttggttttttttttttttggtttttcgagacagggtttctctgtatagccctggctgtcctggacctcactttatagaccaggctggcctcgaactcaaaaatccggctgccgctgcctctgcctcccggagtgctgggattaaaggcgtgggccaccacgcccggccccctcgtattttgatatttgtcctatctgagtttctcaccatcatgtctctgaggtttggttttggtcatcttgtgtggccatttctcaccatttgtccttcatatcgttctttctctctgatcaccccattctatctaccccactgtttctagccatgtaatgtccgtttctccttctatctgctctgagatccgggaccagttgaaagaggaggagatcaacatctatcagttcccaaagtgtgactctgatgaggacgaagaattcaagaagcagaatgaagaaatgaaggtttgacaggtggaggtggacaggggcaaggaagcaggaagtggaggcgaaagctgagaaagaggattatgcccaggatgagccaacgtgactcctgactcccgttctataggaaaacatccctttcgcagtcgttgggtcttgtgaagtggtgagggatggaacccgaccagtgaggggaagacgctactcctggggtaccgtggagggtaaggccaggcatgctttgagagcagtagggagttcggtctgaattcatacgtgaagttggaggtgggctctagtcttgggagttcctagaggccacaagaggggtccttgggctgcaaatcctgggttcttctctagactagtgaagtactcccagagagcagagcctaagggtggcgttgaacgcaaagctatctggtccgccctctagtggagaacccacatcactgcgatttcctgaacctgaggcggatgttggtgcagacccaccttcaggacttgaaagaggtgacccacgatctgctctacgagggctaccgggctcgctgcctacagagtctggctcgacctggggcccgggatcgagccagccgcaggtgagagcagggctattttggtgcttccatggcgccgccgtttgggcaagccttcctgactggtcctgctacccttcttaactcggcttcccaaatccaactaagcctctcccacactgaccttaacctcagggacaaggccccgcctcctacactcagaattcgccccaaggctagacccacaatgtcagacgtcaacatgttttctgaacgcacacaacctttccctctactctcttagcaagctttcccggcaaagtgccacagagatcccgctgcccatgttgcctctggctgacactgaaaagttgattcgcgagaaggacgaagaggtgagcaagcacttctctttccctctaattaatgccctagaacgttttctagatcccattttggccttgccgggttccactgcctgcaatcttgctccgcacagctgcgccgcatgcaagaaatgctggagaagatgcaagcccagatgcagcagagccaggctcagggcgagcaatcagatgtgctgtgatattccccaataccgcctgtcctcgcctctgctcaccgctaatcggctatcccatccccgcgctggacagcccagcgcccaatccggggatccagagggtaggcctgcccttgcacttaaaccagatccctccaatccggaagtttaaggcccatccgacttcgtcttccgcgcggctctaagaggaccgcactccaagaaaagcctccccaccactcctcctccccccccccccaccgctcttcccgcgttccaattgggttttcctattcctccaagttctccatctaataaaaactgcttcccgccttccccc

SEQ ID NO: 2027 - DNA, 1454 bp, Mus musculus
gaagtggggagcaacaccaggtgcaagcgacaaccagcagagccatggacaaggaatatgtgggctttgctgccctgcccaaccagctgcatcgcaagtctgtcaagaaggggtttgacttcacactcatggtggcaggggagtcaggcctggggaaatccaccctcatcaacagcttgttcctcaccaacctctacgaggatcggcaggtgccagatgccagtgctcgcacggcacaaactctgaccattgagcgccggggtgtggagattgaggagggaggtatcaaggtgaagttgaccttggtggacacgcctggctttggggactctgtggactgctcagactgctggctgcctgtggttcgcttcattgaggagcagtttgagcaatacctcagggatgagagtggcttgaacaggaagaacatccaggattccagagtccattgctgcctctacttcatctcaccctttggccgagggctccggcccctagatgtggctttcctccgggcagtgcacgagaaagtcaatatcatcccggtcatcggtaaagcagacgccctgatgcctagggagactcaggccctcaagcagaagatccgggaccagttgaaagaggaggagatcaacatctatcagttcccaaagtgtgactctgatgaggacgaagaattcaagaagcagaatgaagaaatgaaggaaaacatccctttcgcagtcgttgggtcttgtgaagtggtgagggatggaacccgaccagtgaggggaagacgctactcctggggtaccgtggaggtggagaacccacatcactgcgatttcctgaacctgaggcggatgttggtgcagacccaccttcaggacttgaaagaggtgacccacgatctgctctacgagggctaccgggctcgctgcctacagagtctggctcgacctggggcccgggatcgagccagccgcagcaagctttcccggcaaagtgccacagagatcccgctgcccatgttgcctctggctgacactgaaaagttgattcgcgagaaggacgaagagctgcgccgcatgcaagaaatgctggagaagatgcaagcccagatgcagcagagccaggctcagggcgagcaatcagatgtgctgtgatattccccaataccgcctgtcctcgcctctgctcaccgctaatcggctatcccatccccgcgctggacagcccagcgcccaatccggggatccagagggtaggcctgcccttgcacttaaaccagatccctccaatccggaagtttaaggcccatccgacttcgtcttccgcgcggctctaagaggaccgcactccaagaaaagcctccccaccactcctcctccccccccccccaccgctcttcccgcgttccaattgggttttcctattcctccaagttctccatctaataaaaactgcttcccgcc

SEQ ID NO: 2028 - protein, 362 aa, Mus musculus
MDKEYVGFAALPNQLHRKSVKKGFDFTLMVAGESGLGKSTLINSLFLTNLYEDRQVPDASARTAQTLTIERRGVEIEEGGIKVKLTLVDTPGFGDSVDCSDCWLPVVRFIEEQFEQYLRDESQRKNIQDSRVHCCLYFISPFGRGLRPLDVAFLRAVHEKVNIIPVIGKADALMPRETQALKQKIRDQLKEEEINIYQFPKCDSDEDEEFKKQNEEMKENIPFAVVGSCEVVRDGWVRGRRYSWGTVEVENPHHCDFLNLRRMLVQTHLQDLKEVTHDLLYEGYRARCLQSLARPGARDRASRSKLSRQSATEIPLPMLPLADTEKLIREKDEELRRMQEMLEKMQAQMQQSQAQGEQSDVL

SEQ ID NO: 2029 - DNA, 1083 bp, Mus musculus
gaagtggggagcaacaccaggtgcaagcgacaaccagcagagccatggacaaggaatatgtgggctttgctgccctgcccaaccagctgcatcgcaagtctgtcaagaaggggtttgacttcacactcatggtggcaggggagtcaggcctggggaaatccaccctcatcaacagcttgttcctcaccaacctctacgaggatcggcaggtgccagatgccagtgctcgcacggcacaaactctgaccattgagcgccggggtgtggagattgaggagggaggtatcaaggtgaagttgaccttggtggacacgcctggctttggggactctgtggactgctcagactgctggctgcctgtggttcgcttcattgaggagcagtttgagcaatacctcagggatgagagtggcttgaacaggaagaacatccaggattccagagtccattgctgcctctacttcatctcaccctttggccgagggctccggcccctagatgtggctttcctccgggcagtgcacgagaaagtcaatatcatcccggtcatcggtaaagcagacgccctgatgcctagggagactcaggccctcaagcagaagatccgggaccagttgaaagaggaggagatcaacatctatcagttcccaaagtgtgactctgatgaggacgaagaattcaagaagcagaatgaagaaatgaaggaaaacatccctttcgcagtcgttgggtcttgtgaagtgggcgagcaatcagatgtgctgtgatattccccaataccgcctgtcctcgcctctgctcaccgctaatcggctatcccatccccgcgctggacagcccagcgcccaatccggggatccagagggtaggcctgcccttgcacttaaaccagatccctccaatccggaagtttaaggcccatccgacttcgtcttccgcgcggctctaagaggaccgcactccaagaaaagcctccccaccactcctcctccccccccccccaccgctcttcccgcgttccaattgggttttcctattcctccaagttctccatctaataaaaactgcttcccgccttccccc

SEQ ID NO: 2030 - protein, 238 aa, Mus musculus
MDKEYVGFAALPNQLHRKSVKKGFDFTLMVAGESGLGKSTLINSLFLTNLYEDRQVPDASARTAQTLTIERRGVEIEEGGIKVKLTLVDTPGFGDSVDCSDCWLPVVRFIEEQFEQYLRDESQRKNIQDSRVHCCLYFISPFGRGLRPLDVAFLRAVHEKVNIIPVIGKADALMPRETQALKQKIRDQLKEEEINIYQFPKCDSDEDEEFKKQNEEMKENIPFAVVGSCEVGEQSDVL

SEQ ID NO: 2031 - DNA, 1483 bp, Mus musculus
ggcccaggaatctagtcattcagggccagctctctccctcgagggtccccagttcaaagttaacccacagacaaggaatatgtgggctttgctgccctgcccaaccagctgcatcgcaagtctgtcaagaaggggtttgacttcacactcatggtggcaggggagtcaggcctggggaaatccaccctcatcaacagcttgttcctcaccaacctctacgaggatcggcaggtgccagatgccagtgctcgcacggcacaaactctgaccattgagcgccggggtgtggagattgaggagggaggtatcaaggtgaagttgaccttggtggacacgcctggctttggggactctgtggactgctcagactgctggctgcctgtggttcgcttcattgaggagcagtttgagcaatacctcagggatgagagtggcttgaacaggaagaacatccaggattccagagtccattgctgcctctacttcatctcaccctttggccgagggctccggcccctagatgtggctttcctccgggcagtgcacgagaaagtcaatatcatcccggtcatcggtaaagcagacgccctgatgcctagggagactcaggccctcaagcagaagatccgggaccagttgaaagaggaggagatcaacatctatcagttcccaaagtgtgactctgatgaggacgaagaattcaagaagcagaatgaagaaatgaaggaaaacatccctttcgcagtcgttgggtcttgtgaagtggtgagggatggaacccgaccagtgaggggaagacgctactcctggggtaccgtggaggtggagaacccacatcactgcgatttcctgaacctgaggcggatgttggtgcagacccaccttcaggacttgaaagaggtgacccacgatctgctctacgagggctaccgggctcgctgcctacagagtctggctcgacctggggcccgggatcgagccagccgcagcaagctttcccggcaaagtgccacagagatcccgctgcccatgttgcctctggctgacactgaaaagttgattcgcgagaaggacgaagagctgcgccgcatgcaagaaatgctggagaagatgcaagcccagatgcagcagagccaggctcagggcgagcaatcagatgtgctgtgatattccccaataccgcctgtcctcgcctctgctcaccgctaatcggctatcccatccccgcgctggacagcccagcgcccaatccggggatccagagggtaggcctgcccttgcacttaaaccagatccctccaatccggaagtttaaggcccatccgacttcgtcttccgcgcggctctaagaggaccgcactccaagaaaagcctccccaccactcctcctccccccccccccaccgctcttcccgcgttccaattgggttttcctattcctccaagttctccatctaataaaaactgcttcccgccttccccc

SEQ ID NO: 2032 - protein, 334 aa, Mus musculus
MVAGESGLGKSTLINSLFLTNLYEDRQVPDASARTAQTLTIERRGVEIEEGGIKVKLTLVDTPGFGDSVDCSDCWLPVVRFIEEQFEQYLRDESQRKNIQDSRVHCCLYFISPFGRGLRPLDVAFLRAVHEKVNIIPVIGKADALMPRETQALKQKIRDQLKEEEINIYQFPKCDSDEDEEFKKQNEEMKENIPFAVVGSCEVVRDGWVRGRRYSWGTVEVENPHHCDFLNLRRMLVQTHLQDLKEVTHDLLYEGYRARCLQSLARPGARDRASRSKLSRQSATEIPLPMLPLADTEKLIREKDEELRRMQEMLEKMQAQMQQSQAQGEQSDVL

SEQ ID NO: 2033 - DNA, 24719 bp, Homo sapiens
  misc_feature (1)...(24719): n = A, C, G or T/U
tatcagctattactctaattggtttgatttcggcaaagtccagactctgcctggagtgggggctgaatgaacaactccaggcagtgggggctgaataaacagtgggccacatactaattgaaaacctaatatgggccaggcatggtggctcacgcctgtaatcccaacacctcgggaggctgaggtgggcaggtctcttgagtccagcagtttgagaccagcctggccaacatggtgaaaacccatctctaaaaagatacagggccgggggcggtggctcactcctgtaatcccagcactttgggatgccgatgtgggtggatcacgaggtcagaagattgagaccatcctggctaacacagtgaaaccccgtctctactaaaaatacaaaaaaattagatgggcgtggtggcaggcgcctgtagtcccagatactcaggaggctgaagcaggagaatggcgtgaacctgggaggcggagcttccagttagccgagatcgcgccactgcgctccagcctgggcgacagagcgatacgccgcctcaggaaaaaataaaataaataaaaagatacaaaaaagttagctgggagtggtggtgcacacctgtagtcccagctacttgggaggctgaggtgagaggatctcttgggcgcgggaggtgaaagttgcagggagctgagatcatgccactgcactccagcctgggtgacagagcaagaccctatcccacccccacccccccgccaaaaaaaaaggagaaagaaaaggaaagagaaagaaaaccttaggctggaatcagtggctcacgcctataatccccacactttgggaggctgaggcaggtgaatcacctgaggtcaggagttcgagaccagtttggccaacatggtgaaaccccatctctactaaaaaatacaaaaattagccagatgtggtggtacgcgcctgtaatcccagctactcgggaggcggaggcaggagaatcgcttgaactcgcgagccggaggttgcagtgagctgagatcacaccactgcattccgttctgggcaacagaacaaaactctgtttaaaaaaaaaaaaagaaaagaaaaagactgccaggagcagtggctcacgcctgtaatcccagcactttggtaggctgaggcgggcggatcatgaggtcaggggttggagaccagcctgaccaacatggtgaaaacctgtctctactaaaaataaaaaaattagctggaggtggtggtgctcacctgtaatcccagctactcaggaggctgaggcaggagaatcatttgaacccgggaggcagaggtttcagtgagcagagatcactgcactccagcctgggcgacagagtgagactccgtctcaaaaaataaaaataaaagaaaacctaatgtgtgctagaagcttgagatccaaagatgactatggattacgacctatcttcagagaggaaaatagagaatagttccgttttaatgtgccgtgagtttacatattaggaaagcagtgaaagatgaagatagaatgtaagtttattcggccgggcgcagtggctcacgcctctaatcccagcactttgggaggtcaaggtgggcagatcacgaggtcaggagatcgagaccatcctggctaacacattgaaaccctgtctctggccaggcgcggtggctcacgcctgtaatcccagcactttgggaggctgaggtgggcagatcacgaggtcaggagatcgagagcatcctggctaacacggtgaaaccccgtctctactaaaaatataaaaaaaaaattagccaggcgtgatggcgggcgcctgtagtcccagctactcaggaggctgaggcaggataatggcatgaacccaggaggcggagcttgcagtgagccgagatcacaccactgcactccagcctgggcgacagagaaaactcnnnnnnnnnnnnnnnnnnnnnnnnnnnnnnnnnnnnnnnnnnnnnnnnnnnnnnnnnnnnnnnnnnnnnnnnnnnnnnnnnnnnnnnnnnnnnnnnnnnnnnnnnnnnnnnnnnnnnnnnnnnnnnnnnnnnnnnnnnnnnnnnnnnnnnnnnnnnnnnnnnnnnnnnnnnnnnnnnnnnnnnnnnnnnnnnnnnnnnnnnnnnnnnnnnnnnnnnnnnnnnnnnnnnnnnnnnnnnnnnnnnnnnnnnnnnnnnnnnnnnnnnnnnnnnnnnnnnnnnnnnnnnnnnnnnnnnnnnnnnnnnnnnnnnnnnnnnnnnnnnnnnnnnnnnnnnnnnnnnnnnnnnnnnnnnnnnnnnnnnnnnnnnnnnnnnnnnnnnnnnnnnnnnnnnnnnnnnnnnnnnnnnnnnnnnnnnnnnnnnnnnnnnnnnnnnnnnnnnnnnnnnnnnnnnnnnnnnnnnnnnnnnnnnnnnnnnnnnnnnnnnnnnnnnnnnnnnnnnnnnnnnnnnnnnnnnnnnnnnnnnnnnnnnnnnnnnnnnnnnnnnnnnnnnnnnnnnnnnnnnnnnnnnnnnnnnnnnnnnnnnnnnnnnnnnnnnnnnnnnnnnnnnnnnnnnnnnnnnnnnnnnnnnnnnnnnnnnnnnnnnnnnnnnnnnnnnnnnnnnnnnnnnnnnnnnnnnnnnnnnnnnnnnnnnnnnnnnnnnnnnnnnnnnnnnnnnnnnnnnnnnnnnnnnnnnnnnnnnnnnnnnnnnnnnnnnnnnnnnnnnnnnnnnnnnnnnnnnnnnnnnnnnnnnnnnnnnnnnnnnnnnnnnnnnnnnnnnnnnnnnnnnnnnnnnnnnnnnnnnnnnnnnnnnnnnnnnnnnnnnnnnnnnnnnnnnnnnnnnnnnnnnnnnnnnnnnnnnnnnnnnnnnnnnnnnnnnnnnnnnnnnnnnnnnnnnnnnnnnnnnnnnnnnnnnnnnnnnnnnnnnnnnnnnnnnnnnnnnnnnnnnnnnnnnnnnnnnnnnnnnnnnnnnnnnnnnnnnnnnnnnnnnnnnnnnnnnnnnnnnnnnnnnnnnnnnnnnnnnnnnnnnnnnnnnnnnnnnnnnnnnnnnnnnnnnnnnnnnnnnnnnnnnnnnnnnnnnnnnnnnnnnnnnnnnnnnnnnnnnnnnnnnnnnnnnnnnnnnnnnnnnnnnnnnnnnnnnnnnnnnnnnnnnnnnnnnnnnnnnnnnnnnnnnnnnnnnnnnnnnnnnnnnnnnnnnnnnnnnnnnnnnnnnnnnnnnnnnnnnnnnnnnnnnnnnnnnnnnnnnnnnnnnnnnnnnnnnnnnnnnnnnnnnnnnnnnnnnnnnnnnnnnnnnnnnnnnnnnnnnnnnnnnnnnnnnnnnnnnnnnnnnnnnnnnnnnnnnnnnnnnnnnnnnnnnnnnnnnnnnnnnnnnnnnnnnnnnnnnnnnnnnnnnnnnnnnnnnnnnnnnnnnnnnnnnnnnnnnnnnnnnnnnnnnnnnnnnnnnnnnnnnnnnnnnnnnnnnnnnnnnnnnnnnnnnnnnnnnnnnnnnnnnnnnnnnnnnnnnnnnnnnnnnnnnnnnnnnnnnnnnnnnnnnnnnnnnnnnnnnnnnnnnnnnnnnnnnnnnnnnnnnnnnnnnnnnnnnnnnnnnnnnnnnnnnnnnnnnnnnnnnnnnnnnnnnnnnnnnnnnnnnnnnnnnnnnnnnnnnnnnnnnnnnnnnnnnnnnnnnnnnnnnnnnnnnnnnnnnnnnnnnnnnnnnnnnnnnnnnnnnnnnnnnnnnnnnnnnnnnnnnnnnnnnnnnnnnnnnnnnnnnnnnnnnnnnnnnnnnnnnnnnnnnnnnnnnnnnnnnnnnnnnnnnnnnnnnnnnnnnnnnnnnnnnnnnnnnnnnnnnnnnnnnnnnnnnnnnnnnnnnnnnnnnnnnnnnnnnnnnnnnnnnnnnnnnnnnnnnnnnnnnnnnnnnnnnnnnnnnnnnnnnnnnnnnnnnnnnnnnnnnnnnnnnnnnnnnnnnnnnnnnnnnnnnnnnnnnnnnnnnnnnnnnnnnnnnnnnnnnnnnnnnnnnnnnnnnnnnnnnnnnnnnnnnnnnnnnnnnnnnnnnnnnnnnnnnnnnnnnnnnnnnnnnnnnnnnnnnnnnnnnnnnnnnnnnnnnnnnnnnnnnnnnnnnnnnnnnnnnnnnnnnnnnnnnnnnnnnnnnnnnnnnnnnnnnnnnnnnnnnnnnnnnnnnnnnnnnnnnnnnnnnnnnnnnnnnnnnnnnnnnnnnnnnnnnnnnnnnnnnnnnnnnnnnnnnnnnnnnnnnnnnnnnnnnnnnnnnnnnnnnnnnnnnnnnnnnnnnnnnnnnnnnnnnnnnnnnnnnnnnnnnnnnnnnnnnnnnnnnnnnnnnnnnnnnnnnnnnnnnnnnnnnnnnnnnnnnnnnnnnnnnnnnnnnnnnnnnnnnnnnnnnnnnnnnnnnnnnnnnnnnnnnnnnnnnnnnnnnnnnnnnnnnnnnnnnnnnnnnnnnnnnnnnnnnnnnnnnnnnnnnnnnnnnnnnnnnnnnnnnnnnnnnnnnnnnnnnnnnnnnnnnnnnnnnnnnnnnnnnnnnnnnnnnnnnnnnnnnnnnnnnnnnnnnnnnnnnnnnnnnnnnnnnnnnnnnnnnnnnnnnnnnnnnnnnnnnnnnnnnnnnnnnnnnnnnnnnnnnnnnnnnnnnnnnnnnnnnnnnnnnnnnnnnnnnnnnnnnnnnnnnnnnnnnnnnnnnnnnnnnnnnnnnnnnnnnnnnnnnnnnnnnnnnnnnnnnnnnnnnnnnnnnnnnnnnnnnnnnnnnnnnnnnnnnnnnnnnnnnnnnnnnnnnnnnnnnnnnnnnnnnnnnnnnnnnnnnnnnnnnnnnnnnnnnnnnnnnnnnnnnnnnnnnnnnnnnnnnnnnnnnnnnnnnnnnnnnnnnnnnnnnnnnnnnnnnnnnnnnnnnnnnnnnnnnnnnnnnnnnnnnnnnnnnnnnnnnnnnnnaaaactccctctccaaaaaagaaaaaaaaaaagatgtagagaacacatgaagcaacaaaagcatgtttccaaagttataatgtgaccctatttttataaatataaacagtgtgtatacatatatataggcgtacgagaaggataaatactaaaattgggttatagaaagatagtgattgggaggccaaggtgggcagagcacctgaggtcagaagttcaagatcagcctggacaacatggtgaaaccctgtctctactaaaaatacaaaaattagtcaggtatgatggcaggcatctgtaatcacagctagtcgggaggctgaggcaggagaatcacttgaacccaggaggcagaggttgcagtgagccgagatcgcgccattgtactccagcctgggtgacgaggaaaactctgtcttttttggttttgttttgttttggagaggaagtctcactcttgtcccccaggctggagtgcgatggtgcgatctccactcactgcaacctctgcctcccgggttcaagtgattctcctgcctcagcctcccgactagctgtgattacagatgcctgccatcatacctgactaatttttgtgtttttagtagagannnnnnnnnnnnnnnnnnnnnnnnnnnnnnnnnnnnnnnnnnnnnnnnnnnnnnnnnnnnnnnnnnnnnnnnnnnnnnnnnnnnnnnnnnnnnnnnnnnnnnnnnnnnnnnnnnnnnnnnnnnnnnnnnnnnnnnnnnnnnnnnnnnnnnnnnnnnnnnnnnnnnnnnnnnnnnnnnnnnnnnnnnnnnnnnnnnnnnnnnnnnnnnnnnnnnnnnnnnnnnnnnnnnnnnnnnnnnnnnnnnnnnnnnnnnnnnnnnnnnnnnnnnnnnnnnnnnnnnnnnnnnnnnnnnnnnnnnnnnnnnnnnnnnnnnnnnnnnnnnnnnnnnnnnnnnnnnnnnnnnnnnnnnnnnnnnnnnnnnnnnnnnnnnnnnnnnnnnnnnnnnnnnnnnnnnnnnnnnnnnnnnnnnnnnnnnnnnnnnnnnnnnnnnnnnnnnnnnnnnnnnnnnnnnnnnnnnnnnnnnnnnnnnnnnnnnnnnnnnnnnnnnnnnnnnnnnnnnnnnnnnnnnnnnnnnnnnnnnnnnnnnnnnnnnnnnnnnnnnnnnnnnnnnnnnnnnnnnnnnnnnnnnnnnnnnnnnnnnnnnnnnnnnnnnnnnnnnnnnnnnnnnnnnnnnnnnnnnnnnnnnnnnnnnnnnnnnnnnnnnnnnnnnnnnnnnnnnnnnnnnnnnnnnnnnnnnnnnnnnnnnnnnnnnnnnnnnnnnnnnnnnnnnnnnnnnnnnnnnnnnnnnnnnnnnnnnnnnnnnnnnnnnnnnnnnnnnnnnnnnnnnnnnnnnnnnnnnnnnnnnnnnnnnnnnnnnnnnnnnnnnnnnnnnnnnnnnnnnnnnnnnnnnnnnnnnnnnnnnnnnnnnnnnnnnnnnnnnnnnnnnnnnnnnnnnnnnnnnnnnnnnnnnnnnnnnnnnnnnnnnnnnnnnnnnnnnnnnnnnnnnnnnnnnnnnnnnnnnnnnnnnnnnnnnnnnnnnnnnnnnnnnnnnnnnnnnnnnnnnnnnnnnnnnnnnnnnnnnnnnnnnnnnnnnataaatatatatcatcctaaattttgtattttttttgagacagggtctcgctctgtcacccatgctaaagtgtagtgacaccacaatgactcattgcagcctcaaattcctgggctcaagtgatcctcctgcctcaacctcccaactagctggggcaacaattgtgcaccacgatgcccagctaattttttttttttaatttgtaaagacatggatctcactgtgttgctcaggctggtctcaaactcctggcctcaagtgatcctcccacctcggcctcccaaagtgctgagattacagacatgagccactgcctggcctacatgttatcctcttttttatttatttttttaatacagatcgggtcttgctatgttgaccagactggtcttgaactcctagcctcaagcaatcctcccacctcagcctcccaaagcactgggattacaggcgtgaaccaccacgcccaacatttttttttttcctttaaacatgttattctgtcaaaggctgttgaataactcagagaagagttgatcagggtctgaacccaaagcaggttaatggcatggagagtgtgaagaaaaggggaccaatttttctgaaggataggtgggaattggaaactcactggaaacacttgtggggagtgagagtgggaggagttcagaaagttttttttccttttttttgagacagagtcttgctctgtcgccaggctggagtgcagtggtgtgatcttggctcactgcaacctgcgcctcctgggttcaagtgattcttgtgcctcagcctcccaagtagctgggattacaggcacgtgccaccacacccaactaatttttgtatttttagtagagacggggtttcaccatgttggccaggatggtctcgatctcctgaccttctgatctgcctgccttggcctccccaagtcctgggattacaggcgtgaaccaccacacccggctgatttcagaattttaactaagaccatagagatgctcaacctggtgagagatgcaggaggaaggccggtggtggagtgctgagaggtaacatgatccctgccctttgcttatttatttatttatattattattattattattattattattattatttgagaaagagttttgctcttgttgcccagattggagtgcaatggcacaatctcagctcaccgcaaacttcacctcccaggttcaagtgattctcctgcttcagctcccgtgtagctgggattacaggcatgcgccatcacgccctgctaattttgtatttttagtagagtcagggtttctccatgttgctcaggctggtctcgaactcctgaccacaggtgatctgcctgactcagcctcccaaagtgctgggattacaggcatgagccaccgcgcctggcctacttatttatttttttgagacggagtcttgccctgtcgcccaggctggagtgcagtggcaggatcttggctcactgcaacctacgcctctcaggttctagcaattctcctgcctcagcctccctagtagctgtgattacaggcgtgcaccaccatgcctggctaatttttgtattcttagtagagacgggggtttcaccatgttggccaggctggtctcgaactcctggcctcaagtgatccgactgccctgtcctcccaaaatgctggaattacaggcatgagccaccgcacccagcccccctttccagattcttaacagtccctagatggtattaagtagcatttttgtttgtttgttttttgttttttgagacggagtcttgctctgtcaccaggctggagtgcagtggcacgatcttggctcgctgcaacctccacctcctgggttcaagcaattctgctttagcctcctgagtagctgggactacaggcaatgccaccatgcccagctaattttttgtatttttagtagagatggggtttcaccatgttggccaggatggtctcaatctcttgacctcgtgatctgcccgactcagcctcccaaagtgctgggattacaggtgtgagccaccgcagcggtcctgaggtagatttgtttgtttgtttgtttgtttgagatagggtcttgctctgttgcccaggatggagtgtagcggtgcaatctcggctcactgcaacctccacctcctgggctcaagcaattctcttgcctcagattcccaagtagctggaattataggtacgcaccaccatgcctggctaatttttgtatttttgctagacagggtctcgccatgttggccaggctggtcttgaactcctggcctcaagtgatccacccgcctcggcctcccaaagtgctgggattacaggtgtgagccaccacgccagccaggtgctgggaatctgaaggagggacaatgaccctgcctagggtaggtggagagattgcatagaggcagagcccttggaaagaaacacttgaaggatgaggaagagtttaactgattcagaaaaaggaaaagctcaatgtgggtagagagccaaggacgtttggaagagtgagagatggggtgatgaggccagctgagggaggctttggcagtcaggccagaattcagacttgactctgagttactggggagttcctgaaggattttgagcagtggagttctttggccaggattctgaaggaaaatctctcgggcagtggtgtccaaagacctggagtccttttatgaatccattgtctgagctggaaaatgtatggcttcacccactcccaatcccatcatggcttctggtccacttttttctttttctttttttgaaacagcgttggcctggcatggtggctcacgcccgtaatcccagcagtttgggaggccgaggcgggcagatcacgaggtcaggagatcgaaaccatcctggctaacacggtgaaatctcgtctctactaaaaacacaaaaaaattagccaggcgcggtagcaggtgcctgtagtcccagctactcgggaggctgaggcaggagaatggcgggaacccgggaggtggagcttgcagtgagccgagatggcgccactacactccagcctgggcaacagagcgagactccgtctcaaaaaaagaaagaaagaaagaaaaagaaacagggttttgctgtgttgctcaggctggagtgtagtggtgtgatcacagctcactgcagtcttgatcttctgggctcatgcaatcctcccacctcagcctccccagtagctgggactacaggattgtaccaacatgcctggctaattttttaatgttttgtagagatggtagaggggcacgtccctctgttgcccaggctggtctggaactccttggctcaagctgtcctccctcctccgcctcccaaagtgctgagattacaggcgagagccaccttgcccgtcctgggaactgttttctaatcagctcatcaaaaccttcatctcccctgctaacaaagggagccacttccttcctctctgcacataccccatgtctcaccacgatgatggagctacagtgggacttggaatccagatgtgtgaaggatggagggttgaaggtacgtagacaggtgatgggcaaaggggtccaggaggtggcaaccccaagtgttcttggccttggccttccccacctctctgggactgggccagtttgagcatctcagctgcctcttctgcccgcccccttgttagccgcactcagcttcctgccccaccagaggaagtggggagagacggcaggtgcagtgatggctggcggagtcatggtgagtccttacacccagaaacctgggcatctcggcccccagcccccatgcctggggtccccagaccccactgactcttcctagcccaggaactcaagtgatcctggggaccctgcctgccattgccagcagcctcatattgtccacccccatccataggacaaggagtacgtgggttttgctgccctccccaaccagctgcaccgcaagtctgtcaagaaggggtttgacttcacgctaatggtggcaggtctgggggttttggagagggaactgcggaggggatgtccttaggaggccctggctgtcccctcccctgaccagttgggcctgttctgtccacaggggagtcaggcctagggaaatccaccctcatcaacagcctcttcctcaccaacctctatgaggatcgccaggtgccagaggccagtggtaagaccctccccaccctcttgaggcagtagcccctgtccccaggttacaccctagtcttttccatctggggactcaggtagttgactgctttttttctgagactttcctcccctgggaaatgggtgcaggcaactgtgatattgacaaaggaaattaattctgcctcagagcctccccggatccctgacctctcccccatcccacagctcgcttgacacagaccctggccattgagcgccggggcgtagagattgaggaagggggtgtgaaagtgaagctgacccttgtggacacacctggctttggggactcagtggactgctctgactggtgaggaagaggaaaggggacagaggctcagcctttcacagtggcgactccctggagagttacaggactggtttgtgctggctccctatctcaaaaggtggtgtctgtttcagagggccactgggtccctgtgcttcttgatgactcacctaggcccccaccagttccccttaatgtctttggagggagccaaagaaatgacattctactcccacagtcctggctagccttgccccctgccctctggcctttgatctctgacctcacatcctctccccacacccagctggcttccggtggtgaaattcatcgaggagcaatttgagcagtaccttagggatgagagtggcctgaaccggaagaacatccaggactcccgagtccactgctgcctctacttcatctcacccttcggccgggggtctggtggggggatcctgggggctggcgcatttagggagggctggggggtctctgccccctgaggctgggcaatgaccaatccctgggtgcaggctccggcccctagatgtggccttcctccgggcagtacacgagaaagtcaacatcatcccagtcattggcaaagcggatgctctgatgccccaggaaacccaggccctcaagcagaaggtgtgagtgatgacctctgacctttgaccccatgtgaagccaaacctgatttcagcttagacttctttgatcttgaagtggcctttctggagcatggtgcatcaggctagattgtaggagaagcttctgaggaaggcgggtggtaagccgccagcatagccatgtctctgaaggctcaaaataggctacatatgcagcccccgggctagatgcctggctgaggcctatttgagggcaggagcatagacatgagaacatagtgacttccctctggcccccaccccgtgtcttcagagccctttcccactgtttctgcttatatctctctcggcctctctttctctctctctttttttttagatagagtctcactctgtggcccaggctgcagtacagtggcaagatcagagctcactgcagcctcgaacttgtaggcgcaagtgatcctcctgcctcagcctcttgagtagcagggactatagatgaacaccaccatgcctggctaacttaaaaaatatttttttggctgggcttggtggcagacacctgttaatcccagcactttgggaggctgaggtcagtggactgcttgagctgaagagtttaagacaagccacggcaacatggtaaaaccccatctctacaaaaagtacaaaaaccagccaggtgtggtggtgtgcacttgtagtcccagttactcaggaggctgagatgggaggatcacctgagcctgagaggttgaggctgcagtgaaccaagatggagccactggactccagcctgggtgatagagtgaaaccttgtttcaaaatatatgtgtatatttgttgtagagatgggatctagctatattgcccaggcttctcctggtctcttaatgtctgccccatcttagaatcttgtgtttctcaccatctatgtctctgagattttgtttttgtcttcctgtatgtccatctctccccatctctgtctttcatgtctttctctctgtctctgaccacccagtatctctgtgtctcactgtctctggtcatgaaatgtctgtcattgtggcccgtttcacactgtctctatatctgtttcccctgagatccgggatcagttgaaggaagaggagatccacatctaccagttccccgaatgtgactctgatgaagatgaagacttcaagaggcaggatgcagagatgaaggtgtgggaaacaaagaaggaaggcaggccgggcacggtggctcacgtctgtaatcccagcactttgggaggctgagacgggaggatcccctgaggtcaggagttccagaccagcctgggcaacatggcgagaccccacctctactaaaaatacacaaatttgccaggtgtgatggtgggcgcctgtaattccagctactcgggaggctgaggcaggagaatcacttgaacactccagcctgggcaatggagtgagaccctgtctcaaaaaaaaaaaaaaaaaaaaaaaaaaaaaaaagaggaaggggcaggaagcagaggaggcgggtgtggagattgaagctgggaaagagaaagtttctgccgtgtgagccaatggtgaacccctgccccctgccctccaggaaagcatcccttttgcagtcgtgggatcatgcgaggtggtgagggatggcgggaaccggccggtgaggggacgccgctactcctgggggaccgtggagggtgagtgaggccaggcaggggtcctaaggccagcagggagcccggggcctctgggtcaggcgcactcaacatgtgaagttggggtgggctttggtcccaggggatcctaggaggaaaggggggtcgctgggctgcagaccgcggaccctccgctagagtggcagcaggactttcctgtagacccgacccttacgggtgggttggacccgaaactccctgacgttcgctggtccgcgccgccccccctccagtggagaacccacatcactgcgatttcctgaacctgcgacggatgctggtgcagacacacctgcaggacctgaaagaggtgacgcacgatctgctctacgagggctaccgggnnnnnnnnnnnnnnnnnnnnnnnnnnnnnnnnnnnnnnnnnnnnnnnnnnnnnnnnnnnnnnnnnnnnnnnnnnnnnnnnnnnnnnnnnnnnnnnnnnnnnnnnnnnnnnnnnnnnnnnnnnnnnnnnnnnnnnnnnnnnnnnnnnnnnnnnnnnnnnnnnnnnnnnnnnnnnnnnnnnnnnnnnnnnnnnnnnnnnnnnnnnnnnnnnnnnnnnnnnnnnnnnnnnnnnnnnnnnnnnnnnnnnnnnnnnnnnnnnnnnnnnnnnnnnnnnnnnnnnnnnccggccctaacctcaaggaactggctccgcctcctagaccccaacctcgccccaggccctgcctcctgggcctcacccacaacctcaggtcccgctcctgattcctgtccccttcccactgtcccgcagtaagctttcccgccagagcgccacagagatcccgctgcccatgctgcctctggcggacaccgagaagctgatccgcgagaaagacgaagaggtgagcacgcacctcgcttccccccgaccgatgccccaggtccccctctggcttcgccaggtcaccgcctgcaatctcgccctgcacagctgcgccgcatgcaagagatgctggagaagatgcaggcccaaatgcagcagagccaggcccagggcgagcagtcagacgccctctgaggccacgccccgcccggccttacctcggctccgccttcagtcggcctcttgtccaatccccgcgccccacactgcccagcgccccccgggacctccgcgggtgccgccctcgcgcgggctagggggaggttctcccagcctgagtccgtagccccgccccggcgctggtcccgcccacccagacaccgcccacttcccggcccggggcctgcacaatctccgaccgcatcactgtcttccggagtcccccttcttctcccagactctgtcttcaataaaaactgagcttcccgcggccacgcgagccttctccttccttgcggaaaaaggcggcgggcgtagattgtggggccgacccccgcaggcctccaggccgcatccattcatttgtggggcgctcccacctgaggccctcgcgcagacactctgaaggcgccgcccataagaaacaaagatcagttaaattttattgggagccggggtggaggtcgggccgaacagaagcgtcgggcagcggaggcccgcgggtgcccctactcctggtccttggcgtcgccgtgcgtgatgacgtagcagatgtttttgtagtcgacgttgccgcccacgtcgggggggaaggccgcccacatgttcttgatctggggaaagacgtaggggcgtctcgcacaggcccttagtctccccggccccagcccctttgctgctccggccccgccccggtccccactcacctcctcctgggagaagcggtcacactgcgtggtcagcagctcctccaggctggagagaggtgacacaaggggagttgcgattgggttcctggttcctttccactccctcgcacctcatccccgatgccagccccagcctcccctgaaaacccaggtcactctacttccttcattggcctcccagacactcgcttttgccctctccgcccacatttgctgtgaaaatgcaatcttaccgcccattaccacaatcttaactactcccttacctctggcagtgcctaacccttcgtaggaatttttgggtttttgtttgttttgagacagggtctcaccctgtcgcccaggctggaatgcagtggtttgatcacggctcactgcaacctggaactcttgggctcaagggatcttcctgcctcagcctccggagtagctgggactataggtgtttgccaccactcccgcgaatttttttttttcttttttttggagacggagttttgctattgtcgcccaggttggagggcagtggcgtgatcttggctcactgcaacctccgactccagggttcaagcgattctcatgtcccagtctccctagtagctgggactacaggcgcccgccaccacgcccagctaatttttgtatttttagtagagacggggtttcaccgtgttggccaggctgttcttggactcctgacctcacatgatccgcccgccttggcctcccaaagtgctgggattacaggcatgagccactgtgcccggccagcccacgaattttttagttaagtttttagaaacagggtcatgctgtgttatccaggctgatctcaaactcctgtcctcaagtaaatcctcctgcctctgcctcccaaagcactgggattataggcctgagccacagggcccagccttggtagaaatttaaggaggctgtcagtgtgggagcagctggtggagtgggggaagggtcggaagggtgggggagccgatgcttacaacttcttcttgatggtgccctttccctcagggtccaagaccttgaaggctccggtgatcacatcctcagggtcggcacctgtgggggtcagagggcacatgaagctgatgggtccctgaagggtctgggaaaaggcagccggggccttggacccaggacactccactcacccttgagcttctccccgaacatggtcaggaagacggtgaagttgatgggaccgctggcttccttcatcatggcatccaactcctcattcttcacattgaggcggcctggagggggttgggggaagcatgggctggagcaggctcctggggccgggcctgcgcttcccactaattcagctgatcccattcatttttcagctgggtagactgaggcccaaggtggagctgacagggctggaacccaaggccactgaatttcctagactctgcagccttgaatattcccacctgggggtagggggctcacccatggctgcgaaggtgtcccgaaggtcctccttgtctataataccatcacggttctggtcgatcacagtgaaggcctggggagggccgtggtggggagggttaggtcccccatggcccagcctcagcatccctaccccaggaggatcagatgctggctctcagccaactgtcctcttccaccccaagcagagaggggaggaaggaattctaaacctttcccctccttcaagcaggtgcacattccagggagagggccagcagggctgcttttggtcagccttccagtttccccgtcccctcacccacctctttgaactcctggatctgagtctggtcgaacatggagaagacgctggagcttccgccctctactgtccttctcttggccctcttgggtgcctggagggtgagggttgaacaaaggggcccatggaccagtccctccacctctctgggggcaatggattaagagtcagaattcttcgagtccctgttcctaaagcagccctttggcctgagtctccccttccttgggacctctttgctgagggggcttgctttgattgcattccccaaattcccgtctgtggctcctgggtctccaactctccatcccccacaatgggtggaagcttccttatcttctcagtgtcctgagcctagctcctctgagcctcagacttgctgtgtgaccccagccactcatttgccctgtttgagcctctacttttcttttctttttttttttttttttgagacagagtcttgctctgtcacccaggctggagtgcggtgctgcgatctcggcttaccgcaacctctgcctcccgggttcaagcgattcttatgccccagcctccgtagtagctgggattacaggcatgcaccaccacgcccagttaatttttgtatttttagtagagacggggtttcgcctgttggccaggctggtctcgaactcctggcttcaagtgatccaaccaccttggcctcccaaagtgctgggattacaggcgtgaaccacagcacctggcctgagcctctactttctcatttgtaaaatgggatgggagttattgcctggctggtgccagagggccttaggaagatggagtacaggaatgaatggatcaggctttgagagggactgggcccctgtgagttgaatgtctgggcggattatcattgattggatcctttaggccatcacacagtctgttttccatcagtgatgccgagaaagagatgagcatccttttaactttttgttggactgggaaccagctactttctttcaaagggtgaggctgccctgaggtctaagggatctgggcaggggttggaggattctcactcaccatgtcttcagtctccggggggcaaggcagcggctccggctggaaagaagcaaggagtcagcatggggcagtccctctggggttatatagtcctgccccagggagcccttaacataccaaggtaaccttagccctgcgggtgcccaccccagataccaaaatagcccaactcagggcctctcctttcttggagggctggcagcagctggagcccagcggggaggaaggggggagcatgtcttgcgatgcatgtctcactagggcctgggcaagaagagatgttctttctcccaaagaggggctggaatgtgccagagtttagaggggacgcaacccaaggcatcgttctgggagataaatgaaccagatcctgtacccctgagtggggtgggctcagatttaaacccagtaaacgtctgggtgcagtggttcacacctgtaatcccagcactttgggaagctgaggcaggaggattgcttgaggccaggagttcaggaccagcctgggcaacatagtgagacccctgtctcccttttttttttttttagacagtctcgctctgtctcccaggctagagtgccagtagtgtgatctcggttcactgcaacctccacctcccctgttcaagtgattctcctatcttggcctcccgagtagctgggattataggtgtgccatgaagccaggctaattttttttttctgtatttttagtagagacagggtttcaccgtgtcggccagagtggtctcaatcttctgacctggtgatccatccacctaggcctcccaaagtgctgggattacaggtgtgagccactgcgcctggcccccgtctctattttaaattaataaaataaacccagtaaacatgtattgaacacacacagtgtgccacgtgctaggctgggctttgtggatgtactttggcagacacaatccctccacccccacatggtggagttcatagtcaagtgtgtgtaagtgtgagggtggtgagaaagagccatctgtggaagctgagggatcaggtgggtctcctacctcccttcaaggagaggggaatttttttttcttttctttctttttttttttttttgagatggagtcttgctcttgtcacccaggtgggagtgcaatggtgcgatctcggcttactgcaacctccgccttctgggttcaagcgatacttctgcctcagcctcctgagtagctgggattccaggcacccgccaccatgcccagctactttttttttttttttttgagatgaagtctcgttttgttatccgggctggagtgcagtggcgtgatcttggctcactgtaacctccgcctcccgggttcaagtgattctcctgcttcagcctcccgagtagctgggactacaggcgcgtgtcaccacgcccgcctaatttttttgtatttttagtagagacggggtttccccgcgttagccaggatgatctcgatctcctgaccttgtgatctgcctgcctcggcctcccaaagtgctgggattacaggcgtgagccaccgtgcccggcatctaattttttgtatttttagtagagatggcgtttcaccatgttggccaggctggtcttgaattccgacttcagatgatccacccgtctcgacctcccaaagtgctcaaagtgctgggattacaggcatgagccaccgcgccgagccaagagggattttttgaggcaagatgctttgtggtctcaggttttgtgctgggccttggtttcccctctgtaaaagggagatgtagttcccatcccacagaacttgccttataactaatagagacaggaatgaatgcagaaactgacataccagagctggtcaggagcccagaagtggagggcgcagcagccctgtctaggagtatgggagtggcttcacgagggccagggagtcaggtgcaggtggaggagcagatgtgctgggcggagggcatggcctgagcaaaggcctggagagcggaagatcagaagtgttcaggtggccagaattgtgatggggctggtgaccagcccctgaggggcctttgccaggcacaggacggagaccctggggaaccttggaaaggtttcatgcagaagaaggatgtgatctagtatgagtctagaatattttctctgggtactggtgtggaggctggaactcaagaggggaggaaaagaccctaaaaggacagccagctggtcactttctgtgaggtgccttgatagccagtggcagctcactttattctggccaagagccagcttggctgattgtgtgactttgatgtaccctctcttctccctctgggcctcagtgacccagtcccctcccatgcagcagaagtctggaaaaatagtggctgaggaagccccaagttggcaaggacaaccatctccttctcctcccgctccctctaggacccgatgtcctgaggaagatgcctccccctgccctgtcccccctcctccaggcccatgccgatacctctaagacattttcttttctgggcactgaggccccagccacctgttgtctctaagaagagagaaggagccaccctaaacttagcagctgcccttagcctcccacaccagcccctccctgcctcagacagcagctgcctcgccttatagggttaccacgggggtccaggccagggaggagcccacttattactgggttctgggagaggaggaggactccaaaaaggggaatgggaggagagctcaggaagcttgggtcaaacgggagatgggaaaggtgaggagaaggagatcagacactgagtgggaattgacaggacatggggctgagttgggagtgagggaccttagaggactcagaaaccaaggaggagctgagaagtcgggagctaggtctcactggaattccaggatggtggatgctatatggaaatcagaatatgggggtcagagaaagaagagggcgtttagaagttggaaggttggagctcataacgtcaggtctttatgcttgtgatctaaggacaacctggagcgctcatgagattgaggtcgggattctcagtggaacatgaggagcacagagggatgtggcagtgaggggagaggggttgacgggactggggccttggatccccaaaagaatagtaacacacatatggggagttcatggtattagggattcatggatttggggtttgagatccccactagaagaaatggagggggtactcagagggataaggtctgaggaactggagcctgggttctggggaggagctcagatagatgggaactgaggagagggacttggaggttgggattcccgcaggaaatgggtgaagcagagatatgggttgcttataggatctgggggctctggctattgccacctgggcctggagtgttggggttagttgggggccgagatcggagaattatagagtaaaggatgagagtactgggtcagggcactggatctgtggtggggctcagggtcccacagaccaccagagtgtggggctcaggagctgaacgaagaataggggaccggaaaggactcgagagggggcagcgcggcactcattggttgagggctgcactaatgcccccgccccttctccgtgctgtccccagctgtcaccctcccataaggcttgtctccggttgtcaccgactatccctgggctggcaccgcctgctggcagcatctttgccctttggatgctcccattggctgagacagctatctattttcctgtcctgtggccaaagtgggagaacacgatcattggctgacggggcgaattaatctctagcttgccccgcctcctcccagctgtcattccttactgaccattttgggagacctaaagaattcttcagctcttcctattgactgcggatgctgtctgtcaccgcctaaatagacatcactgcctgtcaatttgacctccacctgctccccttttcattggctccctttttaccattcctattggttaagaagcctccaggccccacctcttactcgcacagccctgcctcctcctccgcccttccgcggtcattcacccttcagtcatattcattggccaggaggttcagacccctgcgtttctattggttatttctttcgtcccatcgccccctgcctttcctcgtcctctgattggtcttacagccctagctttctccgtttcctctttccagatgacccacccctttttcgcctccagccccgcccacgattccaacgattggcagaagcccagttctctctctcccactattcgtccaaatcctctgactaggcgggagaaaaaaggagcgcgatgagccagtccgcgcgcaggcgtggaacgccgagacgctggcgcggagccggctctgcggcgtgtgcgcaggcgcgaggtcggcggctcgcccccaagcaggagggagggggcggtggcgagagcgcgcgagggggtgagagggctcgagagagaccccggcgcgcggcgccccccgacccctgccccgcctctgcgcgcccagcggccgctccgcccccggcgcgcgccgagccgcgcccttcgccctctcccctttctcggctggcctcgccgggaggnnnnnnnnnnnnnnnnnnnnnnnnnnnnnnnnnnnnnnnnnnnnnnnnnnnnnnnnnnnnnnnnnnnnnnnnnnggcggcgccttctgcggcctccccggcggggggatgtgaggggcggcccgcggccatggagacgggcacggcgcccctggtggccccgccgcgccgtcatggcgcccccgcggccccctcgccgccgccccggggttcccgggccgggcccgtcgtggtggtggctccgggacctccagtgactacggccacttcggcccccgtcaccctggtggcccccggggaggcgcggcccgcctgggtcccggggtcggcccagacctctgctccggccccggccccagccccggccccagccccggctgtcacgggcagcacggtggtggtgctgaccctggaagcctcgcccgaagccccaaagccgcagctcccctccggcccggaatccccagagcccgcggcagtggctggagttgagacatcgagggctctggccgcaggggcagactcgccgaagacagaggaggctcgaccctcacccgccccaggaccagggacccccaccgggacccctaccaggaccccttccagaacggctcctggtgccctgaccgccaaacccccgcttgcccccaagccgggaaccacagtggcctcaggagtgactgcacggagtgcatcaggacaagtgacaggtgggcatggagctgccgcagcaacatcagcatcagcaggacaggctcctgaggacccctcaggccctggcacaggcccctctgggacttgtgaggctccggtagctgtcgtgaccgtgaccccagctccggagcctgctgaaaactctcaagacctgggctccacgtccagcctgggacctggcatctctgggcctcgagggcaggccccggacacgctgagttacttggactccgtgagcctcatgtctgggaccttggagtccttggcggatgatgtgagctccatgggctcagattcagagataaacgggctggccctgcgcaagacggacaagtatggcttccttgggggcagccagtactcgggcagcctgtgagtaccagtgggcacccagcgggaccgcctcggggaagcaaaggttgggggagggcgaaacgaaaacgatacactttgcccagactctggcagcccagcctcctctgaggatccacggggtgatcagcgcgagctgccgtgtcttgagcatcctgaggtgcctgtgacattggcatgttagtggagtttcagaccaggggtcaagaggtctgggtttaagccttgcctttgatgggttgtgtgcccttgagctagtggcttccccatttccgtgcctcagttttttcctctataaagtggattgaatgagatgatacctgaggtcatccctgctctttgatggggaactccagctacaggccggatattctggagggttggttgggcgagggttctggtagagacccttggtcccttagggtggatagcctgggaggggtgcaggcatctcccttcccccatagccctaggtcccagggatggagtagagaggtggggaagtctggctgatggaagggagactgtgcagtcaggatcccgctgtgaaacagggcagtcttgtatctgcactgaagtaaagggtgggagaggcctcttccccatttcctcatctccccagccgggctgactctttcctagttctctccggggcctgagtcactcccgaggtagggggtgattgcctctgacttcttccttccccctctctggatcctgcccgttgttcctgtgcccctttgacctgctgggccagtcagcctacagcatctcctgggcccccaggtgtcaggccccaggtgctaaggataaaatagtcctttcaaggagccaatcatctggagagaaagaaaagtacttaaacagttggtttcaatagaagacctcgggtttagcctagagatctccagagggtttcctgaggcacctagagcagggagtcagctgaacctgctctgaatcgtggagagtaagtaggattgatttagtcttggctatgtgtgcagggatcgggggaagccctg

SEQ ID NO: 2034 - DNA, 1426 bp, Homo sapiens
accccatgtctcaccacgatgatggagctacagtgggacttggaatccagatgtgtgaaggatggagggttgaaggacaaggagtacgtgggttttgctgccctccccaaccagctgcaccgcaagtctgtcaagaaggggtttgacttcacgctaatggtggcaggggagtcaggcctagggaaatccaccctcatcaacagcctcttcctcaccaacctctatgaggatcgccaggtgccagaggccagtgctcgcttgacacagaccctggccattgagcgccggggcgtagagattgaggaagggggtgtgaaagtgaagctgacccttgtggacacacctggctttggggactcagtggactgctctgactgctggcttccggtggtgaaattcatcgaggagcaatttgagcagtaccttagggatgagagtggcctgaaccggaagaacatccaggactcccgagtccactgctgcctctacttcatctcacccttcggccgggggctccggcccctagatgtggccttcctccgggcagtacacgagaaagtcaacatcatcccagtcattggcaaagcggatgctctgatgccccaggaaacccaggccctcaagcagaagatccgggatcagttgaaggaagaggagatccacatctaccagttccccgaatgtgactctgatgaagatgaagacttcaagaggcaggatgcagagatgaaggaaagcatcccttttgcagtcgtgggatcatgcgaggtggtgagggatggcgggaaccggccggtgaggggacgccgctactcctgggggaccgtggaggtggagaacccacatcactgcgatttcctgaacctgcgacggatgctggtgcagacacacctgcaggacctgaaagaggtgacgcacgatctgctctacgagggctaccgggccgcagtaagctttcccgccagagcgccacagagatcccgctgcccatgctgcctctggcggacaccgagaagctgatccgcgagaaagacgaagagctgcgccgcatgcaagagatgctggagaagatgcaggcccaaatgcagcagagccaggcccagggcgagcagtcagacgccctctgaggccacgccccgcccggccttacctcggctccgccttcagtcggcctcttgtccaatccccgcgccccacactgcccagcgccccccgggacctccgcgggtgccgccctcgcgcgggctagggggaggttctcccagcctgagtccgtagccccgccccggcgctggtcccgcccacccagacaccgcccacttcccggcccggggcctgcacaatctccgaccgcatcactgtcttccggagtcccccttcttctcccagactctgtcttcaataaaaactgagcttcccgcggcca

SEQ ID NO: 2035 - protein, 331 aa, Homo sapiens
MMELQWDLESRCVKDGGLKDKEYVGFAALPNQLHRKSVKKGFDFTLMVAGESGLGKSTLINSLFLTNLYEDRQVPEASARLTQTLAIERRGVEIEEGGVKVKLTLVDTPGFGDSVDCSDCWLPVVKFIEEQFEQYLRDESQRKNIQDSRVHCCLYFISPFGRGLRPLDVAFLRAVHEKVNIIPVIGKADALMPQETQALKQKIRDQLKEEEIHIYQFPECDSDEDEDFKRQDAEMKESIPFAVVGSCEVVRDGGNRPVRGRRYSWGTVEVENPHHCDFLNLRRMLVQTHLQDLKEVTHDLLYEGYRAAVSFPARAPQRSRCPCCLWRTPRS

SEQ ID NO: 2036 - DNA, 1351 bp, Homo sapiens
gacaaggagtacgtgggttttgctgccctccccaaccagctgcaccgcaagtctgtcaagaaggggtttgacttcacgctaatggtggcaggggagtcaggcctagggaaatccaccctcatcaacagcctcttcctcaccaacctctatgaggatcgccaggtgccagaggccagtgctcgcttgacacagaccctggccattgagcgccggggcgtagagattgaggaagggggtgtgaaagtgaagctgacccttgtggacacacctggctttggggactcagtggactgctctgactgctggcttccggtggtgaaattcatcgaggagcaatttgagcagtaccttagggatgagagtggcctgaaccggaagaacatccaggactcccgagtccactgctgcctctacttcatctcacccttcggccgggggctccggcccctagatgtggccttcctccgggcagtacacgagaaagtcaacatcatcccagtcattggcaaagcggatgctctgatgccccaggaaacccaggccctcaagcagaagatccgggatcagttgaaggaagaggagatccacatctaccagttccccgaatgtgactctgatgaagatgaagacttcaagaggcaggatgcagagatgaaggaaagcatcccttttgcagtcgtgggatcatgcgaggtggtgagggatggcgggaaccggccggtgaggggacgccgctactcctgggggaccgtggaggtggagaacccacatcactgcgatttcctgaacctgcgacggatgctggtgcagacacacctgcaggacctgaaagaggtgacgcacgatctgctctacgagggctaccgggccgcagtaagctttcccgccagagcgccacagagatcccgctgcccatgctgcctctggcggacaccgagaagctgatccgcgagaaagacgaagagctgcgccgcatgcaagagatgctggagaagatgcaggcccaaatgcagcagagccaggcccagggcgagcagtcagacgccctctgaggccacgccccgcccggccttacctcggctccgccttcagtcggcctcttgtccaatccccgcgccccacactgcccagcgccccccgggacctccgcgggtgccgccctcgcgcgggctagggggaggttctcccagcctgagtccgtagccccgccccggcgctggtcccgcccacccagacaccgcccacttcccggcccggggcctgcacaatctccgaccgcatcactgtcttccggagtcccccttcttctcccagactctgtcttcaataaaaactgagcttcccgcggcca

SEQ ID NO: 2037 - protein, 285 aa, Homo sapiens
MVAGESGLGKSTLINSLFLTNLYEDRQVPEASARLTQTLAIERRGVEIEEGGVKVKLTLVDTPGFGDSVDCSDCWLPVVKFIEEQFEQYLRDESQRKNIQDSRVHCCLYFISPFGRGLRPLDVAFLRAVHEKVNIIPVIGKADALMPQETQALKQKIRDQLKEEEIHIYQFPECDSDEDEDFKRQDAEMKESIPFAVVGSCEVVRDGGNRPVRGRRYSWGTVEVENPHHCDFLNLRRMLVQTHLQDLKEVTHDLLYEGYRAAVSFPARAPQRSRCPCCLWRTPRS

SEQ ID NO: 2038 - DNA, 1424 bp, Homo sapiens
accccatgtctcaccacgatgatggagctacagtgggacttggaatccagatgtgtgaaggatggagggttgaaggacaaggagtacgtgggttttgctgccctccccaaccagctgcaccgcaagtctgtcaagaaggggtttgacttcacgctaatggtggcaggggagtcaggcctagggaaatccaccctcatcaacagcctcttcctcaccaacctctatgaggatcgccaggtgccagaggccagtgctcgcttgacacagaccctggccattgagcgccggggcgtagagattgaggaagggggtgtgaaagtgaagctgacccttgtggacacacctggctttggggactcagtggactgctctgactgctggcttccggtggtgaaattcatcgaggagcaatttgagcagtaccttagggatgagagtggcctgaaccggaagaacatccaggactcccgagtccactgctgcctctacttcatctcacccttcggccgggggctccggcccctagatgtggccttcctccgggcagtacacgagaaagtcaacatcatcccagtcattggcaaagcggatgctctgatgccccaggaaacccaggccctcaagcagaagatccgggatcagttgaaggaagaggagatccacatctaccagttccccgaatgtgactctgatgaagatgaagacttcaagaggcaggatgcagagatgaaggaaagcatcccttttgcagtcgtgggatcatgcgaggtggtgagggatggcgggaaccggccggtgaggggacgccgctactcctgggggaccgtggaggtggagaacccacatcactgcgatttcctgaacctgcgacggatgctggtgcagacacacctgcaggacctgaaagaggtcccgctcctgattcctgtccccttcccactgtcccgcagtaagctttcccgccagagcgccacagagatcccgctgcccatgctgcctctggcggacaccgagaagctgatccgcgagaaagacgaagagctgcgccgcatgcaagagatgctggagaagatgcaggcccaaatgcagcagagccaggcccagggcgagcagtcagacgccctctgaggccacgccccgcccggccttacctcggctccgccttcagtcggcctcttgtccaatccccgcgccccacactgcccagcgccccccgggacctccgcgggtgccgccctcgcgcgggctagggggaggttctcccagcctgagtccgtagccccgccccggcgctggtcccgcccacccagacaccgcccacttcccggcccggggcctgcacaatctccgaccgcatcactgtcttccggagtcccccttcttctcccagactctgtcttcaataaaaactgagcttcccgcgg

SEQ ID NO: 2039 - protein, 367 aa, Homo sapiens
MMELQWDLESRCVKDGGLKDKEYVGFAALPNQLHRKSVKKGFDFTLMVAGESGLGKSTLINSLFLTNLYEDRQVPEASARLTQTLAIERRGVEIEEGGVKVKLTLVDTPGFGDSVDCSDCWLPVVKFIEEQFEQYLRDESQRKNIQDSRVHCCLYFISPFGRGLRPLDVAFLRAVHEKVNIIPVIGKADALMPQETQALKQKIRDQLKEEEIHIYQFPECDSDEDEDFKRQDAEMKESIPFAVVGSCEVVRDGGNRPVRGRRYSWGTVEVENPHHCDFLNLRRMLVQTHLQDLKEVPLLIPVPFPLSRSKLSRQSATEIPLPMLPLADTEKLIREKDEELRRMQEMLEKMQAQMQQSQAQGEQSDAL

SEQ ID NO: 2040 - DNA, 25316 bp, Mus musculus
  misc_feature (1)...(25316): n = A, C, G or T/U
taccaccatgcctgcctggctcacttcaaattctaaagtactttagactaaatagtgaattctagaccagcctgggctacagtgtgataacctgtattgcaaacaaaccaaaaaagtgaagccttccttatgcagaaaaatagatagggagtagattggagttcagtaactcctcttcaacccaagacttcccctctcaacctggccctgctgctctgactgcccattagttcattgggaatttcctgacttgactttgaaatttactgaagtagacaaaccttggagtttcgaggaacttcagtatatcacaagatgttgacagcttccttggggggggggggcggtgtgggccttatctgataaaatatttgggaatccttctagtaactgctagttgaatcttttggtgtgctggactcaggcctgtttacctttcttcagattcatgtgtttgttgctctagtgcctaggacctcccaggccttccataaacagttaatgaaaaaatgcaaagtgggaaggagtcgttgaagtagttcacactggcttgattcattcagtcagtgtgtgtgcgcgctatagcatgtactttgcccttgcctttagtgtgtcagatgctggagatccagaagtgagaaaggccagatctgccctgtggagcttacattctagtgggggaaactctgtaacttaacagacagacagaaagcatcagggctttagtccagccttggctcacacacatggcagaggagagctgaaaagtgcctgtaagctgtcataacttagtaagggagaggaatcaagaagcccagagatagattttgggggctgcttttataggtttagaaggcccatgaactgtaattacttcatttgatcttatagcagccccatggagcaagccccctgagtcattatctgtagtttataactgaagtctttctgactcagagagaggaatggacttgcctagggtcttacttctagttagcaatgaggtggggtcctaaatccagtcctttggactgaaggccagaagattcttgcattccttgggacatgagagaactgggttttcctgactgggttcctagagacttggggcttaggactctgtctcccccctgtggctggcaggtgctacgacaagcgtctgtggcctaggatggacctaagccggagaaagtcactgaccccacccatgcttagtggggtggttcgccgccagccccgtgctctggacctcagctggacaggtgtctccaaaaagcagctcatgtggctcctgaaccgactgcaaggtaggatggtggtgagtcaggacagacagacacagaggtaggatggtggtgagtcaggacagacagacacagaggtagatggtgatgagtcgggacagacagacacagaggtagatggtgatgagttgggacagacagacacaggtaggatggtgatgagttgggacagacagacacagaggtaggatggtgatgagttgggacagacagacacagaggtagatggtgatgagttgggacagacagacacagaggtagatggtgatgagttgggacagacagacacagaggtaggatggtgatgagttgggacagacagacacagaggtagatggtgatgagttgagacagatggacacaggataggatgatgatgagttgggacagacagacacagaggtaggatggtggtgagtcgggacagacagacacagaggtagatggtgatgagtcgggacagacagacacagatgtaggatgatgatgagttgggacagacagacacagaggtaggatggtgatgagttgggacagatggacacaggataggatggtgatgagttgggacagacagacacagaggtaggatggtgatgagtcgggacagacagacacagaggtaggatggtgatgagttgggacagacaaacacagaggtaggatggtgatgagttgggacagacagacacagaggtagatggtgatgagtcgggacagacagacacagatgtaggatgatgagttgggacagacagacacagaggtagatggtgatgagtcgggacagacagacacagatgtaggatgatgagttgggacagacagacacagaggtagatggtgatgagttgagacagatggacacaggataggatggtgatgagttgggacggatggacacagagataggaagtgatgagtcaggacagatggacatagaggtaggatggtgatgaatcgtcaggacagaggggcacagaggcggctgttggtgaaggtctacagcctgtttctttcattctaggcctgcaggagttggtgctttctgggtgctcctggctctctgtctctgccctgggctcggccccactgccagcgctgcggctcttggacctccgctggattgaagatgttaaagactccccagctcgggagctgctgctgcctccaccagacaccaaaccannnnnnnnnnnnnnnnnnnnacaaacacagaggtaggatggtgatgagttgggacagacagacacagaggtagatggtgatgagtcgggacagacagacacagatgtaggatgatgagttgggacagacagacacagaggtagatggtgatgagtcgggacagacagacacagatgtaggatgatgagttgggacagacagacacagaggtagatggtgatgagttgagacagatggacacaggataggatggtgatgagttgggacggatggacacagagataggaagtgatgagtcaggacagatggacatagaggtaggatggtgatgaatcgtcaggacagaggggcacagaggcggctgttggtgaaggtctacagcctgtttctttcattctaggcctgcaggagttggtgctttctgggtgctcctggctctctgtctctgccctgggctcggccccactgccagcgctgcggctcttggacctccgctggattgaagatgttaaagactcccagcttcgggagctgctgctgcctccaccagacaccaaaccaggtttgaccaccatgatcatctgtagatgggttagctaaagtggagatgtaggccttgaagcctcttctgaggggccagggagtcagagtagttaataaaggaatggaagaagacaggagtttgacccatcttggctatgtctcattcacttttcctactgtgtgctttgaactaagtctttttttgttgttgttttttttttgttttgttttgttttttgttttgtttttttttgtttttgtttttcgagacggggtttctctgtatagccctggctgtcctggaactcactctgtagatgaggctggcctcaaactcagaaatccacctgcctctgcctcccaagtgctgggattaacggcgtgcgccaccaccgcccagcttgaactatgtcttaaaagggtaggttccgggctggtgagttggctcagtgggtaagagcacccgactgctcttccgaaggtctggagttcaaatcccagcaaccacatagtggctcacaaccatctgtaacaagatctgatgccatcttctggagtgtctgaagacagctacagtgtacttatatataataaataaatcttaaaaaaaaaaaaaaaaaaaaaaaaaaagggtaggttccctcaggagggaggagaaggcctggtgatgtaatggtgctcaaagcgttctctctggacccagctgtgtcttcatagcagagccaggaaaaccatccagagggcacagctgttgtttcaccctgggctttaactgtcactcctagtactagaaataaggaccacattttttttttgttttctgtgcccagggaactcagccccctatgcatgttaggcaggcactcgaacactgagctcacagggtcggtttttgtagttagtttggttttacacagggtcttattctgtagaccaggctggcttccaactcaagagagatgaatttgcctctctcacccatgtgctgggattggtgtgagctaccacacctgatcacttattagttttcatctctgtttggtcttgagacaggttttgttctgtagcctagactgccctggaagctgtgatgctctgcatcccaagtattgagcttaggtctgcacctccatccttggataaaccagcattgcctcctcctgccttatgccatccttgcatttcagcttttttagccttcttgccaaattctctccaagtctggggccattttcatttccccattttctttgcctcttaggctgttatcttcctccatctaattaacagctgtccttttttagaagtatttctttgaaggggaagacaccacacttggtattttttagtcttactttttaattctctgaagccatgagcccgtggtaagaggtttttgtttctgttctggtggctctccccgagtgtgattctaagccgagcagggcagctggggcgtcagtgaatccagagtcttccatctttactgtcctcttcttctgatcatttgctcccttccattcccgaaaactgtctcagctctgagatgatttaacatggttgcatttctcaccgtatactaatggaggacatatactaatggcccctgcccttcttcccacaagttctaaatgacctttcttctggtcgactgagctgcggccagtctgtaaatgtgctcgtcagagtcatgtggaggggtagaaacctgggcttgccatgttgaatgcgcacagaggtagagctaacagaagctatgtgtttaggtgccagaccttagggagcagtaccagcagccctgatgttgctgttcactgtcagggtaaagtaaggatgggttttcaagaaaaccgctgtatccaaatttctatatcaaaatgtacttttagctgggcgtggtgatgcatgcctttaattccagcacttgggaggtagaggcaggcagatttctgagtttgaggccagcctggtctacagagtgagttccaggacagccagggctatacagagaaaccctgtctcaaaaaataaaaacaaaagtccttttagtatctggagagctggctcggtgactgctcttccagaggacctgggtttgaatcctagtacccacatggtggttcacagtagtctgtcattcgagtcacagaggatccctttttgcttccttgggcactgtacatatgtggcatatatacaggaaaaacacccatacccctaaaaaaatgtagtcaggcagtggtgatgcatgcctttaatcccagcactcagaagtcacaggcaagtggctgtcttgagttcaaggccagcctaggctacagagcaagttccatgacagagaaaccttctctccctccaccccagtccccaaataataataatttttttttctgttagtcactatataagccaggcttatgtagtggtatggtggcccactgtgtagtcccagtacatttgaggctagcctaagctaaatattaaaattctgtcttaaaaacaaatttcaaataaagagtaattctaatggaagcctagcagtgcattcttgtgatcctagggactggggaatttgaggcaggagaatcaggaattaaaggcaagcctaggctacttggagacagttgtctcagaagggaaatgaggacacagctcagtggtgagggttcactctacatgcgtgaggtcctatgttcagcattcccccccaactcccaacacacacacacacagagttttagcactgtgcagatgtcatatgccacagcacagttttggcaacttaccttggactgtgatgtctggtgatgtattttttagagccaggttactgcctggcaagtgactatggtattgttataaaatgagataagagtgtgagtcagccctggcctggggtcctagcttgctctgttattttgtaatcaggtgctctggggtcctggctctgctattttgtaatcatgtgctctgggacaggtgttctcatctgtaagcagaagtgattaaatagaaatgtggcttccttcttacatttttttttaaattttaaattatatgtatatgtttgtgtagggggtatgttcacatgagtgcaggtgcttacataggccaggggtgtcagaatgcatactgggtcctgggaattgaactcaggtcttctggaagagtggtatatgtggttaactactgagcctcaaggcttggcttcttcaagtggagttaaaggctcagcagtattatcacaagagaatttggaaggaaagtaaatctaagatcttgggccttgtgcagttctgggcttgctgcaattctggggtggggccagcagtccacctcagggacttaggccagtagtgtgggggtaggaggactctgaactctttcccccggagataggggaggaggctgcctctggactcactctgcagtggctagcagtctcttgagtgtaggtcatcccagtagggttttgtggacagagccacttgtggaatgtagcctcagtgaagctgagacaacggtgggactcagagagatgaatgctgtatcagggagttagccaggccttggtttctattgctgtgatgaaacatgaagtccccagaggccctcggggagcaaaggattaacttcatcttacagcttagagttcagtatggagtcagggcaggacctcgggcaggacggggagcagagcagaggccatggaggttcacatcttactggcttgcacggcttgcactcagtggcttgctcggcctgcatgtttatactactcaggtctacctgcccagggtggcactgcccatagggtggcactgcccataatgagctgggccatctcatgtcatgaattgaacatgatatgaacataaaaaaatatatatgccctcacagactagcctgcaggttaatctggtggagaactttttttgttgttgttttttgttttttgagacagggtttctctgtatagccctggctgtcctggaactcactctgtagaccaggctggcctcgaactcagaaatccgcctgcctctgccttccaagtgctgggattaaaggtgtgagtcaccactgcccgacagtggagaacattcttaagttgacattttctttgcagatgaagacacactagcttgtgtcaagttgacaaaagaacaaaacaaaaagcctaacctgcatacaccaccagaaaaggtcaggtagagaagagatactatttcatttgtgtttgagaatgcttttcttgataccagaaagtagatcgggcattagcactcaggaggtagaggtgggagaattgttgctaatttgaggccaagtaggtctacacaggcaattcagtccaggcagagttacatagcaagggtgtggggagggtgcctgcagtcagaccgggttctggtgcagaacgaatgaaaggagttcaagcaagcctgttgttgagcctctgtagtcacgggagggtggagggtgctgtttattggataatgggtaaagacaccgagcatcctactagggacagagcattgagcaaaagttcctgcttgcttggaactgccgtttctatggagggaggaaagggtcaaaaagcaaaaatgtatacagtgtatcagatccctgagatgggggcttaggactgaggaatgttgagacttgagagctctcccggaaggtttccctgaggggataggagcaggtcagctgagatgccacgtgttgctgtgaagagccagtcatgtggagcagcagcagttgaggagactcccttgttgggagcaggtgtagggcagataatgaagaccacgaggacaggctgggaggagcgctaatactactttatctgcctagggcaaactgagagtcgaggccgactgcagggggtggcagaacttcgcctagctggtctggagctcacagatgcctccctgaggctcctgttgcgccacgctccccagctcagtgccctggacctgagtcactgcgcccacgttggggaccccagtgtccacctcctcacggctcctacttcccctcttcgagaaacactggtgcacctcaatctcgctggtaagtgcgatcccccgtgtgaagtccctgtctaccgtgtgctacctccttagctgtctaatctcaactgctgctgccccttacgcagggtgccaccgcctcacggaccactgccttccactgttccgtcgatgcccacgtcttcgccgcctggacctacgctcctgccgccagctctcacctgaagcttgtgcccggttggcggctgctgggccccctggcccctttcgctgcccagaagagaaactgcttctcaaggacagctagttgggtgccgatgcccccttcccttcccttccccaggactcagccagagaacctggacctcttgccttcatttcaccccctgttgggaggccaggttattttcttcatgacttggcactcctcagtttaatgacttgggattcctgcccagggacttgagccagccttccctctctcccacctgcactgatatctctgggggtctttgcttcccatctctccctttcacctgcttcattgtccatcccctctggggagtgggtcaagaggtactggggaggtgctgagccaaagggatggtgggagggaggggcggtgaaggtgcaagtctggagtagggaaaatgaggtgacatggtatcttgtacacaggatactgggggctgggggaggcgatggatgggtgtggggagggcagaaatcagaccaacaagggttcagggaacaaagaccagttgggtgggatggggggccaaaaagggaaaacagaggagcaattggggatccgagtgtcaagacagggggcgctacaagccaggtaatgccaggactgggggctgggagaggagcagatgtggggatagtaccctctgcgtagggttgcctctctccccttccctctacccagatttcagttttccccgaccttgactccttgaacgtcactgaaaatggcagctattgcaaggagtaggggccgcgggtctacctgctgttaagctcggtggcccaggggagtggtgaggggtagcccagacccctgcctggctctctacacaatacttgaacattcatctgtactgaagtgttacttgaaccgggggaatctcggacttgggggacttgggggacttgaggggaccagcttgaccgagactgggctatgggtacccagtttggactgtcccacccctagctctcttgcattactgtcttgaacagctccacccttccgacttgagttggggtggggaaatgtcagcttaaagatgggcaagatgggactcctccagtttggctcttcccattctttcatcgtcatggaaactcgtgtcccatttgcccagggaactgccactcctggttgccatggaaatagcagccaatggacacctccggaaatcagtgctaagactggaaacggtccctcttagttgctgtgggaacttagtaacagactcttggcacctcccctcttcccacccctttccttcttccagtgtggggggtggggtctcaagagcctgagggaggagtcaggtctaggtcccactcaacttaggccagggggaactggattgtactacatgggggtggggggaggggaatctatccacatacctcaggtaacaggaaggtgcgcgggttgggggcgggggctgggcggaccaaaggcaggagggggggcctggggttggagaaaggcttgacggtggggccgcttgcgggaggggaggaggcaccccggcgagggacaagtggggcacccagccgggctggacccctaaccccacaagtctgtacaataaggtttgctataaaactcagaatctagccgnnnnnnnnnnnnnnnnnnnnggctccgcccctgccccagttcctgtttcggcccctgggccttctagacgcgtccgtaactgttcccgctgggtctgccttgccacccaggatggggtcccgcccgcgcttgggccgtcccttcttggggatacaaggcgcctcggcccctccttgaccatctgcgcttgtggtgtaactgctctcaggatgaagggcggcgagggggacacgggcgaacaggccccgctgaacccggaggtggacagccccgcgggctcagccacgtaccgggagttcgtgcaccgcggctacctggaccttatgggggccagtcagcactctctgcgggcgctcagctggcgccgcctctacctcagccgggctaagctcaaagcctccagccgcacatctgctctgctgtcgggcttcgccatggtgaggggtgggagggggtacacggggtgggtaaagcacgtggtgggagaagtcaagaaaatgggtccccagtactggactgaataaaagggtttctttaggataaaagaaggagctaagtcccaagggactggaaaaaccctttatgtcgggcacagctctaggaatataaacagactgaagatcggtcccagaaatgccgtggaagaagggagtaaagaggtcagcagatgcagactggtggggggaaagtctgaagtggcttagttaccaagtcctcgagagttgaaaggcagtcaaagctgaatgagagcctatatcaaccagatcggggaagggggatagtgtatgtgagagtcatttgactgaagggcccacctctcagaaggcacagagaattgccgggaaaactaagaaaccatgaggaagctgctggggaaggaagctgatcagggagctagcagataagtctgataaactgcaggtgtgggaggataatgtcagctaacggtcccagcagtggccccgggaagtggaactgaagattccagagtgtggcctgcagatgtgtcctggttcctccctacttagggccagctgtgcggccccaagtcgacatccactccagttgccatctttaggaagttgtgacatcatagaaggtgctgtctctgtggtctgccaagcttttgtccaggaggatgtgggattcttatggagaccccctagaactaggtgtgttagaacaagctccgcttagcaaaggaggctcttctagaacagtgtgctatctagactacatggaagctgctgtttagacaaggatgctccgcagggtatgggtgtggagtgaagctctgctagtttcagttttcttcacacttggggggagggcacccttcataatgtacccttgtgtaaataggccttggagggagctaaggtgagggcatataaaagtaacttaggtcaatacctcccttttttctgcaacctcaatatcaggacgaaagaatctgtaatcttaaaggttgctcttgctctgttgcttgtaaggggcccagatttcccccaaacagccccatagttcctgaggacatttgactgaaaggaatcagcaccacagaaagaagggcacagcagcttgtgtttgaaccacgtggctccgcctgcttctaaaggaacagtacagtgtgcagtagaagttgcagagcagatcgttgtggtgtcagtgtgagagggctttctctgaggagcagtaggctgaatgtgtaggttctaggaccgcccccagtcctgacaaagaaccctgggttggaccctgggagacaccagaattaagcctggcccagatccctgtttgtgaacacacctgcctactatctgcggtggcccaattccccaaaatactcagttttatttttgtaagtaccactgcatccctgcaccacagtaatctcgggatctgtaagaaatgggccgggcgtggtggcgcacgcctctaatcccagcactcaggaggcagaggcaggcgggtttctgagttcgaggacagcctggtctacagagtgagttccaggacagccagggctacacagagaaaccctgtctccaaaaaccaacaaacagaaatgggagatatcttcctaaacccaggtggcctgaagttaaaacatacaaatcatattcacaggctgtgaatctagcctagttctagttggtagagtatttgcctaccattcaggaaatcctaggttcaatttccatttaaacaacaacaaacatggtatagcgtatagcacacctataatcccagcacttgaggtaataaaaaagaacaaacaaggttgttcttggctatacagagagtcaaggctagcctgggcttcatgaagtcctatctcaacaaacattcaatgttcagtacctggtatagtggcagttgttcatataagaaaaggcatgttagactgcacagtgagctagtgacaggatttttgacttcagcagcctggctttaaagcccaaacttgtccatcaacacaaatgtttgcaaagttcaggctagctgggtggagtcacggtagactccctgacctgtcaaacatgagcagccatgattcatcctgcatagttggcacattgaatgcagccccggtgtgaccagatatgacaagctttttagattgatctggaaacgtgaagcttattggagtttaagagatggcagttactaccttctgggttttctctctttgtgccttagacattagcatcaactctaacagtctgtgcctggctctagtcatagaatttaatgtttagcattaactttctcactgagactattgtccccatttttcaggtaggaaactgagggaggcacttgctcagagattacacagttgttcaaggtcataggactgtaaccctactcaggacattgaagtaggggggtagtgaatttgaggcaagtctggactagtaggctgttgtgaggaaactacaaattgtagaactgagaacagacccaaacagctcaagatttttgcttgctttgggtctatagtgacttttctttcttttttcttttcttttctttttttttttttaaagagggtctctatgtagccctaactgtggcttggtactctttagttctgggattaaaggcacttgtcactacacccagcagtttcgggttctttttttttccccttggtttttcaagacagggtttctctgtgtagccctggctgtcctggaactcactctgtaggccaggcttcgaactcagaaatccacctgcctctgcctcccaagagctgggattaaaggtgtatgccgctgattgggttgagatgaagttccaaccactgggagaagcctaggctactctcaaacttgagatcctcctgtttcagctcccacatgctagaaagcatgcagtgccacaccagcctgagtctgctttttattttttatttattatgggttggagattaaacctagagtgatgtgagtgctagggctgctgagtctactttttagccagtatattataaccaggtaaaagctcagaaaaatgcccctttgagactgaggtgaagtcacgcaggaaagctgaggcagcaggatcacaagtttcagctcaacctgcactacccagcaagctccaggctagcctaaattataagagcaagacactaccaaaaagggggctgggatgaggaaagctgagtatcttctatgctctaagttttaggatgttgtagtcatgattctaaacaggcagagcaaaacatgttctagggactcaagtgtcttccttcttgtgcccacaggtggccatggtggaggtacagctggagaacgatcatgaatacccaccaggcctgctggtggcatttagtgcctgcaccactgtgttagtagctgtgcacctctttgcactgatggtctccacatgtctgctgccccatattgaagccgtgagcaacatccacaatctcaactctgtccaccagtcaccacaccaacgactgcacagatacgtggagcttgcctggggcttctctactgccttgggtacctttctcttcctggctgaagttgttctggtgggctgggtcaagtttgtgcccattggggcacccatgggtaaaccagctcctgttgtacctatgtcccaggtgccacctgtgactgtctcccttagtttagcttctaacctcacaccatcctctgcttctattaccacatcacaacagccttccaaagcctgtccaccccggcaagtgtgtgatagtgctcatggaccaggctggcaggcagctatggcctccacggcaatcatggtacctgtgggactagtgtttatggcctttgccctacatttctaccgatccttggttgcccacaagacagaccgccacaagcaggagctggaggagctcagtcgcctgcagggggagctgcaggctgtgtaagcctggctttagactgttgcaagcattgcctcagaaaccccagggatcgacagacctccttccttgccctaggctggagccacctcctgtaagctctgaggtagaggccaagtacctgcccagcagcatcccacactcccagggatgatccctgtcatcatgttctggtgggttttgtaaattctgctctgcttggggaactgtttcagcctaaggatcctgggttaaatgagaggaaagaggcccgcctgccttagtgagatccctggtggtgctgagcagttgtttgctcctccaggaaggtgacatgtctgcacaactgtcctcaaggcaatcagcccttgcttatctgtataatctgctttgcagttggcatcctgggagagattttacagggctcctcagatgagccacttcacccttggtgacttgtggtggtcgttccactgccctaggcactgactgtctggccagaactgggagaggaggaagtattgacgagtgggagattgtgcagctacttgacaagggttggtgagttggtaagggagaagattcagcccttagaatgcagaactcttcttcagacactgattttttttcttttgttttgtttttcaagccagagtttcactatgtctgttgctctggctgtcctggaacactctctgtagaccaggctggccttgagctcagagatgtacctgcctctgcctcccatgtacagggattaaaggcatgcaccaccaccacctgacactgagtttttgatgcaccttgttttgtaaataaagtgtgtctcacatatgttcctatggctatgaatgggatgaaggtgaaaccttgggtatggttctttgttcctaagggccagatggaggtaatatgcttgatagatggtatgagtccatcaggtgctgacaagatctgataaacttctgaatgtggtaaacagttattcccagactaaggcctctgaactcttgttcctaaacttgggatttgtgtaagcttctttcttgaatgatcccttcatcttatgggacgattcctaagttctctcagttactcatcacagacatttcaataaacaagttttatatttcccatttttaagaggcagctgaggccaagaggctaatctggccctaagccacagagttagtccatgacctcaattacctttactatggtcaagggatttctgggagagagaggaaggaaattggtacccttcgattgggataaatcaaagggacctcagctcctgtaccttcatgtgcatcttttcctcagcctcagaacttgagagtataaatcctaccgtctagtcgtgatagaccttgtacagactcattttcttttattacttgaaatggtcagttaaaatgtgtaaaaccaggctccaatttttcctaccactgttatgatggttacagtcagtcttttgtgacagatagccatccattctggaggtataacctgaaactaaggaaagtcaaaggcttgcccagcagcctataatgagaggctcttgtagagggccacttaaggcatcttcagctcagaagccttggcaagagtgcagttcttccagagaccagagagcctgtattcattcgctggatgaaaagggtgttgaaccttgggacgatctcagttttgggttcccaagtgaagcttgaacgaggtctgtccttaagtttcgcagcgggatcctatgagcataggtagcccttgcctaaaaactgctcaagaataaccgggttacatcagacctttactttttataggatctacttaagggtctttatgtttcttttaagctcaacagaaccctgattttaaccactgaacatttttttttttttttttttttttttttgagacagggtttctctgtgtagctctggctgtcctggaactcactctgtagaccaggctggcctccaactcagaaatccacctgcctcagcctcccaggtcctgggattaaagacgtgtaccaccactgctcggctcagaaggaacattttaaaactagcccaagggaggtgtaactagggtactggcctaacacgcagaaagccctgagttagatctcccagcatgctataaaccggttatggtgtgcacacctgtaattccggtactcaggaaatagaggcaaaaggatctggagttcgaggccatcctccgttatatagcaagttcgatgtcatgctgtctgaaaaacaacaggagcccgaatataaaagcgggaaggaaccgatcatttcactctgtgcgtcggtaggcaaagcgcctgagtcacccctcctggttgtatttttccacctcccacccctcccaggttttggtggattctaagggaagcagcccgttacgccgggctccgcacgcctggccacgcctctctcgttagccccgcccacaaccggatcggcagattcgctacccgactccttaggattatttgggcagcttttcttgtctgaaaattttcaggaaacgccgagaagacttcttccttgtaaccatttcgcactaagtaggaagtgtgctgttccttgagtcgttctactgaaaaaaaaaaaaatccaggactagaggtcgactctgccaacagggcttggcgagccaggcgtcattttcttgactctacagcaggtgagaagaggtgacggccaaagcccaggacggtggcgaatctgcactgcagcctcataggcattcgggctgcgcaaggaaggggcagggaagaggagccgaggagcgcgcatcctgtccactcattcgccccgcccgcctcgcgaatctgcgtcgttggacgcgccactcaaatctcccgagctctggctggcgtcctccccctcgctccgcccccttccctcaggggctcgtcgcagctttcgtcgccgccgattcgccaggaaccccaaggccggagcagctggatcagggtggtgcggtccactctccggggaatgcggcccatcttcaggctccctgggctacaactcccgagcctcgcagggcgccggccgaggcaaggccgctaccctcggccccgtggatcgctccgcagtccttgtagcgaaagtgcggatgcagacgctgtgcccgctgggcctcgcgnnnnnnnnnnnnnnnnnnnnnnnnnnnnnnnnnnnnnnnnnnnnnnnnnnnnnnnnnnnnnnnnnnnnnnnnnnnnnnnnnnnnnnnnnnnnnnnnnnnnnnnnnnnnnnnnnnnnnnnnnnnnnnnnnnnnnnnnnnnnnnnnnnnnnnnnnnnnnnnnnnnnnnnnnnnnnnnnnnnnnnnnnnnnnnnnnnnnnnnnnnnnnnnnnnnnnnnnnnnnnnnnnnnnnnnnnnnnnnnnnnnnnnnnnnnnnnnnnnnnnnnnnnnnnnnnnnnnnnnnnnnnnnnnnnnnnnnnnnnnnnnnnnnnnccacctctggttcggaggatcggggcgcggggacgcgagcggctgtgtgggagcgggagcggggctcggcccgggccgcttggccggtgaggaggcgggagggggcggggcctgcgaggggacgggggaggggtcttgcgtggaggccaagtggggcgcgctggggagagcgggaaggtaagggggcgcgagatgggcctgggccctgagggtagaattggggatggagaggaatggagtgccatagtgagcccagctcctcagggcaagatctgagggagccacgggtcatgctgaggtgtcggggactggactgatgtgagaccctggaatcggggctagacattgaggggacagcaagggagtcaggcctaagtcgtggactcccattccgtatccctcttttcctgacagtgtaaatgagcaaagatggaccaggaaggtgggggagacgggcagaaagccccgagcttccagtggcggaactacaagctcatagtggatcctgctttggaccctgctttgcgcaggccttcccagaaggtgtaccgctatgacggagtccacttcagtgtcagtgtgagtgccctcgagcctttcttgacttatttggacctccaatctcccctccccgcttccccctgttcagtattcaacacccagacttcctatacctgtagtttggttttttgagaatgagcaagctctcccagctcttctgtatgttggcttctacatgggctttatagagtcagtaggctggtgaattttcagcctggtttcatctcttcctgctttctttgttaggactcaaagtatacccccgtggaagacctccaggacccccgctgtcatgtcaggtccaaagccagagacttttccctcccggttcctaagtttaaggtgagtgcctgctggtctccctgcatgttggtccttggagagtgtcaaggaccctgggcttcacacagtctaccaaagtgtttattccgaaggaactatgacagccagatctcattgctttttgtgtctgtgagactgagatgttttggacagaaggtatacatgtatagctgaggtgactctagtatatatctggtgacaagggtattgatgtctggaaggatgaggtatgggtgggtattctgaagccttgtgacagtgggatagccaagttattcagcaattaaggatgctgctaagaccactgtgcacttggagttgtgtgttcttgctgtcattgtgtgtgctcctctgtcctgtctgtacgagcagcttgcttccctactgtaataagatattcttcaaacttcggactgtctcgaaaattggtagttctttgtctcctcctaattttgtttttgttttcttttactgattattggtaaagtaagttgtgcagtggcttcacccttctgaatcccccctttcttgagcagctttactgaaagctcttctgtctgaatgtttatgtctcatacctccttcctgccagcatctactgagacactaaaacatcatctttcttccctgagtcctgctctcctcacttcctcttgactgatgaatggcaataccaggtactcgggtacccaagctggaagcctggagtcacccagtagttctttcctttcgtcttaatctttaggtttccattgccatgttcttcatgcagagtccgatgtttgctcgctttctgcagctttcctcagttttaggctccatcttgctgttgtcactggttttaatgttcttattttaattttgttttccaagtctgtttttcttttttattatattatttttcatgtgtgtacattcataaataagcttgcatgccattgtgcacatgtagaagttagagcacaacttgtgggaattggttttcatcatgggtcctagtggtcaaactcaaggttgtcaggcttggtgacaagtgtctgtacctactgagccatattgctggcatcctaagtctgttttgaggcattgacatgtgtggttattgatctgggcaggccttatcacctctttgacaccatatccctgtaatattccaccagacacttttcagtgtttagaaaatatcaagatggataaatttcatgtcttggaagtttgttgttttggtaaactttaagcatctacagagtccagaaagaatgatagcggctccccaataccctgtctctacatctttgctaccactgtgttatatttatatttatatctggcttatctttttttttttttgaaacaagtactccctaggtagccgctggccttgaactaagaatcctgtgcttcagcctcccatgtgctagcattgtaagagtgcacggcacactcggctctgtcttgtctcttttctgaatgggaacttttcctttttttctgtttctagtaattagcttatgctagtctgtaaccctgaactaatagattactttcttctattactttgtcctatgtatgttaattcttgttttgtgtgttttcttcccagttgttgctatatgtcataagagggcttgaaaaacaggtcactgctaatgtacctctcatgagcccccttgacgtctctgtcccagatttgtcttaatctcatagatgtctctgaagtttcccaaatggtaaggaaactgctcactatggaagcccgagaccaattcttgtctttccacagctggatgagttctatattggacagataccactgaaggaagtaacttttgcgaggctcaatgacaatgtgagggaaaccttcctgaaggatatgtgccggaaatatggagaggtggaagaagtggagatccttcttcatccccgcactcgaaagcacctaggcctggcccgtgtgctcttcaccagcactcggggcgccaaggaaactgtcaaaaacctccacctcacctctgtcatgggcaacatcattcatgcccagcttgatatcaaaggtgaggactcgctgcatgttgcctaaagttggtttctaacagggattctatatgctgatacttaattgggctcagccaagtaatcagggtcatgattaccaaaattcctgaagtcacgtctgtttcagaacttattagattttaaattttagagatacattttgagattcatttagatatttgtgtgtgtgtgtctgttttgcctgaatatatatctgtgaacagcatgtacgtcttacactcatggaagtcaaaagaaggcatcagattcccctggaactggtttaatggttgggagccaccatgtgggtgctgggaattgaactccggttttctggaagagctaccagaccacttaactgctgagtcatctctccagctcagggagggtttttcttttttgtttgttggttgttttaaacttatacatattttgtgctttcttcagtagcacatatgttaacattgaaacttcaggaaattaaagaactagagttttaggtcacggcctgccaaaaccacagatgtgtgaagataaagatgaattaggcagagtctcattgtggcacatgcctatcatccttgtgcttgggaggcagaggcaggaggactttgaggctaacctgactacacagatgattccaggtcaactagtgctgcatagtgagaactttctcaacaaaaaggaaccaggagataacccttagttggtaacagtacatactatacaaatatgaaggcctgagtctgaatctccatcggtcacacattctagatatggttgtgtatgcctataacttggttttgtggggagaagacaggcaggtcccagagtctttctgacaagccagggtataaattggcaaacttcagttctagtgagaccttctcccaaaggagtgagagagtacaacaatgggagatatccagtgtcctcctgtggcctttgtgtgtgcacacaaataaaaataaagaaaaatggagcaggtttgaactgcttttaaggaattacagggagagatgtcatcgtacagtgccatctaagggaagaggttgttaactgatgtttacaaatgggagtgaagaccaatgtttccaaattcaacttaagacttttgtatgtaatcttatagtttttatgtgtttttgaaacagaatctcactacatagctttggctggccttgaactcactgagatccacctgcctctactgtcttgagtgctagaattaaactgttttaattgtttgttctgtttttaatgtttttatttcttttataggtctcactctataacttagcctgcccttgtagtctacacctggtcccaggctttattcttggtgttttaactttacttttaaggatttgctttgcttctgtgtatgtgtgtgtttgtgtagatgtgtgcacatgtatgtgtatgccacagagactagaagagggtatttgttggatcccctggaattggagttgggatagttatagacatccatgtgggtgattctttgcaagagcacaaaatggtcttaactgctgagccatctttccaacccttgttttggttctttggagacagggtctcatgttgtcctaatcttcatttatagccaaagatgaccttgacttctaatccaccttcatcctggatcatagacttatgtcactgtgcttggtttatgtggtcctggggatgaagcccaggattttatgcataccaagaaggcactttaccaactgggcgactctccagttcctgttttgtgtttttgagtcagtctttctgtctgtctgtggtgacctatgctcactgtagctcgtgttgaattggacccttgccttgcctcagtctcccaagtacgaggagtacaggcatatgctgctgactttggcaacacttcatttttaaatgctacattcttctcacagttttttctcatatttatttgttatatgtgtatgatgtacattcttcttgtgtggccgcatgtgaaggttagagggcaacaaagggggttgttctttcctttctccgtgtgggtcccagagagcaaacttacattgtcaagtttggtggcaggcactttactcaccaaaccctctcaccgctcgaccccttccaagagtttaaaagtcattgttcaaggcaaataaaatcccctcgtgggccggattgacacttgtagttagaatcctacttttcttgaagtttatgaaatactctagatggtgtatgtgtgaaccatgagtttatcatggttatgttgaaccaaggcttttacattccaggccaagcactactgcctcccaatattaatgggatatatgtttaatagttggagatgaacctgattttacttcataaatctgcaaaagagcagtgtggtgataaatgtctgtaattcctgaacatgggaagagtagggacaacgaattcagggtgtgctttccttcttagtatgagaccagcctggttatttgataccttgtcttaatcagtcaataaaaatagaaagagggctggtgagatggctcagtgggtaagagcacccgactgctcttccagactgctcttccgaaggtccagagttcaaataccagcaaccacatggtggctcacaaccatctgtagcaagatctgactccctcttctggagtgtctgaagacagctacagtgtacttacatataaataaattaaaaaaaaaaatagaatatagacagccaggcagtggtggcgcacgcctttaatcccagcacttgggaggcagaggcaggcggatttctgagttcgaggccagcctggtctacagagtgagttccaggacagcacagagaaaccctgtctcaaaaaaacaaaaaagggagagagagagagattgtagtagacttgagacctgaagaagaaacaaaatgaccaattcagagggttgtgtttccttctgattgtggattctcatttctctccatctaggccaacaacgaatgaagtactatgaattgattgtcaatggctcttacactcctcagactgtgcccactgggggcaaggccttgagtgagaagttccagggttctggtgcagccgctgagacggtgagaagcttgtagctgccgctgtgttaggcacatgtactcgttacctggtcaccaaagcaagagccatttgggaaggccctgaagtcccctattaagtataggaagaactaagggaagatgtttaggtgtcttcagatacaaagctgcaatctcggattggggcagtagacagttttaaatcgtgcctgatcttttttccttgactccctttttctttagactgaagcccgccgacggtcttcctcggacacagctgcctatccagcaggcactactgtggggggcacccctggcaatggcactccctgctcccaagatacaaatttctccagcagccgacaagatactccatcttcctttggccagttcacccctcagtcctcccaaggaaccccctacacatctcggggtagcaccccctactctcaggactctgcctactccagcaggtatggaaaaccacttctctcgggccttagccatttgattctgggagctgcagctggaaagaacaagctccaagtgtctgtgagaaggaattggaagctatttattttagcctttggtttcagctgacaaattggtgttttcatgggacctagtagaaacaagttgagaaacctgttttgagttttgtgtgtatgcgcgcactcatgtgcacgctcctgcttgcctgcctgcctgtatgtatgtatgtatgctgtgtattgcaggcatgcagcacccaagcaagctagaaggggacaaatgtcttgtatctgtatttacaggtgatgttacatgtggggattgagaactgaatctgagcgctgtgcaagagcagtctgtattcttagtttctgagccatctctccagcccctcttttaagatgtttatgagtctgaatgttttgcctacatggatgtctctgaacacacagtgttccttgtacccatgcagtggatcacctagagctggggtgaaagtggttctcagccaccatgtgggtgttggaatcaaatctaggcccagagtaactttgagtatgagaacagaaccagtcaggtttggtcacataggtaggagcctagctaactcctgggttcttcttcagcaccacttcaacctccttcaaaccccggcggtcagagaacagctatcaagattctttttctcgccgccatttctctacatcttcagcccctgcaaccaccgctactgccacctcagcaactgctgcagctactgcagcctcctcctcatcttcctcctcctcgtcatcgtcctcctcctcgtcgtcttcttcctcagcctctcagtttcgtggttctgactctagctacccagcatattatgaaagctggaatcgttaccagcgccatacttcctatccacctcgccgggcaactagagaggacccttctggggcttcatttgccgaaaatacggctgagcgcttcccaccttcct

SEQ ID NO: 2041 - DNA, 1972 bp, Mus musculus
tctagacgcgtccgtaactgttcccgctgggtctgccttgccacccaggatggggtcccgcccgcgcttgggccgtcccttcttggggatacaaggcgcctcggcccctccttgaccatctgcgcttgtggtgtaactgctctcaggatgaagggcggcgagggggacacgggcgaacaggccccgctgaacccggaggtggacagccccgcgggctcagccacgtaccgggagttcgtgcaccgcggctacctggaccttatgggggccagtcagcactctctgcgggcgctcagctggcgccgcctctacctcagccgggctaagctcaaagcctccagccgcacatctgctctgctgtcgggcttcgccatggtggccatggtggaggtacagctggagaacgatcatgaatacccaccaggcctgctggtggcatttagtgcctgcaccactgtgttagtagctgtgcacctctttgcactgatggtctccacatgtctgctgccccatattgaagccgtgagcaacatccacaatctcaactctgtccaccagtcaccacaccaacgactgcacagatacgtggagcttgcctggggcttctctactgccttgggtacctttctcttcctggctgaagttgttctggtgggctgggtcaagtttgtgcccattggggcacccatgggtaaaccagctcctgttgtacctatgtcccaggtgccacctgtgactgtctcccttagtttagcttctaacctcacaccatcctctgcttctattaccacatcacaacagccttccaaagcctgtccaccccggcaagtgtgtgatagtgctcatggaccaggctggcaggcagctatggcctccacggcaatcatggtacctgtgggactagtgtttatggcctttgccctacatttctaccgatccttggttgcccacaagacagaccgccacaagcaggagctggaggagctcagtcgcctgcagggggagctgcaggctgtgtaagcctggctttagactgttgcaagcattgcctcagaaaccccagggatcgacagacctccttccttgccctaggctggagccacctcctgtaagctctgaggtagaggccaagtacctgcccagcagcatcccacactcccagggatgatccctgtcatcatgttctggtgggttttgtaaattctgctctgcttggggaactgtttcagcctaaggatcctgggttaaatgagaggaaagaggcccgcctgccttagtgagatccctggtggtgctgagcagttgtttgctcctccaggaaggtgacatgtctgcacaactgtcctcaaggcaatcagcccttgcttatctgtataatctgctttgcagttggcatcctgggagagattttacagggctcctcagatgagccacttcacccttggtgacttgtggtggtcgttccactgccctaggcactgactgtctggccagaactgggagaggaggaagtattgacgagtgggagattgtgcagctacttgacaagggttggtgagttggtaagggagaagattcagcccttagaatgcagaactcttcttcagacactgattttttttcttttgttttgtttttcaagccagagtttcactatgtctgttgctctggctgtcctggaacactctctgtagaccaggctggccttgagctcagagatgtacctgcctctgcctcccatgtacagggattaaaggcatgcaccaccaccacctgacactgagtttttgatgcaccttgttttgtaaataaagtgtgtctcacatatgttcctatggctatgaatgggatgaaggtgaaaccttgggtatggttctttgttcctaagggccagatggaggtaatatgcttgatagatggtatgagtccatcaggtgctgacaagatctgataaacttctgaatgtggtaaa

SEQ ID NO: 2042 - protein, 335 aa, Mus musculus
SRRVRNCSRWVCLATQDGVPPALGPSLLGDTRRLGPSLTICACGVTALRMKGGEGDTGEQAPLNPEVDSPAGSAYEFVHRGYLDLMGASQHSLRALSWRRLYLSRAKLKASSRTSALLSGFAMVAMVEVQLENDHEYPPGLLVAFSACTTVLVAVHLFALMVSTCLLPHIEAVSNIHNLNSVHQSPHQRLHRYVELAWGFSTALGTFLFLAEVVLVGWVKFVPIGAPMGKPAPVVPMSQVPPVTVSLSLNLTPSSASITTSQQPSKACPPRQVCDSAHGPGWQAAMASTAIMVPVGLVFMAFALHFYRSLVAHKTDRHKQELEELSRLQGELQAV

SEQ ID NO: 2043 - DNA, 25840 bp, Homo sapiens
  misc_feature (1)...(25840): n = A, C, G or T/U
gtctcgctctgtcacccaggctggagtgcagtggcgcaatctcggcttactgcaagctccgcctcccaggttcatgccattctcctgccttagcctcccaagtagctgggactacaggtgcccgccaccacgcccggctaattttttgtatttttagtagagatggggtttcaccgtgttagccaggatggtctcaatctcctgacctcgtgatctgtccaccttggcctcccaaagtgctgggattacaccacacttggacttttgtgtttatttttaagattaacatatttatgtgaaacaatactggggtttttttttttgttttttttttgagacggagtctcgctctgtcgcccaggctggagtgcagtggcacgatctcggctcactgcaagctccacctcccagattcacgccattctcctgcctcagcctcccgagtatctgggactacaggcgccctccaccacgcccagctaattttttgtattttttttttagtagagacggggtttcactgtgttagcctggatggtcttgatctcctgacctagtgatccacccacctcggcctcccaaagtgctgggattacacgcatgagccaccgcgcccggcaacaatactggttttaagtgcaaagaggagatgattcaaagataaatcatgttacgcagataagtgaacagcaaatactggagcttgggaatcactgccccagcccagggcttctacaaggaaaagcctttcagagtcatgagggcagggagggaggcaagagaaagcttcccttgggaggccaagggaaggatcgcttgagctcaggagttcaaaaccagcctggacaaccttgtctctactaaaaataaaaaaataggccaggcacagtggctcacgcctgtaatcccagcactatgggaggccaaagtgggcagatcacctgaggtcaggatttcgagaccagcctggccaacatggagaaaccctatctctactaaaaatacaaaaaattagccgggcgtggtggcgcatgcctgtaatcccagctactctggaggctgaggcgggagaatcgcttgaacttgggagatggtggtttcagtgagccaagatcacaccattgcactccagcctgggcaacaagagcgaaactctgtctcaaaaaaaaaaaaaaagtcaggtgtggtggcatgtgcctgtagtcccagctactcaggaggctgaggtaggaggatggcttgagcccaggagtttaaggttgcagtgagctgtgatcgcagtactgcaccccagcctgggtgactaagcaagacactgtctcaagaaaaaaaaaaaaaagcttcctgggcctgctgcttctgacacagtctattgagtctcagaggcatttctggacatgcctttgagaactactgaactcagagaagagagttctcaaactgagtccaaaggaacttcagtgtactacaaaatgttactagattaccttgggagaggtggggaaggattcctggggaagtacgtttgagaggcccttctccagttcactgcatgttttttgtttgtttgtttgtttgtttgtttttgagatggagtctctcactgttgccccagctggtgtgcagtggtgcgatctcggctcgctgcaatctccgcctcccgggttcaagtaattctcctgcctcagcctcccgagtagctaggattacaggcgcccgccaccatgcccagctaattttttgtacttttagtagagacagggtttcactagtagaacagccaggctgttctcgaattcctgacctcatgatccacccacctcggcctcccaaagtgctgggattacaggtgtgagccactgcacccagcccactgcatgttagatagtctgttgaggcctgtggagtgctcgggttaggaaacctgtttaatgttgcttaggactcgttcatctttgtagcttcaatacttgggacctataacgctttctataatcagagtgaataaatgaaatgctgtagatgaggaggtgggggagagtggtcagtggaagctttaagtagttactagcttgattcattcattacaaatgggcagctgggtgcagtagctcatgcctgtaatcccagtgttttgggaggccaaggcaggaggatcgcttgaggccaggagatcaagaccagcctaggcaacatagtgagaccctgtctctacaaaaaaattgtttaaaaattagccaggcgtggtgacatgtgcctgtggtcccagctactcaggaggctgaggtgggaggattgcttgagcccagtaggttgaggctgcggtgagcctgagtccagcctgggttacagagtgagaccctgtctcaaaaaaaattttttttcaaaaagtggaaaacgcaaatctgcccttgtggaatttacattgtagttggaggaacacagtaatgtaatagggaagatattagggctgtaagtccagctgcgggcagctggctgtcaagatgggacaggtgtggatcagaagcagagatgagtaaaggaggcaaggacccatgagcaccagaactcagtcaggaatcaagaagcccaagggtggctggagacgactggataacaccagtccccttggcatgacatcaggcagcatgcgtggcatttgtgtatgtgttgggcagcacactttctatgctgggaggcccacagctgggatgagcccatgtgacctgacagctgccctgtgggcaggcagagtgggggggctattgccttcaatcataaacgaggcttctgaggctcagggagaggaacagacttgcccagggtctcatttccagttagtgatggagttgggttccaatcccagtgctcttggctgaggtcaggtgcttcttgctaccctgttgtctgtgtggccagaagagagctggggtgcacccttggagctggggagcctgggaactgtgggctgctgagagctgagggctgaggtctctgtctcccccctatggccgccaggtgctatgacaagcgtctgtggcctcgaatggacctgagccggcggaagtcactgaccccgcccatgctcagtggtgtggttcgccgccagccccgtgccctggacctcagctggacaggtgtctccaagaagcagctcatgtggcttctgaaccgactacaaggtagggtgtgtggtacggaggacagggtggggacagggacaggcctgggatggagtcctcacagcacctgcttcctgactgccccctctccgcaggcctgcaggagctggtgctctctggctgctcctggctctctgtctctgccctgggctcagccccactgccagccctgcggctcctggacctccgctggatcgaggatgttaaagactcccagctccgggagttgctgctgcctccaccagacaccaaaccaggtgcaacctctgtttgcttttctggagaatgggctgggcaagggtagggtaggaggcctctcaggtctcttctgactcatgctggatggtaaagtatttgaagaaaggaaagaatacatgagtttgaataggaaggccctggttgggcattattcattcattcacccacctgctgtgtactttgaactgagtcttgaaaggaacagggttttcccagggagtgtgagactcagcagtttggtggggcaggaggcccatattggcagagggggatgctgggagcagaggccatctctcttcatctacttaaatctcatcatcctttaggcctgggtataaatgccacttcctccaagaagctctccctgatcccaccccacattgagctcagagtccctctcagctttgagagcagcccgccagcataatactgggcaattgtggagtgccttgatgcacatctgtgccctcctgccagggtctccagctccctgagggcaagcgctggctggtcccccagcacgttctcagtggctgctccatagatagctgttgaatgaataacttgaatgagcaatcaggatgggagaggtctagtttgaggaaagattttcaaaaggagatttgcagtcccctgaaataagataatccttttgtttgtttttgttttttgagaccatctggctctgtcacccagactggagtgcagtggcaagatctcggcttactgcaacttatgcctcctgggttcaagtgatcctccccacctcagcctcctgagtagctgggcctacaggcgtgtgccaccacgcctggctaatttttttgtaattttttttttttttttttttttttgaggtgaagtcttgctctgtcgcccaggctggagtgcagtggtgctatctcggatcactgcaagctccacctcccgggttcacgccattctcctgcctcagcctcccaagtagctgggactacaggcgcccgccaccacgcctggctaattttttgtatttttagtagagacggggtttcactgtgttagccaggatggtcttgatctcctgacctcatgatccgcctgcctcggcctcccaaagtgctgggattacaggtgttagccaccgcacccggcctgtaattcttatagaaacagggtttcatcatgttgtccaggccgatctcgaactccttgtctcaagtgatctgcccacctctgccttccaaagtgttgggattataggcgtgagccaccacacctggccaaaagaatcttttcttttggagttctttcacccctctctttcatagttcccttcttcccaccatgccccctccacaacagccctgaaaggggagaatagagaagcaactaagattcttcccgtattctagatgaggcactggaggcccagagggattgactgctgcaggtcacccagtcaggccagagcactcagccattgtccactcttaccagaattggactgagttggagagctatgggtggggggtaaggtgggcattgggaatggtgcatcctgggaggtgagaaagtgctggctggtccatttcctcctgctggaattcagttcagttcagccctttatcaggagctcaggaaggtgggcctttttttttttttttttttttttttttagtttttaaattttttttttaacttttaagttcatgggtatatgtgcaggtttgttaaatgggtaaacttgtgtcatgggggtttgttgtaccgattatttcatcacccaggtattaagtctatttaccattagttatttctcctgatcctctccctcctccctctgaaaggctccagggtgtgttgttcccatggatgtgtccatgtgttctcatcatttagctcccatttctaagtgagaacatgcaatttctgttcctgcattagtttgctaaggataatggcctccagctccttccatgttcctgtaaaggacatgatcttgttcttttttatggctgcatagtattccatggtgtatatgtaccacattttctttattcattctttcattgatgggcattgaggttgattccatggcttttactattgtgaacagtgccatacaccttcaaactcttgcccagcttaaatgccaccacctcagtgaaatcctcactgatgcctactcctccctgcccaagccagaagtgacttctctttcctctgctttcctctatgggcctttcctccttgtgcctttagctgtggcccaaggttgagggcatctgtaaaggtatcccctctccaggcgcttggctcctcaaagacaggaggaggggttaaaatttagggcttgcaaagtcaagtgcccatagagttggcctgggaggtaacagaagtgatgcattggtgtaggacattagggagtggcacctagccacccagctcccctcagtcatcatctggtgggaaggagtgcctagtgaggccacatcttacgattcttcaaggaaaagctcagtatgtaaatttatttataaaaatgtcctttttgtagtgttagtcattaaggaagtttttagcattctgtagactccataaaacatgtttggagggcagcctcatggtttgtgccatctgatctattaatagtttatcttagggataggctggtgcctgggaggcagacaacactgtggtaagagttcagattcagcatcaccaggcctgggtttcctggctgtaaacaggaatgatgatcagagatcttgtctcccaaggctgtggttcttaaagtgtggtcgggggaccagcagcatccacaaaactggagaacttgttaaaaaagtaaactctgggccgggcatggtggctcacacctgtaatcctagcactttgggaggccgaggtgggcagatcacttgaggtcaggagtttgagaccagcctggccaacatggtgaaaccccatctctactaaaaaaatacaaaaaattagccaggcgtggtggcaaatgcttttaatcccaactacttgggaggctgtggcaaggagattgcttgaacctgggaggtggaagttgcagtgagccgagattgcaccactgtactccatcctgggttacagagtgagactccatctcaaaaaaaaaaaaaaaaaagtaaactctggtcaggtgcggtggctcaggcctgtaatcccagcactttgggaggccaaagtgggaggatcaaggctacagtgagctacagggaggttgaggctgcagtaagctgtgattgtaccactgcactccagcctgggtgacagagcaagactccgtctcggggaaaaaaaaaaaaaaaaaaaaaaaggaaaacgtatgtatgtcagaaaaatgcatataatatgtcaaatggtgagaaaaagaggaaaaaatgatgcaaggaagtggtaggagtgtggagaattacattagtttttgcattgctataaagaaataccttcggctgggtaatttataaagaaaagaggttgaattggctcaggattctgcaagctgtacaggaagtatcgtgcctgcgtctgctcagcttctggggaagcctcacgtagcttttactcttgatggaacgtgaaggaatcggcatgtcacatggcaagacagcaagagagaggaggggaggtcacagactcttttatttatttatttatttattttgagatggagtctcgctctgttgcccaggctggggtgcagtggcacaatcgtggctcactgcaacctccacctctcgggttcaagtgattctcctgcctcagcctcctgagtagccgggattacaggcgcctgccaccatacccggctaatttttgtatgttgagtagagacaaggttttgccatgttaggccaggctagtctcgaactcctgacctcaagtgagccgcctgcctcggcttcccaaagtgctaggattacaggcatgagccaccacgcctggcagaatattgtagtctcaaatacaataatcatggaaggcctccgaggaggtgatgtgaggagtggacagatgaggtcaggccatgagggtgtttttgagaagagcaagccacagagtgcaccaggtcactcacttatgtgggaagcaggtggagggcagatggtctggatacctgggcgcagggatgggagtggccaggagtgctgacctctcatctggctgcccagggcaaacagagagccgtggtcggctgcagggggtggcagaactgcgtctggcaggtttggagctgacagatgcctccctgcgtctcctgctgcgtcacgcaccccagctgagcgccctggacctgagccactgcgcccacgtcggggaccccagtgttcacctcctcacggcccccacgtccccactccgcgagaccctggtgcacctcaatcttgctggtaagcacggtcccccatccgtcctgccagcctgtggatccccacggccagtgccaaccccttgctcacctgcctggtctcagctccactgccccatccccaggttgccaccgcctaacggaccactgcctcccgctgttccgccgctgccctcgtctacgccgcctagacctgcgctcctgccgccagctctcacccgaagcttgtgcccggctggcagctgccgggccccctggccccttccgctgccctgaggagaagctgcttctcaaggacagctagttgggcgccccccaccctcccccggactcgacaggagcctggacctccggcttcatttcacccctgctgggaggccaggttcccacctcaccaccctgggattcctgagtgtcagtgacttgggattcccacccagggactcaagccagccacccccttctttcccccctgcactgatatctctgggggtttctccttcctatgtcctgcccctgctacctgcttcattgtccatcccctgggggagtgggtcagaggtactggagggtgctgagccgaagggacggtgggaggggggttatggtgcaagtgttgggggggagaatggggaaaggacacacacaggatatgggagccaggggctgggggaggtggaaggggcggggggcggggcagacagcagaccaccaagggttcagggaacaaagaccagttacttggagtggggggtgggggtggggccacaaaaggaaaaccggaggagcaattggggatccaggtgtcagaggtaggggaaccaggggcaagctggggctgagctggaggtggggatgagagcaggtgtggggacagcaatacccccttgggggtcacctctctgcttcccccctccccaggcttcagttccttccccctgaccctgactccttgaacgtcactgaaaacggcagctattgcaaggagtgggggccgcgggcagccgctcttcagctcgcggcccaggggagtggcgaggggcgccccaaccccctgcccgcctctccgcacaatacttgaacattcatctgtactgaagtgttacttgaaccgggggaatctcggacctgggggagccggggtgtgaggggactggaccagcttggactgagacctgagaccgggccggtgggcgcccatttgggactgcgccacccccaggcttgttcttgttttactgtattgagcggcggcacccgccggacccgcattatggctgggggcgccagcccaagaatggggaccatgggactcctccagcctggctcttcccactctttcatcgtcatggaaacttgtatcccatttgcccagggaactgccactcctggttgccatggaaatagcagccaacggacacctcccgatgccagtgctaaggctggaaatggccccctcttagttgccatgggaacctagtaacagactctgctggccctccttccctgccccttcctcgagcgcggggtggggcttcgggaccccggggatgagccgggccaggtcccgcccctccgcgcaggcctccggggggccggggcttaccatgtaggggaggggagatctatccacatacctcaggtaacagggaggtgcgcgggtggggggagggctgggcggaccaaaggccggaggggtggggcctggggatagcgagaggcttgagaatggggccgcttgggggagggaagaggcagcccggcgaggggcaagcgggggacccagccgggctgggcccctgggccccgggtctgtacaatacggtttgctataaaactcaaaatcttccagccggggctgcggagttcgtgtgtgtatctgcggggtccctacctacagatgagtgggctcacctctcctggactcattttgggagggatttggaagtgtggacacctggggtgtccagctgtaccttggagggggctggggttggcgtgcacctcggtggggtccgggcgcttggataacgttcttggtgggtaggggtcgcggggaatctctgcgggcccgggactgcggggacttggtccccggctccaccccatcatgtggctagccccggctccgcctctgtcccagttcctgttttggcctccgctgtcccgctccggctcctggggctccccgcagacgctgcttttcttgctccactgggggtgcctcttcctgggcgcccgccgcctgcatcctgctcgccctgtctgggaatggggccgcccccgggcttgggccggcccggctggggcccccgaggcgcttccgccccgtagtgaccgcctggtgccgccccccccccaggatgaagggcggcgagggggacgcgggcgagcaggccccgctgaaccctgagggcgagagccctgcaggctcggccacgtaccgggagttcgtgcaccgcggctacctggacctcatgggggccagtcagcactcgctgcgggcgctcagctggcgccgcctctacctcagccgggccaagctcaaagcttccagccgcacgtctgccttgctctcgggcttcgccatggtgaggggccgggaggggtcacacccggtggggcagagcaagtggggggcacaggtcggggggggggcgaagtaaacaggtcccaagggagacaggttaaagggggctttcgtcaaagggggaaggaacaaggtcccgcgggactgagcaagtcccttcttacggatgtgtgtgtacaggggaccccaggagacggggccaccggaggacacgaaagtcctaaaggtgtcgtagtgggagtggggtgaacaaatcgctggtggggttgactgcaacagtgaggcagagtggtccagatggagcctgtacctggcagaagtggttcctaagtcccagtgccagcttcaaaggcaggtcagctgggtgggggctgcatcaacaggtggggggctcgagatggattagctgggtggaagggtcacccagctgaaggtgggcccgtcccagggaaggtggccactctccagcgggcccaaggggtgctagtgtcaaccaggaaaactgacaagagatcatgcccgggagggaaccgctggggaaggaggctgatgaggaaactgataagcgagtctcaagctgataaaccccaggtgcaggaggacggtgttggctaacggtctgccccagcagtggcctcacaggaagtgggatggagggaggtcccagggtgaggatcagcagacacagtcctggctcctccctgcttgtggccagctgtgtgaccctggacaggcctccaccccgcttgcaagccagtgggaaactgagatcatggagggtgcgccctctgtagccagccaagtaaccgccccagggtgagccaggcatgtcagagcaggtcacgtaccaaggatggctcagactagcctgctaattggacaggtgtggaaagtaaaagccttgcctctgggcaggagcgaatgaactgggacccagggttgctgctctgttagtctggggttgccccaccatcaccccaggaaaaaggagaaagtgagctgcaggaggtactttggggaacgcactcctgtgggggtggatatcagaggcggttggggtggggaccatggcgctaggggatctgggctagtccctgccctgtctgtgccacaacctccatatttgaacaatgacagggaaactctctaaccctaagggtcatcataagcctatggtcttctatgtggggtcccagaatccacagaccagcttacctttcatgatgggggcatcacctagggacaggatgttggctccccttcatctgcacagcctgcagagggaagggagcagccacccaagctgagggaggtcaaccccatggtccagcctgttcccaaggagacaatccctccacggcagaatatgcaggtgcaggttgctggggtgacagcttaagggcccgagccttctctgcaggaggaaggggctggaggtttaggttccgggggcaggactggccgcagtcctagcaggggtgaccgaggctgggccaggctctgggagaaaccaggactaagcctggcccagatccctgtctgtggaaaacacctcctgacacctgccatggcccaatttcccaaaatactcagccctgttttcctacctccacccgccagcctctacacctaccttcttctttccccaggcccagagcaatcgaatggaccctacaagaaccagggatggggagagagtgggcttctgaaactcaggtggcctaagttagaatagcattatacaaattgtatccagctgtcactaagcaccaggcactgccctcagtgcctttatatacatcatctgttagcctacaaagtgggtactgctactctggccattttacagatgaggaaactgaggatcagagatgttaagacacctgcccaaggtcccacagcaagtaagtggcaggatttgagcctaagccgtctggttccagactccaaatttataaattcctagaatagggtcatcaactcaaatgtttgcaaagggccaggcaggtaatatggatgccaaattggctgggtagggactagcaagcaagagaccccatgacattgggggtgatggctcacacctttcatcccagcactttgggaggccaaggcaggaggatcgcttgagcctaggagcccaggagttcgagtccagccagcctgggcaacatagcaagacctggcatctaccaaaaaaaaaaaaagagagaccccatgacctttccaaggggagcagccatgactgatttgagctgatagttgccatgcaggaacgcaggccaagtgtggctagttcttccaagttttcaaggggatctggaaatagggatataagaaatctcttcagttttacaagttggcagcatcttccattttttaagaaacacactgtgtgagccaagcaaaacacgtctgcaagctggcagtggtccacagtgtgccgatttgtaaactctgtcctcagactttagcattcactatagcaagaacagcaaacacatacctagtgcttactctgtgcctggcactgttctttttctttttcttccttttccttttcctttcctttcctctttctttttctttctttcttttctttcttatctttcttttttttttttttgagacagagtcccacactgtcacccaggctggagtgcagtggtgcgatctcggctcactgcaacctctgcctcctgggttcaagcaattctcctgccttagcctcccaagctcctgagtagccgggattacaggcgcacaccaccacgcccggctaatttttatatttttagtagagacagggtttcaccatgttggccaggctggtcttgaactcctgacctcaggtgatccgcccaactcggcctcccaaagtgttgggatgaaaggcgtgagccaccactcccagcccatttcatgtatatttcatttaatgtttataccaaccctataaggcagggaggtgctgttatcaatctctatttccagataggaaattgaggcacacagagaactgacttgctcaagattacacagctagagcagagaatgatcccaggcagcccagctccagaatctgctgtttgatccctatgcagtaaacctgttagaagcatgtcatccagcccttttttttatttttatttttaatttttttttgagacagagtcttgctctgttgcccaggctggagtgcagtcacatgatctcggctcactcaaacttctgcctcctgggttcaagcagttctcctgcctcagcctctcaagtagcagggattacaggcatgtgccacgatgcccggctaatttttgtacttttagtagagacggggtttcgccatgttggccaggttggtctcaaactcctgacctcaggtgatccacacactttggcctcccaaagtgctgggattataggcatgaaccgccgcgcccggccatccagccctcttgatagggaggtggggaaaccagaacagaacagagcctttgcaaagctgtccattcgtttactcaacagagactgaatgtctctggtttctgccaggcacagttctaggtcctagggatatgtatcagtgatgtatcccgataggcggaaaaaatctctacagttgaggttatggggagatcagtacatcccctcttgtccctgcaggtggccatggtggaggtgcagctggagagtgaccacgagtacccaccaggcctgctggtggccttcagtgcctgcaccaccgtgctggtggctgtgcacctctttgcactcatggtctccacgtgtctgctgccccacattgaagctgtgagcaacatccacaacctcaactctgtccaccagtcgccacaccagagactgcaccgctacgtggagctggcctggggcttctccactgccctgggcacctttctcttccttgctgaagttgtcctggttggttgggtcaagtttgtgcccattggggctcccttggacacaccgacccccatggtgcccacatcccgggtgcccgggactctggcaccagtggctacctcccttagtccagcttccaatctcccacggtcctctgcgtctgcagcaccgtcccaggctgagccagcctgcccaccccggcaagcctgtggtggtggtggggcccatgggccaggctggcaagcagccatggcctccacagccatcatggtacccgtggggctcgtgtttgtggcctttgccctgcatttctaccgctccttggtggcacacaagacagaccgctacaagcaggaactagaggaactgaatcgcctgcagggggagctgcaggctgtgtgagactggtgttagccaccgctcactgcaagcactgcctccctccggggtctgtaagaggccgcaggggcctacagacctcatccccccatcccctggctggagccacttccagtggccactctcaggcagagttcagattcctgcccgcagggtcctctgggctgggccttggggcagctcccacattcccagggattttccccatcagtctgtcccttgggttttgcaagctactctgcacctgggctggcctcagttgaaggatcatgcagtagatagaggggaggcagggagagcttgtgggaccttcagtgctgactttagccaccatttccattcctatacaggatgtgaaggtcagaaggcagccaattgttggtttaatttttttttttttttgagacagtctgtttcccaggctggagtgtagtgatacagtcacagctcactgtagcctcgaccttccaggctcaaaagatgctcccaccacagcctcccaggtagtgagtagctggtactacaggtgtgtgctgccacacccgactaatttttttgtagagacggggtttcgctgttcccaggctggtctcaaactcctgggctcaagtgaacctcccgcctcggcctcccaaagtgctgggattcctttctttatttctgtagaatctattttatggttggcattttgggggaagatttcgatgggttccacattcttgctttagttgttgtagagggatttgggtgtttctacccaaggcattggtctagcttttcctacaatgaacctatctttggaggttcaagctccccaccttcccccactgtggtgacctgtggccacttgcagaagggatggtgcctgacccactgccctagccccacgctatgcaccaaacttgttctccccgtcctggtccagggctggggtctttagagactgacagcctctgccccaggcctgagtccttagcaagggttgggtaaggaggttttaagggagaaggtccagtccttagcccttgaaatacaaagctcttctgacactgaatttggatgcaccttgttttatataataaatcgtgtttcacagatgtccctgttgctgtgaaggggatgcagggcaggccttcttaggataactttacttgttcccaagagccgggtggtggcaagtttgggtggacaggacctgggaggggagtgggtttcaggtgtaaccctgtcagatgctaacaagggccaacagcttctgaatggggagagttattccaaggctacaggctttgaactcttgtccctgagttcagagtctctatctcttccactgagtatttatttatttagagacggagtcttgtgttgcccaggctggagtgcagtggtgcgatctcagctcactgtaacctccgtctcccaagttcaagcaattctcctgcctcagccaccagagtagctgggattacaagtgtgtgccgccacacccggctaatttttatatttttattagagacggggtttcgccatgttggccaagctggtctcaaacttctgacctcaggtgatccacctgtctggcctcccgaagtgctgggattacaggcatgagccaccacacccagccctccctgagtgtttagtataagcactctttttttttttttttttttgagaccgagtctcgctctgtcttgcactgtcgcccaggctggagtacagtggcatgatctcggctcactgcaagcgccgcctcctgggttcacgccattctcctgcctcagcctcccaagtagctgggattacaggtgcccaccaccacgctcggctaattttgtttttgtatttttagtagagatggggtttcaccgtgttagccaggatggtcttgatctcctgacctagtgatccccctgccttggcctcccaaagtgctgggattacaggtgtgagccatcgcgcccagccgagacagtctcactcttttgcccaggctggagtgcagctgtgcaatcttggctcactgcagctttgacctcccaggctcatgagcctcccacctcagcctcccaaatagctggcaccacaggacgtcccaccaacccagctaattaattttttttttttttgtagagaggagggtctcactatgttgtccaggctggtcttgaactcctgggctcaagtgatcctcccaccttggcctcccaaagtgctgagattacaagtgttagccactgcacctggcctcaagtttctttcttgagcaactaccacatactaggggactttcataggttatcttatttaactctcacaacaccttaagcgttaagtctttatcattttcatttcagagataaggaaacaggcccaagaaggctgaagatcttgcccaaaaccacacagctagtccatgaaactgaacttggactatctacccctcacacgggaatctctctttgatttgagaaaaggaaccagtgcctttcaactggaacagaaaggaatctgatctcaacacctatgcctccacgtaaattatttttttcagccttatttccctcaaaattgtagagtcctaatcttcttctatcttgtggtgtgagaccttggataagtctcccttccaccttttcctattacttaaaatggtgaatttgcataaaccaggctctaagggtcttttctgcactgttcggatgtgtacaaattgacatccaagtttaaaggaagactctgaaacttaggtcaatgacttgcccaaggccatatagcgagggcctgatgtacacatatcaggagcttggggcatcctcagctcaggaaaagggacctcctgggagtgcctgcgcccacacgggatcaaaacggtgcccagccttcagaaacctcagcccgagttccaggggtaggcctgggccgctgctgcccttgtgcggaggcatcccgtgagcatagggcgccatagccaaagaagcgggcagtgggaccatgacgccaggaggacacaccagtccagtcccgttcctgtaggacctcgtttattattacaaggcccatttaagggcacttaggccccactaggctcatcagaaaaccttgaggcggtccctggatttaaccactaatggtgggtttgagtacggcaaagtagggcaccttctacaggcctcactctccccatctggcaaatgggcatcctaagcagccagacacccaagggcaataacgggaaggaaaggtaccctgcatttatgtgcgaggcggggcaaaccgcctgagtcaccgctcacggttgtgtttttccacctcccggccgtccctcccatccgggtgagtcctcgtgggtcctcccggaggcgccccctagtcccaggctctgcacgccctggccccgccccttgactcggccccgcccacagcggaatccgcagattcgccaggtcggatcctcagaattcctcgggtccctcgatactcggctgaaaattctcatcggactctgagaggagcgctgggctggaggcattttccccagggacagaagcgggctattctctcacttgggccagtaagaaaaatccaaaaaaagttgtcgactctgccagcagggattggctaacgggccgttattttcttgactccaccaaggcggatgaaggggaggctacggctgaggccgggaacagtggcgaatctgcagcctctcagaatttggcagtgcaaggaagggacggggaagagaagcaaagcggcgcgcatcctgtccagcgattcgccccgcccgcccggtgaatctgcgtctgcagaacgcgccactgaaggttccccagcgctggctggcctcctcccctccgccccgccccttttcctcagggactagtcgcagctttcgtcgccgccgattcgtcaaggtcccgggccgcagcatctagatcgtcgtggcgaagccgactctccgggggatgcggccaatctccaagctaccctgggccgcaacttccgagcctcccagggcgcnnnnnnnnnnnnnnnnnnnnnnnnnnnnnnnnnnnnnnnnnnnnnnnnnnnnnnnnnnnnnnnnnnnnnnnnnnnnnnnnnnnnnnnnnnnnnnnnnnnnnnnnnnnnnnnnnnnnnnnnnnnnnnnnnnnnnnnnnnnnnnnnnnnnnnnnnnnnnnnnnnnnnnnnnnnnnnnnnnnnnnnnnnnnnnnnnnnnnnnnnnnnnnnnnnnnnnnnnnnnnnnnnnnnnnnnnnnnnnnnnnnnnnnnnnnnnnnnnnnnnnnnnnnnnnnnnnnnnnnnnnnnnnnnnnnnnnnnnnnnnnnnnnnnnnnnnnnnnnnnnnnnnnnnnnnnnnnnnnnnnnnnnnnnnnnnnnnnnnnnnnnnnnnnnnnnnnnnnnnnnnnnnnnnnnnnnnnnnnnnnnnnnnnnnnnnnnnnnnnnnnnnnnnnnnnnnnnnnnnnnnnnnnnnnnnnnnnnnnnnnnnnnnnnnnnnnnnnnnnnnnnnnnnnnnnnnnnnnnnnnnnnnnnnnnnnnnnnnnnnnnnnnnnnnnnnnnnnngtgagtggggccgcgcggcgcgcgtgcgcggtagacctgcttgggggggtgcaacaacgcgccggggcgggaggagagggcagcggtgcgcgttccccccacccccccgcccgcattcgggtcgaagccgggtctcgggctcggtctcgcggtgtttccaacgccccgaagaggtgccacctttcggccggaggatcggggcgcggggaggagagcgggtgtgtgggagccgtggccgggctcggcccgggccgctggccggtgaggaggcgggagggggcggggcctgcagggggcgggggaggggtcttgctccgaggccaagtggggcgcgcgctagggagagcgggaaggtaagggggctcgagacgggcctgggggcctgacagtagagttgggaggtggaaagaggctgggttgttgtggcgaaacagagggtacttgggggagaatccgggggagccccgggtcagggtgagggttggaaactggagtgatgggagaacctggaatcggggctagccaatgaggaaaggcaggggagtcaggccccaagtcctgatccttcttgcgtgtccctcttcccctaacagtgtaaatgagcaaagatggatcaggaaggtgggggagatgggcagaaggccccgagcttccagtggcggaactacaagctcatcgtggatcctgccttggaccctgccctgcgcaggccttctcagaaggtgtaccgctatgatggagtccacttcagtgtcaacgtgagtgcccgggtctttggttgccatccggggagctccaggcgcccgtcctctgtgattctgttcagcacctagaacggtagcctgccttcttgaaagtgggcagttggacccagctcttctgcatgtgtgtgtccagatgggctgcttggagctccctagcctggattcaccctgagctctctttctgctgctgctttccttcctaggactcaaagtatataccagtcgaagacctccaagacccccgttgccatgtcaggtccaaaaacagagacttttccctcccagtccctaagtttaaggtaagtgtctgctgggctcctggtgtggtagtcctaagagggtgtggaggatgcgtcttggcactatagctgaataaaagggtttccaatgaaaggatctcagccagatctagcaacctctgaggctgtgagactcagttgttttggataggaggtacacttaatcttccagaaaggtgcaggtcaggtgtcctaagtgtatccctggtggctggggtgtcgacttcttgaagggtgaggtaaagactctttagctgctatacctatcactgtatattcgtagacagtgcatcatagcacacaagagtgggatctcccagttccttgacagtcaaggggagtgacaaggccactgcctacctgggtagcactattccccgcctctcatttggcgatgtcatttccctcttgtttccttcgaggactcctattctccaccctagacaagatattcttcaggccttgaactgggcctggaacactggtggttcttcatttccttctctgattctttattcttcctttctaaataaattgtttgtggggtcccttcattcttcttcttttttttttttttactttgtacacttcacttggacaatctctttcacacccacagcttcaactattacctaaatgttgatgacttccaagtatctgtttccagccaacatctctaggcttgtatgcctggtagggggacagtttcatttggaggccacacatgtttcagatttaagggatttaaaacaaattatctacctccttaacctacctttttcattttccctctactcatatgtggcagtaccatcgactcagctgtacagcctggcagcctgtgattctctccttttctctctcagttggtcaccgaatcctcctggctcttttcttttttattcttcatctttctattctcattgccacttaatgtagaccttggtattcatttcacctggtctccttgccttcgttcttgcctcagtttctcctctgccttgctgtcatttgtctctttggcttcactacgctgctgttttccttttgttgccaagtccatgttttgggacactgacatgtatggttattgacctggccaagccttatcctccgccttgacaccacacccctgtgttacatccacaccataacgctttgcggtttttcaaaaacaccaagttgttttatatttccatgttccaggggtccttgtcatttgatgaattgttaatccccaaatctcagtaagaatgacaccatctttatgaattcttccctgatcatactctgtacaaaagtttccttccctgggctccagaacaccatgtatgcgtcagctgccactgggtcgtgttgtgtttgtatgtgcatgtcatgctgcttttctgtatgggaatctcttcctttctatctctgtatttccagtgcctcgttcatggtagttacctagtaaaggctgagctaggaaatcatcgccctgtagctcgttctctccacgtatatttattcctcagtgtgtacatttctttctttctttctttttttttttttttttttttttgagacggagtctcgctgtgttgcccaggctggagtgcagtggtgtgatctcggcttagtgcaacctctgcctgccaggttcaagtgattctcctgcctcaccctcctgagtagctgggattacaggtgcccaccatcacatccagctaaatttttttttttgtatttttagtagagacagggttttatcatgttggacaggctggtcttgaactcctgacttctggtgatccgtccacctcatcctcccaaagtgttgggattataagtgtgagctgccacacccggcctagtttgcacatttctgttcttaattcttgctgttattctgtggtgagaagaattcagggaaaaggggtcaggtctgatggatcccttattttgggccccttcccttgcccctcactttcccggatctctctcttgacttcatggagcttgctaaagtttcccgaaggacaaaggaacagtggtcagtgttgagaccccataccaactcctgttctttccccagctggacgagttctatattggacagattccactgaaggaagtgacttttgcaaggctgaatgacaacgtgcgggagaccttcctgaaggatatgtgccgtaagtacggtgaggtggaagaggtagagatcctccttcacccccgtacgcgcaagcacctgggcctggcccgtgtgctcttcaccagcactcggggcgccaaggaaacggtcaaaaacctccaccttacctccgtcatgggcaacatcatccatgcccagcttgacatcaaaggtgaggactcctctgcctgccactcaggcttggcctccagcggaggttgtacatgcaaatgcctgtcagggtcaggcaggcgcccagggtcatgatctgaaactgctggggccagttgtgtttctgaaatcagatcagattttagagtggaattatggtacatggatttttgtgtgtgtggtgtctccagcaaggtcgggcaataggccataatcaagcacataactatctgtaaaaaaaaaaaaaaatcatatgaagggttgtactaggtaagatgaatagattgtagtaaatcagcccaggtcaggttggttgcttggttggtttttgagacaggatcctgctctgtcacctaggctggagagcagtggcgtgatctttcctcactgcagcctccagctcctgggctcagccaccccagcctcctgagtagctgggattatgggcatgcaccaccacacctggccaaagtttttttgattatttgcagagatgaagtctcactacactgcccagcctgtttttaatttttttttttttttttgagatggaatctcaatctgtcgcccaggctggagtgcagtggcacgatcttggctcactgcaacctccacctcccaggttcaagtgattcttctgcctcagcctcttgagtagctaggattacatttatgcgccactacgcccggctaatttttgtatttttagtagagatagggtttcaccctgttagccaggctggtcttgaactcctgacctcaagtgatctgcctgcctcggcctcccaaagtactggtattacaggcatgagccaccatgcctggcctctttttaatctttctatatgctattctataacccatataggttttggtgccagattctcagaaatactggattttctgggtttttaggtttggaaatttgagatagagagtaaaggagctgtgaacacaagcgaggtggtctgggcttctgtgttgagtgatggggagcagtggggtctgtggcgagctgcagattgcagtattgtctggaggaggcagccattagtaggcactggccagtttgcaagtggaaatgaggtttaacattcttgaatttggtttgtaaaagaaagccagggccgggcatgcggtggctcacgcctgtaatcccaagactctgagaggccaaggtgggcagatcacctgaggacaggagctcgagaccagcctggtcaacatggtgaaaccccatttctattaaaaataacaaaaatccggacgtggtggttcatgcttataatcccagctactcgagaggctgaggcatgagaatcacttgaacctgggaggtggagattacatcgtgccactgcactcaagccagaaatttgggtttttgtgtgaaatctcatggtttttaaataccatgtttctttcctcacaaggtgtttctgaggtgttcactccacagctcctgcaggctccgttagtcccccggttgctgttctgcatgctttagtttacaggataaagagcatggggtgatcgagcctctgggtttgaattccaatttttccaatgaccaattctgtgactttgtgtaggtcgcttttaagcctctagaacagaggtactgatgcttcccttctggtgatccaacatggtaaaataagtagaagtgtttttgataaatcgtgaagtgtcataaaatatgttgtttgtggtagtttagaggtagagataaggtagaaggtcccaaaggtagagttatggtaggagaactgaaatcctgaaacccagattccaagaaattgtaggaaacttgaggcctgagaaagcaggaataccagatcaggaaggagttagtatctccatctgacaattggttcccatttccctccctccaggacaacaacgaatgaaatactatgaactaattgtcaatggctcctacacccctcagactgtgcccactgggggcaaggccctgagtgagaagttccaaggctcgggtgcagccactgagacggtgagaagtttgtggctaccacagcccctagccatgtgggcatggtgtccgggtgcccggagcaggagcagtcttcgggaggttccgggctttcccgttaaacaaagaagagccaagcaaagctgctgagatgctttcaaaagacagggaactaggggccaggcacagtggctcacgcctgtaatcccagcactttgggaggccgaggcgggtggatcatgaggtcaggtgattgaaaccatcctgactaacacggtgaaaccccatctctactaaaactgcaaaaaattagccaggcatggtggtgggcgcctgtagtcctagctacttgggaggctgaggcaggagaatggcatgaacccgggaggcggagcttgcagtgagccgagatcacgccactggactccagcctgggcaatagagcgagactccgtctcaaaaaaaaaaaaagggaactaggattcctggtttgggaaagggcaggtctcaagtggtgtttgagcccattcctctctccttgccctgctctgtcgctctaggccgaatcccgccgccgctcttcctctgacacagctgcctacccagcaggcaccactgcggtgggcactcctggcaacggcaccccctgctcccaggacacaagcttctccagcagccgacaagataccccatcttcctttggccagttcacacctcagtcctcccaaggaaccccctacacgtctcggggcagcaccccctactctcaggactctgcctactccagcaggtacagagcagaccccgcctggggccccgcccgcaaagtctgggagctgccactgggaagaagatgcccagagtctgtctccaagagggagttggaaataatttgtcctagtttctctgtggattcagtcaacaaattgctgtcctcggggaacacactagctaggaacccaacatatagctcttcttttggagggcagcatagaggggctttgggccctgggacccagtacgctgtggtttggtcatagagagctgagtccagctaactcccctgcttcttctccagcaccacttcaacctccttcaagccccggcggtcagagaacagctaccaagatgcct

SEQ ID NO: 2044 - DNA, 2175 bp, Homo sapiens
ggctcctggggctccccgcagacgctgcttttcttgctccactgggggtgcctcttcctgggcgcccgccgcctgcatcctgctcgccctgtctgggaatggggccgcccccgggcttgggccggcccggctggggcccccgaggcgcttccgccccgtagtgaccgcctggtgccgccccccccccaggatgaagggcggcgagggggacgcgggcgagcaggccccgctgaaccctgagggcgagagccctgcaggctcggccacgtaccgggagttcgtgcaccgcggctacctggacctcatgggggccagtcagcactcgctgcgggcgctcagctggcgccgcctctacctcagccgggccaagctcaaagcttccagccgcacgtctgccttgctctcgggcttcgccatggtggccatggtggaggtgcagctggagagtgaccacgagtacccaccaggcctgctggtggccttcagtgcctgcaccaccgtgctggtggctgtgcacctctttgcactcatggtctccacgtgtctgctgccccacattgaagctgtgagcaacatccacaacctcaactctgtccaccagtcgccacaccagagactgcaccgctacgtggagctggcctggggcttctccactgccctgggcacctttctcttccttgctgaagttgtcctggttggttgggtcaagtttgtgcccattggggctcccttggacacaccgacccccatggtgcccacatcccgggtgcccgggactctggcaccagtggctacctcccttagtccagcttccaatctcccacggtcctctgcgtctgcagcaccgtcccaggctgagccagcctgcccaccccggcaagcctgtggtggtggtggggcccatgggccaggctggcaagcagccatggcctccacagccatcatggtacccgtggggctcgtgtttgtggcctttgccctgcatttctaccgctccttggtggcacacaagacagaccgctacaagcaggaactagaggaactgaatcgcctgcagggggagctgcaggctgtgtgagactggtgttagccaccgctcactgcaagcactgcctccctccggggtctgtaagaggccgcaggggcctacagacctcatccccccatcccctggctggagccacttccagtggccactctcaggcagagttcagattcctgcccgcagggtcctctgggctgggccttggggcagctcccacattcccagggattttccccatcagtctgtcccttgggttttgcaagctactctgcacctgggctggcctcagttgaaggatcatgcagtagatagaggggaggcagggagagcttgtgggaccttcagtgctgactttagccaccatttccattcctatacaggatgtgaaggtcagaaggcagccaattgttggtttaatttttttttttttttgagacagtctgtttcccaggctggagtgtagtgatacagtcacagctcactgtagcctcgaccttccaggctcaaaagatgctcccaccacagcctcccaggtagtgagtagctggtactacaggtgtgtgctgccacacccgactaatttttttgtagagacggggtttcgctgttcccaggctggtctcaaactcctgggctcaagtgaacctcccgcctcggcctcccaaagtgctgggattcctttctttatttctgtagaatctattttatggttggcattttgggggaagatttcgatgggttccacattcttgctttagttgttgtagagggatttgggtgtttctacccaaggcattggtctagcttttcctacaatgaacctatctttggaggttcaagctccccaccttcccccactgtggtgacctgtggccacttgcagaagggatggtgcctgacccactgccctagccccacgctatgcaccaaacttgttctccccgtcctggtccagggctggggtctttagagactgacagcctctgccccaggcctgagtccttagcaagggttgggtaaggaggttttaagggagaaggtccagtccttagcccttgaaatacaaagctcttctgacactgaatttggatgcaccttgttttatataataaatcgtgtttcacagatgt

SEQ ID NO: 2045 - protein, 291 aa, Homo sapiens
MKGGEGDAGEQAPLNPEGESPAGSAYEFVHRGYLDLMGASQHSLRALSWRRLYLSRAKLKASSRTSALLSGFAMVAMVEVQLESDHEYPPGLLVAFSACTTVLVAVHLFALMVSTCLLPHIEAVSNIHNLNSVHQSPHQRLHRYVELAWGFSTALGTFLFLAEVVLVGWVKFVPIGAPLDTPTPMVPTSRVPGTLAPVATSLSPNLPRSSASAAPSQAEPACPPRQACGGGGAHGPGWQAAMASTAIMVPVGLVFVAFALHFYRSLVAHKTDRYKQELEELNRLQGELQAV

SEQ ID NO: 2046 - DNA, 2125 bp, Homo sapiens
ggctcctggggctccccgcagacgctgcttttcttgctccactgggggtgcctcttcctgggcgcccgccgcctgcatcctgctcgccctgtctgggaatggggccgcccccgggcttgggccggcccggctggggcccccgaggcgcttccgccccgtagtgaccgcctggtgccgccccccccccaggatgaagggcggcgagggggacgcgggcgagcaggccccgctgaaccctgagggcgagagccctgcaggctcggccacgtaccgggagttcgtgcaccgcggctacctggacctcatgggggccagtcagcactcgctgcgggcgctcagctggcgccgcctctacctcagccgggccaagctcaaagcttccagccgcacgtctgccttgctctcgggcttcgccatggtggccatggtggaggtgcagctggagagtgaccacgagtacccaccaggcctgctggtggccttcagtgcctgcaccaccgtgctggtggctgtgcacctctttgcactcatggtctccacgtgtctgctgccccacattgaagctgtgagcaacatccacaacctcaactctgtccaccagtcgccacaccagagactgcaccgctacgtggagctggcctggggcttctccactgccctgggcacctttctcttccttgctgaagttgtcctggttggttgggtcaagtttgtgcccattggggctcccttggacacaccgacccccatggtgcccacatcccgggtgcccgggactctggcaccagtggctacctcccttagtccagcttccaatctcccacggtcctctgcgtctgcagcaccgtcccaggctgagccagcctgcccaccccggcaagcctgtggtggtggtggggcccatgggccaggctggcaagcagccatggcctccacagccatcatggtacccgtggggctcgtgtttgtggcctttgccctgcatttctaccgctccttggtggcacacaagacagaccgctacaagcaggaactagaggaactgaatcgcctgcagggggagctgcaggctgtgtgagactggtgttagccaccgctcactgcaagcactgcctccctccggggtctgtaagaggccgcaggggcctacagacctcatccccccatcccctggctggagccacttccagtggccactctcggggcagctcccacattcccagggattttccccatcagtctgtcccttgggttttgcaagctactctgcacctgggctggcctcagttgaaggatcatgcagtagatagaggggaggcagggagagcttgtgggaccttcagtgctgactttagccaccatttccattcctatacaggatgtgaaggtcagaaggcagccaattgttggtttaatttttttttttttttgagacagtctgtttcccaggctggagtgtagtgatacagtcacagctcactgtagcctcgaccttccaggctcaaaagatgctcccaccacagcctcccaggtagtgagtagctggtactacaggtgtgtgctgccacacccgactaatttttttgtagagacggggtttcgctgttcccaggctggtctcaaactcctgggctcaagtgaacctcccgcctcggcctcccaaagtgctgggattcctttctttatttctgtagaatctattttatggttggcattttgggggaagatttcgatgggttccacattcttgctttagttgttgtagagggatttgggtgtttctacccaaggcattggtctagcttttcctacaatgaacctatctttggaggttcaagctccccaccttcccccactgtggtgacctgtggccacttgcagaagggatggtgcctgacccactgccctagccccacgctatgcaccaaacttgttctccccgtcctggtccagggctggggtctttagagactgacagcctctgccccaggcctgagtccttagcaagggttgggtaaggaggttttaagggagaaggtccagtccttagcccttgaaatacaaagctcttctgacactgaatttggatgcaccttgttttatataataaatcgtgtttcacaga

SEQ ID NO: 2047 - protein, 291 aa, Homo sapiens; identical to SEQ ID NO: 2045

SEQ ID NO: 2048 - DNA, 64485 bp, Mus musculus
  misc_feature (1)...(64485): n = A, C, G or T/U
ttagaaaataccaccttcttttccaatttttggagctttctcctcaaggccggtaggttttacttcctggtcatttctagtgatttactcactgggttcacaactgaaaaccactcactctctcccagaacctatggtagccaacatttctgggcaggacgtgggggacacgggagagggggcgggcattctgttttagttaactagtagtattccattataaccacacaccaggatttcaacccctcccagtcaatagttgatgagcatttgatgtttccaattagtgctatttcaagtaaagcagctgtggacattttgtattcagctttcacatatacttccatttaaaaatttcattatattttcattttttgagtgtgaattttgtgtgtgtgtgtgtgtgtgtccatgcatgtgtggtacagtgtgtagagttctgagggactgagctcaggtcactaggtttggcagcgagtccctttacatgctgagccatcttgctggccacatgcttccatttttttttcctgtggaatgttttggattatacaatagacatgtatttgattgcttttttttttttttttaaagaaagtgacatctcctgtacacatgctggcctcaaactcactgtagcgaagcatgacattgaacttcggatccatccgatcctactctttgaatacttgcatgatagccacgcactgacacccctgcctcctcctgtggtgctggggactgaaccagagccttgtgcatgctggcagacactaccagatgggctgcatcccatccctcagtgcgtcaagccagattgttattgttgttacacagcccaggctggtccagaactcccacctcttctagcctctgcctggcacgctgttattattattatataataatgttgttattattgaactacctacctatctatacatttacacatagatgtgacaataacaaagaaatggaggtcatgagtttgagaaggagcagggtagggggtgtagagaaggggttggagggggatagcgaaggggcaagtgacacaaataactaactaaataaaatggttttgttttgtcttcaagacagccctggctgtcctggaactcaatctgtagaccaggctggttttgaactcacagagatccacctgcctctgctgggattaaaggtgtacaccaccactgcccagcttataattatattttaatttcaaaatatgctaagaaagatagtagaaagggggtcatgagaaggggaaaagattagttttttaaaaaaagatttatttattttatgcatatgaatgctctgtcccaccagcaatgggtgcgctgccctgcaccccacacacacacccacacccacaccagaatgttcttggtgagtgctcctgaaattatttttgtgttttgaggtttcacagtggcatcctttgtgcagggctctttccatttggaaataaattttcttcagcatgggacattttctcaaaatgtgtcttttatctcctctttggcactcctcctgtaatatctttgggcacttccttaccttggatcggctcgctaacctttgttctttctctccgaggacccctttcctcacctgatttttaagagagtttgacctccatgtctgcctctgctgctgaaatgctgtttccactttagtttctacattccaacttctttttatgaaaaaggatttatttatttttatcttatgtgcattggtgttgtgtctgcatgtctgtctgtgtaaggatgtctgatcacttggagctggattacaggtaggtgggagctgccatgtgggtgttgggattcaacgtgagtcctctggaagagtatccagtgctcttgactgctgagccatctctccagccccaacttcttcttttagagtctctctgcgtccctgtgtctgtgtctctccaactttctttggcatttcttacatgtcagcaatccttgcatgtatatggctttcatattggagaattgggtattaaacgtctctctggttagagcttggatttcttgtgattgagcactgctaactttggctggattcggaactgagggagggacaggacctgtggaaatggcactgagttgtactcatatcagggaagagtgctctagatacaaggcacaaggcactgggcataagcagggtacatgtggaagcatttagggaatcccaaggagggtcaactggtcaccaggagcctcacaggtctctatgtgacctagggcttcctctcaggtgacatgaaacactgccacagagtgtcagacagagatttggcatgataagatccacccgggagagtcccctggcattccgtacagcggtccccgtgaagagaggaagcagcccgggaaagaggtgcatcagttggcagaagtggtggcttggatggaatgcaagagcaagaaatgtcaaattctggattttaaaggactcccgggcagtcgtgacacaagatgggaacattggctgtcagatacttgtccgagtggctaatgaggtactgttgcctttagctgggatagaaggaagcgtgtgttctagacactgcatttgaaatgtctttctagactacccaaggagaagccaaagaggtacggagggctgaagactcaagtcctgaatttggaaagcacacttgatataaactctgggtagcaatggggagtcagtgtagcccccatcacaggaccacagatgcctctgtggtgtgggaggctgttgtgcggaggctgcccacgtgcaggtctgggaggacagcaaagcttggtttagttttgctgtaaacctaaaaattcttcacaaaataaacttgattttttttttttttaaagaaaatgctattgtgagccatgcaacttaatggaatagccaagagaataagtgagcatgaaactgcactgaggatcaggtctgtggtgcaccgttgccagcggtgaccgtgggatagaaaccgatgtgactcaagaagcatcaggagttggagggagggacggatcatcgactattcagagtcaagtgatacaggcgaagggctgaccgtgaatcttctcgttgatggagataggtaatggactagaaatgtctgggagactaggcagagagggggccagggacagtgaaggagagagtccgttcttcatttgaggtattttgtcgaaaaatgctatgatgaaattgagcaaacagaaaaaggcacattttaaagacatgtttccctacgtagtccaggctggtctcaaacatgattttcttgcctcagcgtcgccactgctagggttatagacacgcacctctactatgctagggagagtggtttaacttattatttgcttatttcattaaaaaaaaagcgtttgaatgggggactagagagatggctcagtggttaagaatgtatactactctcaaaaggagttcagttcccagtacccagactgggtggctcacaactgcctgtcattctagctttagggaactcgacgtcctcttctggtgtccctgggcacctgcaggcacgtgcgtactcctacaggaggcatgcacatacagctggagtttgcaccctgtgatccccagcttccctcttcctcgtgctctgacccctggcaaccatcatgctccatggaagctgagcagatacagcgcccgcagattccttctgttgcatggacccatggcattcatttttctatgcctggcctatttcacctaatacaatatcctccaagttcccccagtttgtcagaaatagcaggatttccttcttttcttctcaggactgttttgaatttgagactggagaagcacacggctggctgaaaactgatagatagtatctcattgtagtccaggttggcttcaaactcttggcaaccttcttaatttaacctctgtacttctgggattatagacttgagctaacatgccctgctagtctgcctttttagccgaaatgctatccaaaaccttaagctttctctccgtggatgcaacatagcctaaggagggtgttcccagtacctctagggagggtacttccaacaagttcattagctgaaaatagccaaaccaggttcagccgctgtctggccttaagcttcttgattttcagcccaagatgttgacctcctaggatctttgagttttggcatgccaggaaggcatgacagatagatagatagatagatagatagatagatagatagatagatagatagacagacagacagannnnnnnnnnnnnnnnnnnnnnnnnnnnnnnnnnnnnnnnnnnnnnnnnnnnnnnnnnnnnnnnnnnnnnnnnnnnnnnnnnnnnnnnnnnnnnnnnnnnnnnnnnnnnnnnnnnnnnnnnnnnnnnnnnnnnnnnnnnnnnnnnnnnnnnnnnnnnnnnnnnnnnnnnnnnnnnnnnnnnnnnnnnnnnnnnnnnnnnnnnnnnnnnnnnnnnnnnnnnnnnnnnnnnnnnnnnnnnnnnnnnnnnnnnnnnnnnnnnnnnnnnnnnnnnnnnnnnnnnnnnnnnnnnnnnnnnnnnnnnnnnnnnnnnnnnnnnnnnnnnnnnnnnnnnnnnnnnnnnnnnnnnnnnnnnnnnnnnnnnnnnnnnnnnnnnnnnnnnnnnnnnnnnnnnnnnnnnnnnnnnnnnnnnnnnnnnnnnnnnnnnnnnnnnnnnnnnnnnnnnnnnnnnnnnnnnnnnnnnnnnnnnnnnnnnnnnnnnnnnnnnnnnnnnnnnnnnnnnnnnnnnnnnnnnnnnnnnnnnnnnnnnnnnnnnnnnnnnnnnnnnnnnnnnnnnnnnnnnnnnnnnnnnnnnnnnnnnnnnnnnnnnnnnnnnnnnnnnnnnnnnnnnnnnnnnnnnnnnnnnnnnnnnnnnnnnnnnnnnnnnnnnnnnnnnnnnnnnnnnnnnnnnnnnnnnnnnnnnnnnnnnnnnnnnnnnnnnnnnnnnnnnnnnnnnnnnnnnnnnnnnnnnnnnnnnnnnnnnnnnnnnnnnnnnnnnnnnnnnnnnnnnnnnnnnnnnnnnnnnnnnnnnnnnnnnnnnnnnnnnnnnnnnnnnnnnnnnnnnnnnnnnnnnnnnnnnnnnnnnnnnnnnnnnnnnnnnnnnnnnnnnnnnnnnnnnnnnnnnnnnnnnnnnnnnnnnatctatctatctatctatctatctatctatctatctatctatctatctatccatccacccacatatctatctatctacttatttattgtgtatgtgcatggttagtgggcagcttgcaggaagtcagttctcttgttccactgagatgtgggtccaggggattctatttttctgtgaaagttttgttaaaagtctgcttgcacaacatcacatgagcttcatttggtcttttgttttgtggttgttggtggtttttttaggcaaggtctcatgtagtcaaggctgacctcaaactcgacacgtggtcaacaatgaccttgaattcctgatagcttgcatccacctcttgagggccaggattaaaaccatccactacaccacccagtttatgtgttgctgcgggtggaatccagggcttcctgcatgctaggaaagtgctctgccaacttagtcacatttctttccagcacatggtcttttacaactgttaaatagtctatcaaaggagtgtgttgtagcttggtcatcttccgagtgggcatttctatctactataaatagcaccaagaagaaacatgcaatgatacatgtaataattgcactgattattctttttacttttgggcaaaaatgactggttgtcaaattatttactggctcaacggacataaatacttcaaagactcgcatgcacaatgccaaatagcatcttaccgtgtctgcctcctcaaccaattgagtagcgtaagggcttacatcttgcaagagctactattagtaactaccttgtgcacatcacagggttactacggtgtcaactccctttaattaaaaaagaaaaaaacaaaaaaccaggattgaggtctagctcagcggtagagatagcttgcctagcaccacaaggctctgggcttcatccccagcaccacacataagcaaagcaaacactcccaaaaccttcccgcctgtgtgtaggctgaggtttactatttacggaaacagcttgcagtgggagtgggagtagtctagattccagtgatttctctgtgcgcctacatgtgctaggcactacgccaggtgctttttgtatttcttactgctgcaaccacaccttcagcatgtaggtgtcatcctgtccccatgaggctgtgatttgtgaggacgttgtgctggtcaggtgcacggtcaggacgggtatcaggtgggttgacttggagcctagagttgatccatttgtatattcagccctacctcaaagggtttcacatacatactcccatgtaaatacatatgtattatatacaattgtgtatgtatgtcacaaaatgaagacaattattaacagtttaacgtttttggttttttttgtttttttttttttttttgactgagtttcatgtagcacagactagctttaaattcactatgtagtcaagggtgatcttaattctctgaccctcctgactcctcctcccgagtgctggcgttacagatatgtacagtcactattcatcacatacccctgttctacttagtgctggagatcaaacccacagcttggtgcttgcttagcaactgaactatacagcactagccagacttaacagaattttacaacacttatttatttatttagatatttttaccttactttatgtgtgtgaatgttttccttgcacacatgcatgcatgtatgccacatgcatgcttgttagattctctgcaactggagttacaggtggttgtgagtcacgatgtggctcctgagcattgactccagggcctctgcaagtgcaacaagtgttctaatcacggacacacctctctagtccccacactgtataagtgttttaagagtatacatattgggctgggtgtagtggcatattgcctttaatcccagcactaggaaggcagaggcaggtggagctctgtaaacttcaaggctagcctggtctatgtagagagttctaagactgccaggcagagctgcattagagagaccccatttcaacaaacaaaacacgagtgcatgtgtcatggtgtgaatgtgggagtcagaggacagttttcaggagtcggatctctctttccaccacgtgggttctggtacctactgagccatctcgcccatcctcagagttttaaattcctgggtagaacaaggcaactgaccagtaaagcttactctctgaaattccaacctattggaagaactccaaggccactgcttcttgtctgctgtgataggtggtccttgatctaaatgtacagccagcagtgggaggaatggggcctaacctgtttaccttttgggccaatcagctgccatcattgcttttgagggtgtaaatgagaagctgcagagggagagagacttggggatccctcggaggatgtgtgtttcgcttgggacagagattgtgcctagaacatacctgtgtgaaaaggtgatcctgctctgacagcttgaggggggggctcttcccctcctacttgttttattttgttctgagacaggatctcacggtgtagccctggctattctggaactctctatgtagatcagtctggcctcaaactcacagagatccagcagcctctgcctccacctcaatccccaggatcagagctgtatctcagcataggccttttactttattctgggtctgatgcacacgacacgtgaatgttggcttttggatctttggacattatgtatgtgagtgttttgtctgccaggtatgaatgtgtagcgtacgtgcgtctggagcttgcagacgtcagaggaggacatcagatcccctgggactggagttacagatgactgtgagaggacatgggtgctgggaattgaaccccagtgctctgcaagagcaagcgctctgaatcactgagccatctctccagctcccagtaccgattttgtgagtcaaacaaaaaagaaaattaaattgtttactcactcttagccccggtcttttgacaagctcacaggacggagaaggggacctaaagctgctaaccttccccattatttcccattgtctaagaagcttggagctgttctctcagtacggcctccctcggagcatgtcttagaccacaccaggcttgctgccggcacggtgggaagaacctggctgctagtgctgctggctttggctgcctgtgtctaacttctactccattgtgctagagtctcctcctttcctgtgttagcttcggtgtatttgtgatcagcctctggggacgctttcaatggaggtgggcagggaaaattttgttactgttctcaaaatgcattgatcccactgggatggtttggttttgccttctctctctccttccttccttccttcattcccttcccttcctctttccctctctctctccctccctccctccctccctccctccctccctccctcccttctgactccttccttctgactctctatgtagctgccttagacattgctatgtatatcagggtgtcctctaactcaaagaatcttcctgcttctgcctccggagtgctggggttgctgggattaaaggagagcaccattatgtctgtgtctgtgtcggtttaggctcagcttttacagagcctatgacccaagagctatttcaatggccaggaagcttggggggggggcgggcggcaatagcagctggagacattcagaaaccccggcttggaagccacactgatggtgctcacctgcaagccgcagctgaagacctctgcagccttcaggggacggaacatcctctttggatagcacaaatggccgtgtttggaaatgatggagtggggaagggtaggcagagagatggtgaataaccacagagggccagggctgaggtggcgttgggactgcagggtggacaaaaagggaggaaaatagagcaaaatgggaagctcagaatagaagatataaaggaaagtgccaactagtgaaaatcctgcgaaagaacgcgcgcggggggttgggggggcgactggggaatggtttagaaaaatagcaattagcacagctaaaaataaagaccaatttcgagacaaagccagacccacaaggagaaaaataaaactcgccagaaagacaattccttgcaaaccgaatgctcaagaaaatggggctaacgacacccccctcttgggctgtttggtaaaaagaaatgggaaactagatgagcgtggagcgcggcgctgagcaggtgactggcaccaggaggagcgttgagcccggcgctgggatctacaggattccggtagttgagcgcaaaggttctcctgagactgcacccaagtgtcgtccaagttaaaaaatgtgctggcgcgctcagatccactctgaaaccgcagaggctccagacagcgttctccgaggtttgtcccggggcttggaagccccggcacaggcgtggcgtgggccagagtgggcgcccactcgcggcggcttggctcgggactctggtgacgcctcccgggcattcgcggcgtgagcaggccgcgcgcccacggaatcgggtagacccgggggcgatctgggaggtgactcgggcctggcagggacaccgaacgctgtatgtctccaggccgcgaggggagggaccgggatgtgcgcgggagctgagggtcacccggggccaccgcgccctgccctgcgcgggtaactgagggctggacccagtgcccacgggcgcgggtgggcagggagagggggagcgcggcggggaggaggcggcgggnnnnnnnnnnnnnnnnnnnnagcctggaggggcggcgtcgcgcgggctcctcctcctccttgccctcttcgggcttagccgccgcgctgcccggctgctccgtcctctggacgcccgcggcgatgttcacccgcgccgtgagccgactgagcaggaagcggccgccgtctggtaagcggttgcgggcgcttgggcgcgggaaggacggggtcgccgggtcccctggcgcggctcgctgtgccgcccggacagcagccgcgctcctccccgctcgctctgtcccagccgcggcgggagcgcagagccggggagccgcccggggaggaagttgggcttgaagcgggagtcagagcagctttctttctagagaaggtctgggaaccacgggagacacattaacagcccctcactccgaggcagcgtgggaagccaggcttccctcctgcgtgcagcctctttctcgggcggaatgggaaggatgctccgccggacctctgcatccccggagtggccggccccgcggcgccaaaaaaagtggagtcccaaggtggctgcacaccagggcgggggaggaacttgtgtgacacggcgggggagtcactttgtttttccccctgaacctgcctgacccacagtttggggcaacttggcaagacaaagaacccacggtgcagaaatggtgatttgaatcgtgccatcctttttgttcttaataacacctaacactctttgatggcttaggttgtggccaggagctgtgttgacaccttgtgtgctttctcttgtcttcaccattagagcagccgcgtcggaggggtggggctctaaagccagggtgttgggtaacctgctctactcttagctgatggatttttttaaacgtaggtttatttgcttgactctgggttcggggttcaaaggcttgcttttctgtcgcccagagattcactacgctttagccggtttcctcttttcacgtaaatatcaaacgtggttaagcggctgcaatcagacatagacccaatcccttggccaccactcgacagctgtgcaacttctttgtgactggggatgtgcaaagggtagctttaagtgcttaattggagactccccccccccccccatcagccacatgcaaatcatttcattaattatttaagacaaccccactaaagtcagattccatagagttattgtaaagagtttgcactgttgtcttaatatgcgttgaaatgctccattagtgttcccgagtggtcacattcccttgtgatgctgatggctgacactgagtggtggtcagattctaggcaccggagttaaactccaaccttgactctgccactccgccacactgaataatgaatgtccttggacctttctgtgccgcagagctgtgctggtgctggctcagtgtagcttgcaagaaccaattgctaaatgttcagggcatctgggaactggttgctacgtcataggtggactgaaatgaactgtggtgggacatatcaacatatgtcagacatcaaggctggaacagtggatttcaggaagctgtggacttaactacatacttaaattttattttagatcatatttatcatgtgtatgtgtgtgctcgtgtgcgtctctgtgtgtgtgtgtgtgtgcatatgtgtgtttgcatgctacagcttgtatgtggaggttagaggatgacttatggaaatcagttttcttctaccgataggtcccagtagtcaaaatcaagccgtcaggtttggatgtaagcatccttacccactgaaccgtgttgctagccattaactacaggttttaattctgataaggatatgcttacattactaatagtaggatcagcagttaaacctgagaagccccaagtgcaatgctggatacatgataaaggtgtggggcttactagtttccttttctttctttttccatcatgtaggggagttccgtctagccttgcctaggttgcttgctgcttaaaattatatttggccagaatataatacaaatagaaccactgaattgtgacagatacctggatttgggatgcttttgcatacggccagattgcaatcccaaactgaaaggcagtttcacagtcattgctagcatgtatctgttccagggcaacagactaaccctgatgaagcttgcccacaccagtgatacaaaggccagcagggaaatagcagtggctggtgttggatgtctatatggcaagagcccaatttccttgaaatctgtgggtataagttctgctgccctgtgaaaggacacgagcccctgccagtttggtcactatcatcaccacccaacatcaagaaaaggagccaagtgagaaaggagggagggtgagggctccttacagagatgctgtgcagcaggcaagccgtctgcaggacagttaaggatttgggagaaggtaattttgatgtttttttttttttttcttgtggtgctagaggtgtgcccaaggccttgtatatgtaggcaaatggcctgccccagagcaacaccccgcctgaacttcgcttttaaagaggttttccagagtatcctactgaagccccaccaaagctggccgtacccctgcgggagcctgggctgggcttgactgcaagcctctctcccccagagcattctatgtgaggctgaaagagttaaatctcatcaaagatggcatctgtaagtagagagctggaagccccacctgtttctaaggttcgcagttggaggctctatgttctgcctatcaggtaggggaagcagggggccttgataaaagtcagaccccagttccatcttggggaaccaaggggagcaggaagagtcacagcttcgttttttagcaagtaccccaagtgatttttgtgctgaagtgtgaggaacccccagaggaccctggcttgtacccacaacccacactgctaacacctgaggagcgcctacctcagaaccaaagtaaaagccacacccctccaggcagactgctgggtggtctgtcagagaagtccgctttacattatcctattaaaccttggcaaagctttcagagttactgctgggcttatgtttttagtctgtacagaaatttaacgaatttgttcttaacagttttacagtggagcgtcttggcagttagggaaactttcctctgtagagactcatggggtggacctggggcttggaagagagcaaggctagcctccaaatgtggagaggccaggaggagatggcctttttgtccagatgacgtcagctcgatctgcttgggttccactatgagcagcctgtggatgacatgggtggacaggaggtgcgatgtggcttcaatggctgtcacttgtccatattttgtctttcattttcttagatgcccaggcagggtctgagctggccattgcctagagccttgcttgcctgccccttgcttgcctgccccttgctttcctgggaaaccctcctaatgctggcttctgaggactcgtttagacggtactaaatttattgtggtcgcttctgcttcccccagatagctagctgtccactgcagcagcccggcgggtggcagtgagagaagaggggcctcaggcaggcaatagcagcagccccttgataagagctgtcaggaggcgtctactacgtgaaacagtctgtgcagacattcagggacaatttttttctttggacctggctcccatttcttgagggccatgctgagtgctcagggtcgccttgctgcctctctgtctgatctgtccttcttttcaacccagtttactgccccttgctctgcctgcagagctattggttatccctgtctccttgagggtgtccttctgggcctgactggtcctctgagcccaagagtgggttgtctcagaaattgggaccccaggaacgggggactactttagggctactcatctccaaagaagcatacaagattaacctgtcttgggccctcctctggagctacctggatacacatctcctcagccaccttgttaaatagttaatgaataaatatgcgggtgacagcttcccccctgcccttctcctccatctgggaattcctggtcttatttccccctcaattcattgtaaacctgtgactaaaagctttcgtttctcgaatcttacagtcccctttccttcccagcttcctcagccagccgtcctgagatgtcagtctcctccattgagttgctccttccttccattcatccctttgtgccttttttccttattgggttgccgtatattctcagcgattgtcacctgttttcagtggctcccttttttcctttcagcacctcttgatcaggtgcttagcttagctcattcctcagaaagtattgatcattataagctatattccggactaccagatgtgaggttgacccttcaggaacacattccttttgttctcaaggaatgcatcggatggagcatagaaagagagcaggttggtgaagggatgtttattcaacatcaggaccagggctggatctccagaactctgagggtggtaatcccagtactgagacacgtggatccctggaacacactggccagtgagtctagcctgtttaacactcccaggctggggagagaatctatcaaaagacaaggtggacagtgcctgagaaaagacaccatggaccagcacaatgtccaccagcacacacagggagtagctcaattaagagactgcttacttagcaggcacaactctctgaattcaacccctaggacaacataaaactggccgtggtagatcttagcaccagagaggtaggaggatcagaaagtcagccggcagtggggtggcgcacgcctttaatcccagcacttgggaggcagaggcaagtggatttctgagttcgaggtcagcctggtctacagagtgagttccaggacagccagggctacacagagaaactgagaaaccctgtctggaaaaatcaaaataaaaaaaaaaaaaaagaaattcaggatcattcttggctacatagcaagtcacagctaatcggaatatatatgcctcttcaacacacacacacacacacacacacacacacacacacagatgcacacatacatacatacacacacacacatgcacacacacagatgcacacacacacacacacacacgcacacacnnnnnnnnnnnnnnnnnnnncacacacacgcacacacacacacacacagatgcacacacacagatgcacacacacatgcacatgcatacatacactccccctacacaccaacactcacattcaaaacaatgtaaaacaaaacaaaacacacatgacaacaacaacaaaaaccatccccctccccaaaccaagaaagctagcaagcaggaaaataaatgtatgggctaattcatgaatgatagtgaacttgggaggctggagctgagggtttgctgggagtttgagaccaaccagagctacacaggaagaccttgccttaaaaacctcctcccctcacacacaaagaaagcatgactgatcccgacaaactgcgtttccaggatttgggattagcccagggcctatgtgtgttgggtaagtgctctaccactgagccacacccccagcccagaagtcctttatcttgaagtgaggtagagccaaggaggagtgtgggagggaaggtactttatgcatctgtgccaagcccctttcctggagacaaggaaaggcaggcagtgacaacgacttgggactctaaccattttttcagggtcttggggggccatgattgtttttctgggcctctggctgcctagaaagtggggcttcttgggagggaacacacaactgtctggcattcttatttccttcccctagtcagtgctggagactgtggccatctgttgtttagtccacccaaaagaggatgttgagaatagttttctgtttggacccaagagcgtcagggaaccctgagcccctgttgttcaacacatcagctctgagaaggcaacgggcacttggtctgctggatcatcaaggtggaccggagcatggaacgtaagggccagcccttcctgcaacaccctcccacccctgaacatcctcagcttgcggggcgggcagaaccgggcctagggaggagggtgttgggttgaggcaggcacactggtgacttctgaggggccgctaagcacacttgctccatgagcagagtgtcaccgtgcaccttcggagctgtgcctccctctacggcctgttttcctgttcccgtcttacgtgccacttcttaggaggattgttttaaaacttttaaacttcatctttttttttaattttaatttttttttctgctaactgtagtgaattttcatgtcctcagttgggccctggcacacctgtaaggtcgttctcaggggctagatacaaatgataaatccgtaaagcactttttagatacagaatttccatgacccagtttctgtggagacttaagtagatcaccagttaaaacaaacagattctctgcttctatattgggatgtaactttaaaaaaaatgtattttgcttgatgtggtataggtgataggaactttctgaataagttttgtgtgcatagctttcccttgaaactacatgcaaaggagagtattgtttgtttctcttccgtgttccctttccgcatttcattctttctttatgggccagggtcttacagagtttacagtgttctcagaactctgctatgtagcagaggctggcccgattctcttacctcttacccttctaaatactagattacagatgagaggcactaccccaggctggaaggagagggcttgaaaggaaggtggggagttctgtctaactgctttggaatttggggctaacatctctgccttttcctagatatgaatgtctcctttgtctccatcaacgtgctgtggatttatgggtacttagagcagagtctgtgagaacgtccgttgcctctgctattgaggaagttggatgttgagagcttgttaaaatattatttggattggggaaatggtctgttgcgcagggtccttacacggctctccctacggagtcatagcagaaatctaagctgcaagcgttcaggtctgatgactgccccagatgccctttgagtatggatttctagggaattcctgtctggagaaagtctcgattagctgtgacatcatagctaatataaataatgtatgatgaagtggatcgcaagcaacaggctccagccatctgtatgccaatgctgcgtgcatcttcgaagacaggcttttactgaagtcagaaaccacccagaacagcacagatggaaatgaaactgtctgcagtgtgctgtgtgctgggtgctcccagcttagtcttacagggcttctaccctgacttccccagcatggaattcaccccaagtttctgtctacctacactctaacaatgtaattgttattggtcagtctcctgttccttgaccccacccctaccccttctctccctctctccaggatctcaccacgtaactctggctgaattctctgtataaactaggctggccttggactcagagatgcgcctgcctctgccccgcaaacactgggactaaaggtctgcacagccacaccctgctgttcttagcctcttcaaatctgctcctttctgacctctcgatgtaaagatgagcagaaatcaaagttaaacagtcatagagccccgtgagaaaggacaggttccctggtgccagaccaccggccacggaccgagactttctttctttgcaagtctcacatctcagcgtcctcacctggaaaacggggacgtaataaatgtcacacgagagtgctttcaacccacagcaaagtgtggcccacaacctcacacctggaggacaaattgtaagtagttttatcatcagctgaagataaatttactgaaaaaattaggcccaggcatgcaaaaaagaaatttcggagagctagaagaacaaagcaacacaaaacaaagaaaaaaacaaaaacaaaacaaccccccccaaacaacaacaacaacaacaaaaaactggccaggcaacagtagaaccccctttcttcgtcataacattttagagttgaaataaacaagcaaaatataagcagacaaaattgagacaaactaataccactccaaattgctgcttctagcccgagaaatcttaaagctgctaagaaaacatgtttagtgtatttttttttccacctgggcattttaagcctgctttcttgcctattcacccaaaatggaaacttgtcgatgaaaatggatgggtaggactggagagctggctcaggcagtgaagtgcttgccctgaatgtgagaggacctgagtctgctccccaggcccaggcagaagaagccagttcactttgtgattgtcaccccagggctggggaagccaggccaggaggatccctgggtctccgggccagccagcctggcagaaccagcagataaaagtgagaaattcagactaaaaaaccaaggtggagaggggctgagaaagacctcgggaactgacctctggcctatacatgcatatgtgtatgcacacacacaggtagccatgcacaagaatgacaaaatatctgaatttgggagactcttggataaggtttgggcagctgtgaaatcttgggtttttttttttttaatgttttaattgtcattattagtactaattatggtagcattttgagagggtctccacatatagccctgactgaccacaagctcccaatgtggactggcctggccttgaactctcaggatcctcctgatactgcctccatgtatgggattacagatgtgtgccaccatgtttttacgtttagaagtaagcttgcttgctattgataaaagctgttctttctctttcatgttactaggtaaaataccatgtttaacgtgaactgagatagcctgggatcccttggtctatatataaacaaaataaaattttctgagcaggggacactgagtcacagctgtgctgtgcgacttctagggtgatgccagatggaacaggctggtgatctgtttcatgggagtctagagatgatgggctgctgcgacctgggtgaggttgactgtgtctcagagctcctgtgttgaaatgcagtttccattgtgaggtattagagttcgggcctttgagagctaaatcaataagccaaaacaaacctcttgctttataaagtagcttgcctcaggtatgttgttatagaaataaaaaaaaaaaaaacagacaaaatatagatgccattaaatgaattgtgtttgcggatgttgctccaggactatctgtctgttgtaagaacaacaacaacaacaaaagtcttaattttcagaatgaagagaggagggggaggaggaagtggaggacaggaacacagcggtagagcacttgcgtagcatgtgcagggtcctggagtcaatccccagtattgaaaaacaaacaacaaaaacccttaaagtcaatctgaagtcttggaaaagatccaaaccgagatccgaggaaagagaaaacacatgacaggagccggcagaagaatcctgtgggaaagttacagtggcagaaacggccaaacggggaggctttagtcaggagaactgaagccccaaagcctgcttggcagctaagagtgcatactggtgggccctgaagacttggagtttggttctcagctagctggtccagcagtttgcacctacctggaaacccagctctgatgccctcttctggccttctcaggcactgcactcttcagcacatacccccacctaacacacacacacacacacacacacacacacacacacacacacatacacacacacaaacacacacttaagagctccaaagccggggctgtcgattcccagcaaccacatggtagctcacaaccatctgtaatgggatctgatgccctcttctggggtgtctgaagacagagatagtgtactcacatacatgaaatcaatcaatcaatcaatcaatcaaccaatcaatcaataattaatatatatacatatacatatacatatacatatacatatacatatatatatatatatatatatatatatatatatatataaagagctccaaagtcaaaacaccagtaactaaagcttttgcaaatccctcccctgaatcacacagtgtcgtttttattttctgatgtaagggagatggcagccctggaatgtacctatgagggactaccattttccagtgttgcaaggaccctggagtcccgttgaggcaatcctagtggggcaaataggtgttgctggttctgtgtagcgattccttagataagttgttttcttggacttttgctttccagtctaaagaggcagtagatctggaattgtatgactttgtgtatgtgtgcgtgtgcctgtgcgtgtgtgtgtgtgtgcatgtgcgtgcatatgcatgagcataacgcatgatgtgtggaagctagaaactgatgccagtcatcttcctcagtcactttcaccttgttattttggaacatggtttctcactgaacctgggattctgggattcagttagactatcatgtcagtgagccccaggatcctcctgcctctgtcttttcagcactagaattacataggtactgctgctctggctttgtgtgtgggtgctaagaatggacctcaggtaccaaaagggccagctcacttcttgttcaactgaaagctgccacaaaaagttaatccacagattggtcgtcaagagggtgctttgcatttcctcagcggtggagtcagctctcaactgcctgggcacaacccaccatgtgcatttatttgccagagagcagggcagtgaaaccctggcatggtatggttgattatttaagagtgccaagaatttctgcgtcctttcagactaaggttgaaaacgtggaaaggagctcgtggctgcccgaggtagttcctagaatagtgtgcttgtgtcccggtgtttatttgctcaagaggatctgctggggcagtggagtaaacggtcaaactgtgttttcggggcagagaacagaaggtaagttggaggaatgcttggtggaaggagctctccttcgggaacctcttgtaatggttttaaaaacctgctgtttgtggaaagactctgtgtccagggatagacattccagagtagatatggggccaggaactcatttcttacccacaagctggggagtcactttggaaggtcagcagggtgatgtgatcaattgttctagggagcttgctttgccaagaggagtggcacttccacaaatcctctcccccggtgagcaccggtgcatagaccctaggtttctgatgaggttctgttttatagaggtgcagaaaaaggactccagaagagtaagaagttaaggtgtcaatttgggagtggtggtacacccaggcgagtccaaccctggaaaggctaagaaggaagattgtgagtttgtgagttctaacccagcacaggctacatagtaaggcccgctctttcaaaacaaaacaaaacaaaacaaaaaaaaacaaaaacaaaacaaaacaaacaacaaacaaaatcaaggttaggatgtgttattttgccccctaaaaggacatcagttggaaactattaagtctattattctctttccctcccgccccctgtgtgtgcgtgtgtgcctgagtgtacaggtgtgcttgtatgtgtgcatatgtgttgaagccagtggacaactttaagggatgttccttagtagctttttatggagatgggatctctcaggaggcctgaggcttaccagtcagctaggctcacatttgggtgctgggaatcaaacttgggtctccatgcctgtgtgaaggcactttatcaactaagtcagctcctctggtccaagtctggtatattctgatacaaaatatttcactattatggtttcctagttgttattttcagtgattaatataattttttttccaatcatgctttaaaaatgattcgctttttggtctcttaattttctcctagattcaagctttttttatttatttttttatttattttttaatggaaccttgtctttagcgtttaggacaaaaaagccaattgtggaaaaaagtactagctgtcaatacggttcccttggtgggtcattgtttgtggaagaggggagagagactgtcacagtgtgtagccagctctctgatggacctcctattttgttccctgatggacacacgataattatacatatttgttagatacggtggggggcatttaagtgtatattattatataaggattaggtcagagtagttgtcgtatctatcacttcagagtcttcttatttctttgtgctgggagtgtgcaaaatcctcctacctgctgtggagaaatgcagagtttgtgcatctatcttgaatgcttaggtaagccccgcctcagagggttttctctcagctgcacacacagattttactcaagaccttgtagctcaaacccgtcaagtaggttttgaacttggactcagccaaagtgacatgccagtgcaagtccggctgccccccccccccttttatggtaaagaggattttaagtatcaagcctgttgatgtaagatgtctcctgtagtcaccctttcacccagtgtagcagcagatcagtgacatttaactttgtcaccatccatccatccatccattcatccacaggcagggtctcatgtttctcaagctggttttgaacttcctgtgtagccaagattgactgaactcctgatctcttacctcccgagtgcgaggaccccaggcagtgctaccttggctgcttttgtgcagttctgaggccggaacccagacgagcactctcccaacagagcctcatccctggctgtatttttttttaaggataagacatttaaaaaacaaaaaaaaaaaaaaaacgatgaaccaaactacgtaaaagctggataagtaacagtgttggcaaaccacactggaggtgcgaatgagagtaaagatggagacctctgatgctttatttaaaatgctgacgtttgtttgtctttatcctgggactcaggatagaacccagggctcagcgcatgcgagacaaaacaccccgcccccccatgccccgagccccagtatgtacattaatttgtatcatatgaagacacttatctacatgcttgcgtatcttcacagctcttggtgtgatcgccctcattctggccttgcctcacacgcttgcttatgtgctgcacaggccaaagaagctgctctataggggctttcagatccatggaggcaccataactgtgcaaaagggcagggggaaagagtggatgctgggtcggggaggtcgatggaaggtgggttgcagagagactcaagggccaagggacaaactgggacatagcagaaatggcaaggccctccgttggtgtgtttgtttgtttgttttgttgtttttgttttttgtttttgtctggacaatggagggaatagtgactcccacctcagtagactcggtgttgtgacaggccctagcacatgctggtttggtgccgatggtggtggtgaccttagccatgcagagttacagtaatttcctcacatacactgtctgcatgggacagagtccttgggtggtgacactgtctggtgtcactggtgacactgtctaaactgtgttttgcagatatccatgacggagatgggagctcaagcagcggccaccagagccttaagagcacagccaagtgggcatcctccctggagaatcttctggaagacccagaaggggtgcagagattcagggttcgccttttcattgttcattagagctgacacaataggaaaagttttgacgtctgtatgatgggagatggcggtgtggggaccagggcagtgtttaatactgactatcctggctacagactaagaaccattcatctgtcatggccgtcttggactcccactaagggacatggagcttatctctgttttccctgtagttagtggagaggagataagggtgatgggggggatgccttaccaaaatggggtttagagggaggggtttcagtgctggcaaggatgatctgggactttggggtaaaggtttgttctttccggtctcagagtctctttgaacgtatcactggtgagagaggttggatggtaactgacagagtgaagccggggaagcccaaaggagagctgatggacaggaacgagttaatgccaccaagaaatggcttttcctgccagcataagtcctgctgcccatggcgggtcacacgtgaaccccatactgaccctgcaacctggctttttaagtgatagggcaaggtgctgccggtcctcatggagaccccagggtgggaagtagagctgtgagcattgtctggatgccagtgaggtttgaacgcagctgtagagctgaccatgtgctgactcctcaaccagcagtcccaggaaagcacacctccaacttaaaatggtctccatcaccatgatttggacaggacttaatatgttttcttttcttttgtttaaaaaaaaaggggggggcctggctttggaggaatgcactttgtttaaacagtgtctggaaggggctgatatatcttccactttaatttactttttggtaatttattgtcagctcagaaatgcaagtagattcccgcttcatttttattgtgtcttgcaatgtcaaaaccattaaggtgaaatgcgtaagaaatacttgcttcaacattaaacacgttctttgtttttccgggtggagttttttttcaagggctgactaatccaggctcctccgtccactttcgccaagtcatcttctaaaggaaacgtatcttgtctcagtgttgaacacagtatgactccctctccccctttttatctacaggagtttctgaagaaggaattcagcgaagagaatgtcttgttttggctagcgtgtgaagatttcaagaaaacggaggacaggaagcaggtacctctctgccttctgttttcctgatggattttttccccctcattgctccacctcagacacctgttgcctagatttggggggtgcccagatcattctcactggtaccagactccagggaagatttaaatttttcaatgggtaccttgtgttgaccaaatattaatattttattttaaaaaagggcaagttagccattttaaaagagagctgtccaagaggccagcattcagaaggaacataaacatttttcatctgtagtttgtcattgtgtgggctactttctttataaataagtcacaagagtgtctgtctcctctgcatgacaccggtgttgtcaggtgtgagtcacaagattagtggacgtatgtgtggccctgaaagcccatggttcatcagacagactgccagtagctgataggcgttccctgtaaagagtttgtaactcctcccaggaggcgtttgtctttggtcagaggtggacttccgtctccatgcagccaacgaagggggttatgagacaggtgagctggatgggtttccgatgttaactccttgtctttccaaggcccgtgaaagagtgtgagttctggccaaggatgttggaagtgaggggaaggggttgagcagaggctgccctgccctgtttccagtgcctgcactgctcacagagggacccgagagccaggcttcctgtgctcagcatctgcctttgactcacttccaggaggccactaggcctcagctctaccacccttgtacttctgtccctggtacctgggggacccctcttcctatagagtcttctcctatgattagacattctgatccttcttttatcccttttcatgcttggnnnnnnnnnnnnnnnnnnnnnnnnnnnnnnnnnnnnnnnnnnnnnnnnnnnnnnnnnnnnnnnnnnnnnnnnnnnnnnnnnnnnnnnnnnnnnnnnnnnnnnnnnnnnnnnnnnnnnnnnnnnnnnnnnnnnnnnnnnnnnnnnnnnnnnnnnnnnnnnnnnnnnnnnnnnnnnnnnnnnnnnnnnnnnnnnnnnnnnnnnnnnnnnnnnnnnnnnnnnnnnnnnnnnnnnnnnnnnntattacaggcctgtgcctgtaattctaaagtgaagccacctaatttgtcaatatttgaactaactttagtttataacctttctttcttagttactgttctattgttgtgaagagacaccatgaccaaggcaacttttaaaagaagaaaagcattaaatgagggcttgcttacagtttcagagggttagtatatgatcatcgtggcagggagcatgatggcaggcctagagctggatctctctctctctctctctctctctctctctctcacacacacacacacacacacacacacacacacagacaggaaagagagaacaccatgagtagatatgaagctgctcttggcatgggcttttgaaacccacaacaaggccacacctcctaatccttcccgaacagttctaccaactgggaactaggcattcaaacaaatgagcttatggaggccactcttattcaaacccccatgcttgcctccaaacagagcatctccccacacagatgttgcttgctggctgtcaggtttggaggtactttttctaaaagctggaatccccagggccagcagccattttaatggcttgcatgtttgcagacaacagcctggaaaagtgcaccttgctgctctcttttaaggttctttaggatggagccgtctgtggccttcctcttcagagtgggcaagaagagcttctgaaatgggtttctctggcttgagtctccaaggctggtccagctcttctagggatgattgcatctctctgccattttctgcccaggggaagggacttagtgggggaagagtggaaagttgtaccagcattggacaggtaggattcaggggtaaggtcccctgggaaggagaacacaccacctctgtccccagcactgaagacaggcctgggagaagctcagctgtactctggccttgagcatctggtgtgaccagcatcacaccatgaacgtctagcccagagtcaggtggccacgcagacgtccttcatttgccttgttctttgaaggtcaggggtgggaaggacccacaagagaacaaatctatccttgtggctcagacaggaagtagagctcctgggcagagtggagcttaaacagtgctctggaggcacccagccatcttcctgcaccacagaccctgtgtgtctattcccctgaagtgcccagtccatgtagggtgccagggattgtgaaaagccccagagacacccacctcatggacagaccagaggagcttctttagagtacaaagctctgcgagcgactgtgatgcgtgtagatgtgggaagtgtggagcctgaggacactcgggcagtggaggtcactgaggtcgactgggaaatgagttgtagcctgaaaccagcaatggcggctgggagaagggaagcagtgattctagaagtaggaacagaactcgggaagagcagagagcagggtggaagggccctggtggctagagagctgctgggatgggtttgaagctaaggatagacgaggccaaatctgggaatgtgtgtgtcatggcaaggaggggactttgcaccctggccctggaacatccctataggaccttaatgttctatgtggcagaggtagtgttgggtggcactgccctgttggagtgatttcctgtttggaggtctagaatcagcagtccctctcttcacccccctgctcaacacctatcccagggcatctggaaggcttgtgtctgtgagtctggatcatactgagcagtgtaatgaatgctgtattgattctctgttccgtctaaggcacaaagatgcttgtctcaaactctccatctagctagactgccatcttatgagtttttctcactgctcttatcttctaagctccaacagaccaactcaccaagctttgcacactcagtagcttttatagcccaaagttgtaacctcaggcttcaccaaccacaccaagttcgggaaataatgactctgagactgaattatcatgaataattgcctaggccaaaagctagggcttgctaatcaaccagcttgtaagtcaggtgtcctgtttattccattctcagtcttgccatgtcggggttacctctcctctggttcatgcaacgtctccatcaccttttagggagaatccctcgttctcccgactctttcccagaaatcctttctccatcctggaacttcagtgtccctgtttcccgcctaagctcatacataggtcatcagcctttttttgggcaggtgaagctgccacacattgtacaaaagattccctctacacaaagttccaaggctttctacagtccttctcagaactacatggtcaggagtgtcatgggaagacttcactcctggaatcaatttctatgctagttagggtgactgtagctttaatgaaacaaaagcaacgtggacagcaaaggttttatttggtttacacttccacatcacaatctactcttgaaggaagtcaagacaggaactcaaacggggcaggaacctggaagcagaagctgatgcagaggccgtgaaggagcgctacttattgggttgctcagcatggctcttgtttttttttttttttttaaataggttttttttttgtattttttttatttattgattgattatattaagtacactgtagctgtcttcagacactccagaagagggaatcagatctcattatagatggttgtgagccaccatgtggttgctgggatttgaactccggaccttcggtttaatagtacccaggaccaccagcccaggagctgcagcacccataatagatgggctggtccttcccacatcaatcattaataagaaaactaaggctgtctatagcctaatcttatggaagcattttatcaatggaggattcctcctctcagatgattctaacatctgtcaagttgacataaaactagccagcacaatgctgccggggagggtggtgtcattggtgataccagcatgtctgggtcttggtctgggtcacagctttgagctttcacactgctatgtgtgatttgcaaggtcaacggcagccgatgttaggctactgcactttagttacataaacatgcagagccaacctctgggcccacaggctcaactggggccagcttctggggaggtaaaactaggcagtcagctctgagttactagtttccagaagtgggggaggaggcaggccctgcagaaggcacctaactgaatttcacaatcaaacttaccacatctgtcccaaagggagcgtgggaggctctatcgctatctgcagtcaattgaggcagctgtgagcctgatgcaaatcgggctttcaaacctctgctagtttaaggacaactggtcaattttttttctatgtctttctggcatgtgcacgtctgtgcttgcatgtgcacaagctcacacttgtgttgtgcatgtgtgcatgggcttttttgtatgtgtgtgagtacatgtatgaaagtgctcatagtacatgtctgaacacgcatgtggaggcctgaggccgacatgaagctatcattttccatcccccttccatttcagtcactgagacagggtctctcagtcaagcccagagcttattcatgtggctggtctcactagccagcttgcactgtctcccctttcccaggctgaaattgcaggtaaagccaccatacgtaatttctagggagccagactctgctgctcgctcactgtgtggcgctcactctgtggtgttggcttcacctccgagcctcacactcactgactctcactgactctcacctgagcctcacactcactgactctcacctgagcctcacgctcactgactctgagcatcttgtataacattcttctccatcttaggaaggtactttgtctttctgtctcgtatgcccatgagtccaggcatcgttgtctttcttcctctccatagtatccaaacatctagatctgtgccagggacacagtttgtttcttcccctgtgtgggatgatggtgtgccctccagttaggctggactctcaccttctgaaaccctggacatgacgatgggcctgtaagataggaatactttccagcttgctggggcttttcttcttagaagtctcaaaagatagagcagccccgagtcttgatcgtctcccactgtcgccctgtgactactgggcaaagcagggccatgacttaggaaggtctagcattgcacatatgaaacgaatgctggggactttgggaaacagggaaaatgacacttcctacctccggtcctcagactctcttgtttcttctaccttccttttgtcagcactcagcacattccatttctctgtggtttaaaacctttctctcatgtgcctttccctccctatgagttatcatgtgaggtattttagcttttagggtaattcgacatttatgccttataaaaccacagagacaggctggagagctggctcagcagttcaaagcccagtgctcttccagaggacttaaatttggttttcaggtggctcacaacctcctgtaactctagttacagggcatgtgatacctctggcttctgtgggtacccacatatatctgtacatctccctaacatatgtatattataaaaataaaaataaatcttaaagaacagagaaagctccaataaggtatttattttttagctaaccctgagttcatttgttcattcattcatttattcattcattcattcatccatcttctcatttctcattcacctcatgtacactgagcctgtttactatgtggcaagaattgaaaaggacttggcctcttgtacagatctttgcagaccacatcaagaatgggacagggaggtgggtggggtaggaactgctttcacagtgttcacagctctgagagcgctttaggccagcatttaaatatgatagtaccttgtattttagtagtatttaaagcttagagtcatgagagtctatggtattgattttggggggctggtggggctatattttacttactactacatctcataactgggtcgatttcttaagtgctttttaaaagagttgaaaatgttccttcaaagcagtttgtgctctgtgagtgagtgtattgcacaggaaaggcatattgccttcccgccccccccccccagctcccctccagagctcaggtgccatctagcgtgggtattatctttctgactacagcctgtggtatgaagttttaatccatttaatccattttcatcatgggagtggcagggtccacactgaaccttaggaacctgctgtgatcttggcccttgtgctcactgtcccatgcctctgcgtctccctttgtgagctgcaggatggaatttcagggtagaggcctggtggagcacagtcagtgttttaataaagcaccagctgcccctctcagcctccctccttccctccctcccttcctccctcctccctttcttctgctggagacaggatcttatgtggtggtggtggtggtgtgcaagacacgtatgtgggatcagcagagaatggcgggtgtctgggtctgtctctctccacctcattcccttgaaatggggactcttgctgaacctggagctcactgttctccagctaggctcactagacagnnnnnnnnnnnnnnnnnnnnnnnnnnnnnnnnnnnnnnnnnnnnnnnnnnnnnnnnnnnnnnnnnnnnnnnnnnnnnnnnnnnnnnnnnnnnnnnnnnnnnnnnnnnnnnnnnnnnnnnnnnnnnnnnnnnnnnnnnnnnnnnnnnnnnnnnnnnnnnnnnnnnnnnnnnnnnnnnnnnnnnnnnnnnnnnnnnnnnnnnnnnnnnnnnnnnnnnnnnnnnnnnnnnnnnnnnnnnnnnnnnnnnnnnnnnnnnnnnnnnnnnnnnnnnnnnnnnnnnnnnnnnnnnnnnnnnnnnnnnnttgagctcttaattgtaattttttttctttcctcccttttcatctcattggcttttggttcctacttttttttttttaaagacttattttatttattttatatatatgagtacacagtctgaagaagatgcaccagaagaggtcgtcagatcccattacagatgattgtgagccaccatgtggttgctgggaattgaactcaggacctctggaagagcagtccatgttcttaaccactgagctatctctccagcccctggttcctacatctatctatctatctatctatctatctatctatctatctatctatctatctatctatctctatctatctatctatctatctatctatctatctatctatctatctattttaaaagattccaacttatctttagatgctcttttggtcttttcttggttttctgttttgttttgttttgttttgttttgttttttttcctacaaacttcctagcctgcaatccggattgttcataaactggacacattttcctccacttgtcgggagggccttgctggtggtttgtatttagaactcatcttggcaacccccccccccccccccccggaggctcttgctttcattgctctggagcctcatcaatcaatcaatcaatcaatcaatcagtcaaccaatcaatcaatcaatcaatcaatttatttatttattttggagctgaggacccaggcactctactacctagctaacccccaaatctagtctttaacattattagatttactcatttattttctctgcgaatgttttgtgttcacctattcatgtgagtcacgtgtatgcttgctggctgtggaggtcagaagaggacatcagatctctccccaggaaccagaattacagatgattttgagccaccttgtgggtgatgggaattgaacctggaagagcaacaggtgctcttacttgctgactcatctttccagcgggaggagaggctttaaagaagatttatttatttgtattttatgtgtatgagtgtgtgcctgtatgtttgtgcatcatgtgcatgcctgctgctcatggaagccaagagaggatgtcaaatccctgaatagggcattaaaattagttgtgagcttccatgtagcattacagtgtatttttatttatgtgtgtggatttgtgtctatgagaccaatgctttgtgtgtgtgtccatggaggccagaagtgggcattgggtccctggagctcaagttccaagtgctgtgagccacccaacatgggtgctgggatccagattccagtcctgtgaaggagcaagaacactttttttttttttttggtagtggtggtgtggggtgatgagaaagccttaccatgtagccctggctgtcctaggactcactttgtagaccaggttggccttaaattcacaaagattgacctgcctttacttcccaagtgttggatttaaaggcatgtaccaccacacctggatattaggagactcttaactgcagaactatttaataaaaaatattttatttgtgcgagtgtgtgcgagtgtatgtctgtgtgtgtctgtgtatgtctgtgtgtgtgtgtgtgtgtctgtgtgtggtgtgtgtgtgtctgtgtgtgtgtgtgtgtgtgtgtgtgtgtgtgtgtggtgtgtgtgtgtgtgtgtggtgtgtgtgtgtgtgtctgtgtatgaatgcagatgtggctgtacaggtactgcaacacatgtgtggaaatcagagaacacgttgtgggagagacacactcacacacctcactaccacttgggaaaggctagggtaactcagttgctcagggttggggtgggcgctaagcacacagtttcccccctgtttacttccttcagcggaggtgcccagactcccaactcttcctggacatgtctcttccaccccttctccaggcttgtttgggtgcccaggcttgtccctcctgctactactccaattactctcctttttcctggcctagttctggaaggtatcttgtatcatttaaaacttttaaagttacatttatttcagtgcagtgtggaggtcagaggatagcttgtggaagtcagctctcaccatctaccacgtgggtcctgggggtaggtggggtcaaacgcaggtcaccaggcttggtaacaagtgcttttatctgctgcgctctcttacccacgcccttctatttatttgatgtccctgctccatcctctttatgaaacaaatatgcatgcagttcatatacagtcatgtcctatttttctgtgttttctcttgggtccacctctggtggaggagtgggatagagaggatagagaggatgatagggaggatagagaggatgatggagaggatagagaggatgatagagaggatagagaggatgatagagaggatagagaggatagagaggatgatagagaggatagaggtgctgatgggagatgtgttccagagtcaggcatgccgcaaatagggtgtgggccatatgcagagatgctgcagggacttgaagctccaccttcctagaggaaagactagaggagccctggacaggtgaccttcccttcttttgatgtctctgggactccctacctgtgttgccaatggtcagttgactcatgagccagtagcttaggagactgttaggctgcgtggtagttatatgagagtagttacagcatccggggcaggactcaaatttagggaatgtctaggacacaggccgtgctgaaggcgaacggcagaatctgaggctctcctggtgagggagcagggtgaaggaagaaggcaggtgttacccaggactggagccagagacccctggaggggcttagtaaccagaagccgccaggagcccccaggcaacatggcctagcctgtgggattcagctgagaggtggagagcagagcgggtgggaggagctcccgtctactcttgagctgtgtctgtagaaattgggagtgaggaggctgattgccacgaggaagtgaagtgaaagcttttatggtggctgagcatcagcgtgggccctaagtgtgtgtgtgtgtgtgtgtgtctgagagagagagagagagagagagagagagagagagaccacactgcaccttcctgagcactggacaactgatgactttgctgttctgagcagaccggtgtctggggctctgagcaaagtgaattcacttctcttaaacctgcgctggttgggagcagggtttcaggctgacttcctacccagtgtgggtgcaaaccaggcttcatagcacctgcaggaagggccctgacctgtgcctggaaggagccgagaccggatacatctatctgtctgtctcagggaagggagggctgtggtggaggcagtggctaggtgcatatgccagcactttcacacactcagaactgactccaccaagggagctagtctgttcttattcttacagcggcggcggcggctagaacagggttaacaaaactctggaaaattctaccagaatagctcaagcgagcagttcttcttttctgttcaagtctcggcctggacaccaggccttcccgtgactggcctgtggtcagctgtctcagggtttcccttttcggtcacacttcctatcctagcgcagataagcctgctcactcattctcctgtacccactgggtcagcccaggggcgcaccctgtcctcagtggctggggaaggacagctgattcgagagggctggttgatagtgccccctccccccacacctgcttcctctcccttgggccacctgcccccacatatggagcctcaagctgctcacttctgtgtctcattttcagaactcccccaagagagcctgagttcatgggagccatgtgtgtgcatgcgtgcatggcagaacagctgtgtggatgtcttaggaggggagacctgcagactgttgcacgcagttcgctcatctggccaactgaaattctactttcatgaagtaactttaaaacaggaagtgggtttccaaaaatgttcccttctgacagaatggggatggtggaagacactcatggctctgtggaactggtgggtctttgagagacatgaagttccaaactgctcttccggggcaggcctcatgatggtccccagaccttccccaggaatagtcgtatttatctcaagaggctcccatgtctttgagtttgacataaacgaattgctcctgcaggcaggaagaacagacacaaggctttgagcgctgtccccgctttgggcactgttcctatatcagcagagacagagtcaggcctcagcctcatagggtctttagctttctggtctctggcttgaaacgagcgcttttcttctctttaagcacggctaattgaaaacgtccagggatttccctaagagcagaagttttcagagccgggtgttctcccagtgaagttctgcaagtgtcctcttaggctgagagcctctctgggagaaaaaaagtgttatcttagggtctcctgacctcccccacctcctccacacacttcagctgtgtgaaaggcatctcttcattgccttgctctgtggggttggaggggggtctgaggcttgaggttcacacaggagctatctctgctgccacagatggccccattctcttcaagaagagggagggaagttctggtggagagtgctgagactgcagccctgcccaccacaactctgaagactttaaataaagctggcttctgccatcagggaaggtcatagccctgtcacggttcttaattgctcctaccatcaggccatgtcacggccctgccacagctctcagtgtaatgagactgcaggtgagtgaacatcttgtcagcccttgtctccaagattcccagtggggctgcgctggggacttttggcatacagtgagtgtttttctctgcatcacttacacttactgtgtgaaaacttcttccactggaagacagataagccatctatcctagagagctcagggtgccttgtgggaccagagtagggctgaagtttggagtcagacagtcttggtgtcacctgttctggccctggtcctcatcaggaaaccagcattaacaggggagaaagaccaagaggttaagggaagggaagcaggcttagcatgtccatggcacagcaggcgctggtggcaatgcatgtacatatgggtagtttcatgagactttatttgacctggtgaaacacacataattaaaaacctttggagtgtctccatggcaccgaatgtattcacaatgctgtgcaggcacgaccacttaccggatcccaaatcttctcaacactccaaagagaacccccatccatgcctctgccccaggcatttccaggaattcctagtcaaggaattgaaataaaggtgcacaaagactggaaagtagcaaggtaacggtgctggagagatggctcagtggttaggagcactgactgctcttccagaggtcctgggttcaattctcaacatggtggctcacaaccgtctgtagtggggatccgatgccctcttctggtgtgtctgaagacagtgacagtgtacatcaatcaatcaatcaatcaatcaatcaatcaatctttaaaaaaaaaaggagaagcagggaaagtattcaaaaacctagccaccctagtatagctcaaaagaaagacactgtcaagaggaacaacagaggccaggcatggtggcacaagaatttaatcccagcactcaggaagcagaggaaggtggatctctgtgagtgtgaggccagcctggtctccatagcgagttccaggacagccagagctacagagtgagaccctatcttaaaaacatacaatgactgacagcgggccacacgagtatgggtacacgcaggggccccagcttactgcctgagactactttgatggggttctgaggaaggagggggtgtttactaagggccatgccatgggtgactctctattttaactgacacgtctaagatagaaattttactgtgcatatgtcccttctcacaatgcatctgctttgaatcacctgcacactcagtggtacacaggtgtaagatggtaaatagagagatgctctctaaaaattcacttagaggacacagtttgtcttattgcccaaccacccaaaactagttcaggtcaggttggccccctaccagtgtacctcgttctgactggagtatgagtggacagaaacaagagcaagcttggtggctgttaagggaaggagacatttagtccactgttggcagtctgtgtagctggacactggcggggatcctaggtctctaggtgcagtgttaggagaggatgcatgtgcacacagcacctgcaggtgaaagtcctagattgccagtgcattgttggaagaaggctgtgtgcacatcccaagctgtgtgaagtcccaggctgctcagctgcccctgtgcttgcccagctcagctgcccctgtgtttgccctcttccttccctatccccagttctcccccgcccccccccccccccagtctcgagcaaccactaatctttctgttccagggcacctgcacattcctgtgaacagcatgataccgtatgcagcctcatgtagcttaacagtcccgaggctcatttaagttttagcattgaccagtgagtttcagtccgctgcaggacagggtaacatccccatgagctctgaactgggaggggtcgcatggtgaccccgggtcatgctggattgccactttcattgtttctgaacggtcagggtagcaattttgtttcagaagacttggcctcagaagctctattaggtgtgggggcaggccaggcgtttgtgggccttctcagggagcttggctccggaggctgcaatagctcccagctgcagctcttccagggccggttggagggtggagctggctttaggccaggaaaggctgtgctggtggataacagtccagcttctctgtctcctccagatgcaggaaaaggccaaggagatctacatgaccttcctgtccaataaggcctcttcacaagtcaacgtggaggggcagtctcggctcactgaaaagattctggaagagccacaccctctgatgttccaaaagctccaggaccaggtaatgtgacctccttgcctgtgccttaatctgaaaagccatccatgttctccccaggcctgggagaattcttcagggagctgctacattccccaggaagaacctcatcccgctgtgcaggccaaggctactgaggggctctcattgacgaaggctgaggaaccccaggttctgaacttggactatgttgactcttattctatgcaccgttcgaactactggggttcgtagccatttccacccagatgggatgggaggctgggtctgtctgagggatgcaggttacagcaacatggtgatcatgaaggaatggttggttagggagcctacagatagttacagggaatccaacactggctttgttaaaatgaacagactctctcactgccagtggcccaacgctgtaagtaaatttataatgtggtccctcagccataacaaccaagcgaaaattttgcagtctactccacttagaaccagaagaggtaagtttaacaacggacacgttaaagaggtaagccttaagttttctggcagaatgtcttatgaggaatattcaataaatgtcactagacaaaagggacatgacctgatattcagacctgaatttgtaaatgtgtgcgcacatctgcactcctgttaaatgtgagatgggctctgggtcaagcttgtgcctctgctgggaaggcaggctgaggctaagagactactcatgttgaggtaacgtggaacagctgttgaaggttctgggagtggctgtgaggattcagagtagcagcaaagctggaggtgcttttgttttgttgttgttggttttttttttttatttcctcttttattttttttatactttttattaggtatttttctcatttacatttccaatgctatcccaaaagtcccccataccctctcacccactccccttcccacccactcccccactttttggccctgacgttcccttgtactggggcatataaagtttgcaagtccaatgggcctctctttccagtgacggccgactaggccatcttttgatacatatgcagctagagtcaagagttccggggtactggttagttcataatgttctacctatagggttgcagatccctttagctccttgggtactttctctagctcctccattgggggccctgtgatccatccaatagctgactgtgagcatccacttctgtgtttgctaggccccggcctagtctcacaagagacagctatatctgggtcctttcagcaaaatcttgctagtatatgcaatggtgtcagcatttggaagctgattatgggatggaaccctggatatggcaggctctagatggtccatccttttgatacagctccaaactttgtctctgtaactccttccatgggtgttttgttcccaattctaagaaggggcaaagtgtccacactttagtcttcgctcttcttgagtttcatgtgtttagcaaattgtatcttatatcttgggtatcctaagtttttgggctaatatccacttatcagtgagtacatattgtgtgagttcctttgtgattgagttacctcactcaggatgataccctccaggtccatccatttgcctaggaatttcataaattcattctttttaatagctgagtagtactccattgtataaatgtaccacattttctgtatccattcctctgttgaggggcatctgggttctttccagcttctggctattataaataaggctgctatgaacatagtggagcatgtgtccttcttactggttggaacatcttctggatatatgcccaggagaggtattgcagaatcctctgatagtactatatccagttttctgaggaaccaccagactgatttccagagtggttgtacaagcttgcaatcccaccaacaatggaggagtgttcttctttctccacatcctcgccagcatctgctgtcacctgaatttttgatcttagccattctgactggtgtgaggtggaatctcagggttgttttgatttgcatttctctgatgattaaggatgctgaacattttttcaggtgcttctcagccattcggttttccttaggtgagaattcttcgtttagctctgagccccattttttaatggggttatttgatttttctggagtccaccttcttgagttctttatatatattggatattagtcccctatctgatttaggataggtaaagatcctttcccaatcttttggtggcctttttgtcttattgacggtgtcttttgctttgcagaagctttgcagtttcatgaggtcccatttgtcaattctcgatcttacagcacaagccattgctgttctattcaggaatttttcccctgtgcccatatcttcgagggttttccctactttctcctcaataagttttagtgtctctggttttatgtggagttccttaatccacttagatttgaccttagtacaaggagataggaatggatcaattcgcattcttccacatgataaccaccagttgtgccagcaccatttgttgaagatgctgtcttttttccactggatggtttagctcccttgtcgaagatcaagtgaccataggtgtgtgggttcatttctggttcttcaattctattccattggtctacttgtctgtcgctataccagtaccatacagtttttatcacaatttctctgtagtacagctttaggtcaggcatggtgattccaccagatgttcttttatccttgagaagagtttttgctatcctaggttttttgttattccagatgaatttgccgattgccctttctaattcgttgaagaattgaattggaattttgatggggattgcattgaatctgtagattgcttttggcaagatagccatttttactatattgatcctgccaatccatgagcatgggagatctttccatcttctgagatcttctataatttctttcttcagagacttaaagttcttatcatacagatctttcacttccttagttagagtcatgccaaggtattttatattatttgtgactattgagaagggtgttgtttcccaacatcaaagtaaatggtgagaagctggaagcaatcccactaaaatcagggactagacaaggctgcccactttctccctacctattcaacatagtacttgaagtcctagccagagcaattcgacaacaaaaggagatcaaggggatacaaattggaaaagatggagtcaaaatatcactttttgcagatgatatgttagtatatataagtgaccctaaaaattccaccagagaactcctaaacctgataaacagcttcggtgaagtagctggatataaaattaactcaaacaagtcaatggcctttctctacacaaagaagaaacaggctggaggtgcttttgtacggacactcaaagatcttcctcacttcctcactgcctgccccgaggcgaccattcacaccgaggcccactcccaagactaacttctcagaactgtaggccatacatggtacggaaacacttccctgtgttcttagggaaggctggctttgcagggctcaggctgtacaccgtggagactgtactgtctgtgtgttggctgagcttttgctttcgaggggggggctttttgatcaccgggttcatagaacctagaacagcttttctgaacctgtgggctaagacccctttggggatcgcaatcagatatcctgtatatcagatatttatgttatgatttataacagtagcaaaattacacttatgaagtagtaacggaataattttatagttgaaggtcaccacaacccggggaactgtatggaaaggtcgcaagccttaggaggttgagaactgctgggctacaggatgtcccagcatccaagaggccccatcttgctcctcatctgatagaaaataaaacacgagcatgagtactttaagaacagtttcgaaccgacacagcggggaatgtcgatcccacgtaaattctgagtaaaatgtgggggttgagggggctctgcctgggtctctggggagacatatcaagggccttatgccggagtgactgagtgataggcatagatttgggagagagaggaagaaagaaaaggcaattttttttttgagactgtagactcatgggcacatccgtctattttggccctcaggatcttctaaaaggctttcatggatgctttgaagtccctgcatctggtgttgagaggttggccagatactaggttctaggttctctgcagtaacattggccaatgcccagctgtcctgagaactgttgtctcacttggcatgtcttatcctggttttgttgaccacagaaacgcggctcaaggagtcgtggtggctccttagttaaagtcactcagaaaaaccatggacacactgtatcctttatagccttcatccatcttcctcctcaagagcagtttctctctgctgggcacaggccatgatacccttggggcagagggagtacagagatcacggagacactgacacttgctctgtggggttacagagaccaaggtgggaatgagctgagagagcctggtaggacttcacacagtggcttgcatgcagtgccaaagatccccacaagacatcaaaacagaggcatctgctatggtttgtacatagcctagacaagtgtctgctggggcggatggatggctggcacagaaaggagacagatacacagcaggcaggatgagggtttttgttttgtttgtttgttttttttttttttttttgagtgacaccgtagttgttattctgagacattgtctggcctcaaactccaactccattcctctgcctcccaaatgctgaggtcacaggtgtgtgccaccacacctggctgagtgacaaaagttttaaaaatacttttaatctacctggtagtaaaaggcgcttggaaacgaaaatctactgaaggcccgcccccgtgatttcacctggagatagccactagggcaacattccatctctgcctgcccatcttttgtgttctataaataccacgtgtgacccacactcatcaccaatgcggttcagagtttgactgtaaaggaagtgcttttatatcctgttgtgaagctctgttcagacagtcagacagacagacggggtgggggtgggggggagagagagagagagagagagagagagagagagagagagagagagagaaagagagagagagaaacagaaactgccctcctaaggtataggtgggtgaaggagaaaaatctgcaaccattggtctctctggagactggatgcagggactgttgtgatacacacagcatgtgctaaagatctatcaagtagtgttagctggtgtataacctacacatcttcccacaaggttcctctgtagatgacctaccctgacatagtaccgtgtctgtagttacatcgtatttcttaggaaactgtgacagggaagggaagctctgtatacggtcagcttttcccccctatggctgtgcaacacggctgacttatgcagtgcttgctggtctcctggaggtgggcgacatggtgaaggcacctggttttggcttcacgttggaaacctctgtctgtcaggggcttagacacaaaggggctcagcatcacctgcagtcctggctcccacaaagctcctctgagggccctgcttttttaagtgagggacgttaaattaatgagaaacaaggatggaggccccaagatttaaaaaaaaaagtttttgttcatttccttacttattttgtgtgtgcatgcatgcttgtgtgtgtgagtgtgtgtgtgtatgtgtgtgtgagtgtgggcatgtgtgcgtgtgtgtgatgtacctgtgtatgtgttgcatatagaggccagaggtcgacactgtgtgctttcctcaattgcttctcacctcattttttggaagagtctctctcattggcccagagctcatgggtttgaccagactgtctggccagggatctcctaccttgacttctccagagctgggttacagacatgtgtcattgtgccaaacttttatgtgggtgctgggaatcggaactcaggtcctcgcacttgtccagcagccactttgttgactgagcctacccgcaccctcccccatcccccagttctaagtccaaggtctcattgagcctcattcacagctccagcttcaccatgactaccaggtggcttatggtagacctacctgaataggctactaacttctgctttcggccgtcatcaccagaaaagctttggttggccagccactcataatgtggccttattctgctgtgctaggggaagctgatggggcagcagggcttttgtgggatgacgtagcgggagccaaaagcacagcaaacctccttgagctcagattagatggcctcacatccttacacccttaaaagagctccttaggttcttcactcaggttctgctaaccctccgtgtgtacactggtctagcaggttctttagttcagagcagatctgaagtgaagtaccaacagggggctggctggatggcagaaagcagggagggagagacaacggtactgaaacttaaccacagcacagtgatctggggctgaaacacgcggggcctatgttctcacacacggcagtataggcttctctgtacgacaggatgctaacttgattggtgagctaacaacactcccaagacatcaagcaaaaaccagagatggtcagtataaggagtgaagggtgccctgtgcgtgttagcaagcacgttagcaaaagcttatcgctcttatctaggaaggttcccccactccgccccctgtgaaataaggggagagatgatttcctgatttaatttgtaagttcggcttgtctgtatgcccagtggtgactcaggagaggtggaggttgtactgtgtgcatctcttgggcactgtagtctagagttggaggctgagctgcgcaggaagcaatgagggaggcaggagcaggaaggaaggtggctcctttcagtcacctcagtgacaatgctaagagctatttgtgctgcaaggaagccagctcctgtgcagccccaaggacagagataaacgctaagaagggaacacaagagccgagagatgagtgtagagcatcccggagggactcctagggctctctgggtccctaggacccagagaaaaacagaaggtgttgggagaggacacttgggaggcagggtgttccaggagaggctaatgtaaaggcaggcgctgctgtgtgtcaggaggttcagtgtccctactaagtgatccgtaggggagcttgttggatccttgggactgtggcgccagttttgaagtttagtgtgtttgtttgtttttgttttttgagacactctgtagaccaggctggcctggaactcagagatctgcctgcctctgccacccaagtgctggcatgtgccactattgcttggctaaagcttagctttttatcaggtaggtcggttgcactagtaggtttgatcttgaaagttgggccgcttgtccctgatgcccagccctggctatcctaccctttcctggctgggctagagagaacagatgactcagtgaggaaccacctcaatcagagggtcaacgttggccttggctttctaaccatgacttttcattggcccttggcctgagtgctagccctccaccccatccctgtctcagcctgtcacttcctggatgttggagtcatggttatgaccactgtgtggtaaattggctcttggcatcagaagagggaagttggggcttagagcctcatcctgcctcagaccccacatgggctgtttcttagtgtggccctaggttcaccccagctcccctgtttttctacacaggacctgagtctgagctttcctgcatcaccacggtccctctgtctaggctgtgcttggcaatcagatccagggtatagcccatctctggcttatgggtcccgctgacattcgcttccaaaggatcaaaggcagtctagaaatcagcagtttccagggaggtttcctcacatctatacggttggccaccttcagcaggatggggcacgaaggctgctctctgcagaactttcagagtgaccttatgacttaaagatagtgggaaggctgggaggggggtgtgaagaactgccagaaaaacactagactctgcgtcatggcagacattcagaacaatcgttgaactttgaactgactttcacagcctccagggaagactggatagcccacaccgagggagtagattttgtcttatgtggagggtctttttgactccatttctggccttggagttctgattccacccttggcacgttcaccatccctaatgggcctgtctatgaactaatgggcctgtctatgaactaaagtgctgtccagatcgacgaagcctttctagtggcccgctcgtgcttgagggcagggtcttcagtctctgcttgccactgtcccactgtctgctagctgcccttagacctcctgggtacgccccactccttcttcagaagacgtaggaggacctccactcacagggtgggcacagtagcttgccaaacccattaatcacctaagagctgtagggagaggtttccttttctctcagttctatattcacacagccagtaatcagttctgtaatctaggtataaggagagggagagaaagggggagggggagggagagagagagagagagagagagagagagagagagagagagagagagagagagatagagatgggggtggtggtggtctagaatggcaagtcagagaaatcctatgaccaaactttatgttacattgaaggattgaaaattttcctccttatgcgggtagaagtaacccagaaaagaagggaggtgggtatttcatttagttcttctaatgtacttgattgtgagtgatcaaatatttatcaagctgaaaatgcagtggctggaggcagtggattagcctggagtggccctcgttctgagaccgactgcttccagggatgtccttccgtccctccccaagcagcctggtgggcactgcaaaggtggttcccccccttgctgttccactgcagctctgtctggggtttgaggaagcacggtgggtgtttggatgatgtagggtccctgcactggaagcaaggtgcaggcagggcacagttgcgcaggcgcaggattcgccttccgctcttttcctcccagtccggtccgcagcaggggatcccaggcaaccggctaaacagtttatagtgtaggcatgcagatgtggagcctgcaaaccaggagccttgctatgctacatctgtcctggccaaaaaaagaaaaaaaaaaaaaaaaaagaagcaatcccggaagcagcccagctgcctactcacgattttctgctttgctgcctgctggagacaaatctcctcgtgctcaaaggcttcttcctcttcctccccctgagttgtttccattttctcctccttcctgcagatcacattgtttaggtccaggtcagctttgcctgctggaggcctggtcttatagaaccaactaagatctcagggccagctcctttcttcttgagttgaggctcgcacctaggccgtgcattgcaggtcttcagaactgtgaggggctcacgtccgtgcttctgttttagcagtttcctagtgggtcagtcccatacgttttcaaacagcaaacacttcttgcatatctaggagactaggaatctgaaaccagccatgggcagtcgggggtcctgatgaagggcctagaagaggaacttgccgtagttccagctcctggtcagttgcttgctcgtcacctttggaacttgtaggctgtgtccacgtcattcctgtctctgtcactgttgttacacagcttccttctttctaggtctctctgtgtgtcctgcctctttggatctgggtcccactaccctggagggtgatttcagcttgatatcaataggtctgtttctaaacaaagttgcattttgaggctctaggtagatatacatttttgaagacctacaaacttgcctcaagcctttagaacgattcctttccctctgatatatttgggatcatgggttaaaattcagtacattttgaaattaaatattcaatcgcttaattcttatgggcaagtttctatgtttaactctttgcaaatcttatttctctctgtttgtctgtctctctctctgtctctctctctgtctctctctgttttctcatgtagttgaaaggctgacctggagcatgtgtgtcccaggctggtcttgaacttgtgatcctcctgcctctccattccaagcactacccatcatgtagaccttttttttttttttcaaaaaaaaattttttttaacatttgcttatttattcgaggggcagggagcacacatgacatagcacatacactagagccagggcagcttgcaggagttggttctcgccttctaccacaagggatggcagtaacatatcatcaggctgccaggctgtgtgtcatgtgtctttaccatctgaaacctctcactggctcccagacctttaaaaaaatttttttattagatattttcttcatttacatttcaaatgctatcccaaaagtcccctataccctccccccaccccctgcaccctgctcccctacccactcactcccacttcttggccctggtgtttcccctgtactggggcatataaagtttgcaagaccaatgggccatcttctgctacatatgcagctagagacacgagctctggggggtactggttagttcatattgttgttccacctatagggttgcagaccccttcagctccttgggtatgttctctagctcagacctgatttttaatgactgcatagtgttctgccacacaagagtcatacagctggttaggtgtataggatggagaagcagcctgccgggcttggcctcctgtctgtcccttatgtccttctcctgccccacttcatacgtggagatcctcacttactgtacctggaatgtggctgtgtctggagacagggactaagaaaggataattacgttaaacaagctcatatgagtgggccctgatccaaagtgacaagtgtttttttttttttttttcagtagtgtatgtgtgttctgtgtgtatgtgtgcatatgtgtgggtgcatgtgtgttgtgtacgtgtatgaaagagacaatatgcatgtggtggtcagaggacacctctgaggagttgtctctctccgtccatgttttatgtgaattctggaaatcaagttctagttaccgggctcttacaacaactaccctcatccgaacttcacctgctgggccatcttgcgggcccttgatgtatgttctcgtaagacattcacagggatgaccttgtgacaccgagagacaccctggaagaagtcagtccgctggtagcttgacctcagaatctggcctctgaaactatgagggaaagttgtctgtggttctgttttgccagacagagcggggcagcccttgccattcagcaagcactagccacaggaccctgttttcctcctcagtgaaaccacagtccccagggccttgtgatagtgtcatgggagaatgctctatcggatgactggagtgtgtggtcacagacctctcagcgatgttggtcttcgcgtgaatgtctgcagaacacatgggaaacacatgccaggttcctccgtggcttttgcccagtggtggtcagtagctttggaaggattcatagtttctgcatgctctctgacaccttgttgtacatcacctacgaagggctagctctatgatggacattcccagggccgtacactcttacgctcatacctttgccagcagcggtgagaagctgctctctggatcccatgcagagccacagggctgtggacatccaggaagatgaagtcttcctgggcctgctgcccacagctgcttcccagtccctctggcacctagaggtgatgagagccagacatctggacaccacagcctaaggactttggggcaggctggatattttatacctgtacagcacagggaatggccctgtgcccttgataaactgtgtggtggggacagcaaaatgactcagtaggttgcaacacaaacttaagttggatccttggatcctgtggtggaagaagcgaactagctcccctctgacgtaggtacatgtgcacccatactcaggtctcctccacccaaacccacgataatgagacaaacacttcattgtgagttaccacgtgggtgctgggaattgaaactgggccctctgcaagagcgacaagtgctcttaattgctgagccgtctctccagcccataaataccttttaaaagaaaagtcaactagtttacatccaagagctgagttggcaagaggcaagaagagcctctggatgaaggctcccatctcccaatgaagcagcagtccagattcagtctcccacctccgcatgccctgggtgccccaatacagcccttctcttctctctgaggtgtgagcctcagcgtcacagaaggcaaacaggatactcctctcccactcacagacacttcagacgagaggccctacccctgctcctggtgctggttgggtttgccacggacctgaggaagtacgcaaggggggcagggcggtatataggctgcatagggacctggaggaagtggtggtggtaggggggacaggacaggactacttgccaggaaaggccttcatagagttggctctgctagtcacacctggagcatttgttctggattctgagccaggtaggcacaggtaagagccccttgggggtccatgcacttgaaagactgaaggatgcctgatggtgaagggcggtgatacctgcttaggacatttgtgagaagcctagcgaggagaatggtgtctcttatccttaccctcctcaccctgctgctgatatatatatattaattatatatatatatatatatatatatatattgaggtgttatgttttgttaaaaagtgatgtgtccaagccttagtaagttatgctcacctcttaaagattacaaaattaatacaaaataggtaacttccccagagcttgggtgagacaggactgtctctaggggcctggtgggcacaggggaatggcaggctccgattgaacagtctatgcgcagcccgatgcgccagatgtttcctgggccctcttgggagcatggaggcgaaggaaagaagcttctattctttctggaggaacctcccatctcctgagcagacatcccaaggccccagctcatgtgtgtgttgggagaaagcatgtttaaaagatgtcaagattttaccacctacgtgacaaccctgcctgacagtgagtggcatcttggagtttttcactcagcaagccatgagctgtgctgcactggaaggcaccctggtgtgccttgtggccctttaatatgaaggaaagacagacagagacagagatggtgacatagagagagacttgactatgtcttgaaaagacgattctatacatcaggaggaaatgtgcccttccttccttccttccttccttccttccttccttccttccttccttccttccttctccatgttgtagggtgaggaagcaggcaggagtggatctgggatccaggggatgtggcccaaagacaggaggcttctgtgtgagacagtccttggagtatgtgccagcaggtgcagctctctctagtcccaagggctccatcgggtcccattcagccccgatgtacctcagaatcactgctttctagagatctcaacctgtctgacggtgcaggggtctctgctgctgacttccattctctgtagctgagacctggtcccgcggcttctaacagagactgcgtgtatccctcccttgcattagacacacccccttttgtctcttggcctggtaacaggtttgaggtctccaataccaaatttactgggtttatttatttattctcaagacaaggttcctctctgtagtcctggctgccccagaatttgctctgtagaccaggctggcctctatctcactagatttgtctgactaggtctaaataataggtttttaaaagatttcttttttgagacaaggtctcatgtaactcaggctggactcacactcactatgtagctgaggctgaactcctgagtgctggaattactggcaagtgccacaatacccagccagagaaggttctttaagggctgtttgaggcaaaagtatgactcaggtatgtgggcatctatttctgtgggaaaaaagggatgtatttgtacatatgattctctaatctataacgtccattgagatgatgtacgtaatgatcaataacgtacaggaagtctgccttgcccagtacagccctacgccaagtgttgttcttgttcttctctttattgttatcatctgtgtgtgcacacatgatgtgtctgtcattgtgggcaggtgcatgccgtggcatgtgggcggaaggtggagggcaacttttggaagtcagtgctctctctttctactgcgggttctggggatccaactcatgtcatcaggcttgtgtagcaagtgtttttacttgctgagccgtctcttgggtcctacactagcatggactagtgtgtgtgcgcgtgcgcctgtgtatgtgtgtgtgcatgcatgtgcatgtgtgtgcatgcatgtgtgtgcgtgtgttattctttggctcatggtaggtatttgacagggtgatttatggtctgtgttggtgtcgaccatcagactcttctctttcctctttagatcttcaatctcatgaagtatgacagctacagccgcttcttgaagtctgacttgtttctgaaacccaagcgaactgaggaagaggaagaagagcccccggatgctcagaccgcagctaagcgagcctccagaatttacaacacataagctgagcccttcaccccagcgaaggagagggatggactcttaggactgtacaggctgtcatttctttgttgtgtttgaggactggagtgtgctagaccttccctctggatatgtgtattttattaactgaacagcaacctctgcatgatgctaatcttccattaaaaacaaaagtagctttaaagtgtcagttcacaaaaacacatgagattctgccaatactggacactcagcctttcaatcctgattaaagtgttcgtgaagctacaagtgaaccctttagtcatttctactttgtaagcctttatcctgcccttcctgcctgggctgtgtctgtccacagaccctcttggctaatgatccaaagcacaagttggtctgacaatcacaggggtagcgggcattgtttgtggtttatttgggggttaaatagttctcgagagaagttcagtactggccaaagcaaacctctggcagcggctaatgatctagggggttgaatgaccacgttagcaaaaggctgttatttctcacgtgggcatcctgggcccttaatctgtgacatttcaggccacacacatttaaacatcatctctacagaaacactgtcccagccagggagagatcaaaagagaaattgttcagggatgatggctgttccaggtggtgtcctctgggacctcagcacaagatgtgtgctgaagttgacgttgatgggatggtcacccttcccttcatccacctgcacgtccttctccagctttctccatttgaggaacccgctgagaacgaccagtgggttccagccaccctagaccacccactcttcttttacagtggatcctattaagatcccagatcaggctcagctctctagtgtccacaccactggcagggcttaacactactgctagactgtccccagcatgcttgttagctctcatttgtaccacaaaaccaccagtcttccttgcttattggcctcttgactcaggctctgtcatctgcaacatctcctgccagttgaggtaacaatatggcttatcacttaaaccaggacacttgagagacaaggtgaggtacattttaaaattataatggtcaggcatgtcgtcagcccggctcttgggaggcaaaggtcggtggatcttggtgagttcaaggccagcctggtctacatataaagttcaggctagccagggatacatattgagaacctgtttcacaaagtaatcagaagagatagttcagtggtttaaaacatttgctgcttttccaaaggacctgggttccattcacaacatccataatgtagctcacaactgtttataattccggttgcaagggatctaatgccctcttctggcctctgtgggaactgcaggcgcatggagcacatgatatcaaagtaggcaaaacactcatacgtataaaataaaaataaatctctaaaaataaaagataaatattcaaataatacaaaaacccaaaggaaataaacattcaaataatatacaaataatagatatgaaaacctgcaaaactccaaaggaattatggtggcccaatgtctctggtaagccattaacagtatgccttgattaagaccctctggtacctcttgtgtaccctgtctggactccatagtctgttggtccgttggatgcttcctctcctttcctcttggtcctggaggaggaatggcctttggggagctattccctggtgaggatggagaagccactgaacatctgctggtaaccacaagcccaggccgttacacatccctcaggcacatgcctcctgtgggtgtctctctccccatctcaggaacctgggactgaggggagatactgagagtgacacctgagggccctgctaccagagccatctggttaccataagcggaggagaccagtacatcataaaatgcgaaagctaacgatgcggtctggccaaggacgtgcaggtggaccctctgtgtcaccgagggtgcaggccagcatggttcagaaagcccaccataggcagagaccagagcagctggaggtctcacactgacctttctccttgcaccactgggttcagaggctattttagaagacactaacgggagtaagaggcatataactatataagggagccagcaggtgtccgtatgaagaaaaagaaaaagcaccttccctcgtgtcctctctcctcacttccagactaccagaatttacagcaaaactgggtacacacagaactttgtacctgatgaagcagctgcaatgagactgaaaggtaggggatccatgcagccaaatagatgcttctatctaaccccccacttttatttttatgtttgtctgttcagtccattcctcctcacaccgccacccacccttcatctatccatccaacatccatccactcacccactcatcattcctccatttactcatccaacatctatctattcatccatccatccatccgtccatccatccatccgtccatccactcactagtatttaaactaggtcagcagtgtgctggggatcattagatgctaatattgaaggggacaggtgataaacaaatgtgacaattcacaccgctttgaaatctatagatgtagttcttcttattattaagatctagcgcggccaacaagccagaagacagttactattggagagatttggttgctcacagttcctaagaggagggtgtacagtcaaggctgcaccagggtgccatcaagaggcaggacaaggagggttggggaaggagcctttgtcgtcattccttgggtaggacaagcaaggccaggatgtttgggattggccaatctgcatattttcactaggatcctggatatgattgtccccagttatcttgtacctggccatgaggcgatgagggtgggtggccagtagcccagcatgagagagcacgacacaggtggtttagtgtagttggtaggcaccaacatggttggtttgtgtatgaaggatgcagtccagtagcttatggcctagaaactggccagctctgggaggagcagcctcaggtcatcaaggtcgcagatatcacagcagcagaatcaaaagacatgcttagtacaacggtctccagagacctctgcactcagcctgcaggccatgggtccatcttgctgtctttgcctgggcatctgtttaaactcttgctacgctgatgccgcaggcagggaacggcatcatctcttgtggctctcaggctctctctattccctgctgcgttgtctcaggccactcacaagtgcctgtcacctgcttgttcccagtgtacacccccatttccatttcccacctgtagagagcaccatcggggaacattttcctcttcctttatggccactcagcctggctttctgagagcaagccctccctgaggcttctgtactgtcttctctttagtgttaaaattgtgtgtgtgtgcgtgtgcgtgtgcgtgtgcgcgtgcgcgtgcgagagagagagagagagagcacatgatagcacatatatgtagatcagaggacagcttgcaaacggtggttcctgcctctcaccatatgagacccaggaattgagctcaggtgttgtcaggcttgcaggaagcgcccttacctgtggagcgatctcccgctcctgctgtggctttcccactgtagactcctttctattggtgacccgaaccactggagcttccttctcttagcctcctccccaaagagatttggggtgagaacaccaagtggaatggcaaatccttacaaatacatgcttgtaaggggcagaacctgggggtgaagccacgcctgtcttctgacccagcttcctttcggcctatcccctcatggaacagaacctttgcaaggctgggctggggtgaatgctggcttttggcaagaatgctcatttctcccccaacaggaatttaatgaacacctactacatacatcctgggccaaataatgggtacaacgagaatgccatgggagaaaatagtggaaacagctggtcaggtggtgatgcaactggccccaaagatgatggggcatgactggccaattgtactccaccctgagacccataggctcggttgtactgggggtgtgaaggggagatgcagagcttcggatggataatggtgggtgagctctgttctcggggtgagcctctcatttcagcctcagatgaggaagagcaaagggtccccccagagctgtgccgacagggacagggacatgcatcctgtcacgtgtcacagagtttgaagctgattaactgatagccagctcccaggctccactctgccatgcggggaacactttgtttatccgctttgcaaactgttaggcgagcacagagcacagtccggattcacatccgctactatttactttcatttggcctgcggatggtcacttaagtgctgcatggtctcagaccattagctttcagggggttcatttttaattgtctctctgtccgaggcggtcagcactgcaaagaggccaatggctagcgagggcacagagaaagaaactcggatgctgaggtgggccctaacccttgaggagatactgtggcctctcctaggaagcccaccaaagtcacgtggaaagctctgggtccctcttgtgggagcctctggatgagggctgtgtaggtggtaactgggctggacactggactggaggggtggtgtcccaaggctgcggccaccgagaaaggcagccgttttcagattctcacaaagccaaaggatggaggcagctgggtaaccaagacttcctgcctgcctcacctcaacatgtggcatgttgtggagtcatccccagtgtttggttttgttttctttcttggtacacgcttgtgtgttcacgtctgtatgcatatgtggaggcatgcattaccacgcagaggtcagggtgcagtgtggcctcagttgctccctatcttgtcattttttgttcctgctttctcaggtctagggttacaggcatagtcactatgtctggcattgatggggtgctggggatccgaacttgggtcttcatgcttggacagcccaagccttctagactcctcttccagatccactgtgctataccatgcttccgtctccattggcacagtgtcctgatcaagcagccttgttccagatcagtggctgctctagcttccccgaacccccatttggcccagcatctgttagaagcacaacaaatggtcagatgtgctcaccctgtttgagtctctttcacgttcttcttcttcctccctcttcccccttcccctccccctcccccctcctccttctcctcctcctcagagtgaaaatttagggcacaactgtggccttagggctgcaagatcagagagttcacttgtactttgcctcctgcaatccccagggctcatccttccaagcctcctggaccttgtgtcagatctgcaagcaggcactacatgctacttttggctacctttgcatgatgccctcctttgcttgagggtagccacctcttgaccttggaccatttcttcccacgcatcaagcctcaggctaactgcaagcccctgggagacccttggatcaccccctttgggcttctccaggctttcttttactttgtccagttctgtctccccaggggcaggggccaggtctgtttcctagtgaacgcagtggtcagctcactgttggtgacactgtgtgacattgtgtgacaccggtcatagagaacattccctgggttgagtgtatgaatgcagaaacagcttggatctgaaaagttcaattgatctcgtttatagcccatgccattggcataacagtgcagaccagaggatcagagggtcacacctccaccctctcctctcacatcacagtcgacaccacaccacagcagctgtgattctcctgggctctgtggggaactgatcttcggggttgcagaaaccttcacaattgctgaaaccttcacaggtccttagagctgtacccaggggcaccagaaccagaattaggtcttcaagacctggcaattcaagacctttccttgcaccaaactgggccagcctccagctccagcaaagctccgggctatttatttctatttagaaaacatgtctctggaagctgcagagatggctcaggctcacttgccctgcaagcatgagaacctgagtccagtccccagaactcacaccaaaaagccaggtggcagtgcacacttgtcatagaatgccagggagatggggaagtgaatttctggggctcaccggccagctagtcctagcctacctggtgaattctaagccagcgaaagaccccatgggaaaaaatatggtggatggcacctgaagaaacgatgtccaaagatgacctctggcctccacacacatgttcacacatgtatacacatgaaaaagaaaatgtgtcctggttctctggcttccacacgtgtacacacacacacacacacacacacacacacacacacacacacgaaaatggaaatgtgtcctgtttcacaagagagaggctgcaggacagtcagtcttggtcctatcttccttttggtctgcgaggcacgtagagggagcccggtcgctgcccaggggcagagcccctgccacttccaaaagtctagtttcgtgtttacaaacagtgggtttttttttccccttagtgatatatagtgaatgccttcccatgccaataaacataattacacactattcccccaaagtcttgtttggagattagatagaagataaatgtttcccttgtgctaattctagctcagtttgtattactgttttgcaacgtaggcaaactgttttcttcttatttaagcatcgaaaccctgttttttaaactgttatggcatacaaatcgcctcggagtaacagatgtctgctggatagagttgtttcccaggaaaataaccggctgctctatggtctccagaggaagggtggccgtgcaaaatgcgtgtcatgtggtccatttgtcaccccctccccctccaaagaccgaggggacaatgatgtgccgcggccatcttctagctgtctgcatttacagatggagacagaagacagaggcaagaatctggcattgcctgtccctccctcctggagaacaggcatttcttcaatttcctaggtgagcagggtcatgacaatgagacatcaaactgtgtgtatacttttactacgttggcaaatttccccagaatcttagtaggtaataatctatcgaattttattatcagcatcaccctgtcatcatcatgatcatcaccagcatcattatcaccaccaacctcctcctactccaccaccaccaccacctcatcatcatcaccaccagcattattgccgatgtcatgatccctttaatacggagaattctggtgatgtgaggattctggttcatccacgctgtgatgttccactgcctaaagcctgaccccgagctctatcactttctagctagccgtgtggcctcaggtgagtcacatatccttataagcctgtttcttctcttgttaggtggttctaccatgggagcctatgctttagtctgtttaggctcctataacaaaacacccgaggctggttgttagacaacacaaactgccatctagaggctggaagtcaagatcagggtgctgcaggtaagctagcagctgctcataaggacgcctcctttctgtgctcccgtatgctgacggagcaagcacactcccgcacaccccttttgtaagggcactgattccgttaaatcagaacccccaagacttaagttccaaaggctacccctctggatcagatcacgttggagctccaacacatgacttttgggggaacacaaggtttcaggttccagcactgcataagactcataagagagtgcatgtcatgtacaaagcatggtgcctggtacatggagggttaataaatactagtgccctggggagcgagcggtgcagctacagaggctatctggtctgtccgaggtcacaaaggaagaacagagtttccttgtctgagttctagactgagtctcttttcacggtcacctgcccagccctaacacaagctctgcctggtgttgtttgagtggccacaggaagcaagccaaggccagagctgggtctagatatcattcaaatgattaggatcccaatcttcagagcaggatctgctgaggcccagaggatggccagccaaggagagagtagggacgaaagagggagaacacacacacacacacacacacacacacacacacacacacacacacacaggcacacgagaagattgcagaatatccctgcaatttgcagctctacctcacagggtgatagtgagccacggagggagagagccacttagctcctggcaaagaaagtttttgctgagagaagaccttcccagaccctggtcaccattctgggtggattcttttatatcagaggatgccccaagaggcccttgtcccaggtctggttgtgaaggctcttgtactaattaatcttcaaagacctgccaggttcgtgccaaatgaccagggccactgacctggcaaccaaatatgggctacagaggctaagcctcagtctataagatgaccatctgtaactctcctggtcctcaggcccagggctacctgagcaggaagaagaggctcaaggcacttcctagtgtgcacagatttcatctcctgctttggggtctgccactctgaaagccaacacatattcctaagaggccatcagcggatgctcatttccttaatgctgatttgttttgtttcctttcgttttaatgcatggaagcaatgttttgtgggattttcttgttgctttttggccctgggtcttacagatgtagcccaggctggccttgaactcatgacaattctccggctttagtctcccagctgctcacaagtgagatcacaagcgtgtatcccatactcagcagcagcgttgtctcaatgcaagtcgaactgaacctaaaaaaacagaaagatttttttaaaaaatttatttcacaataaacagcctaagcctaagtacattaacaaagatcaagaaatgactagctgggtacacagaagcttaaaggtttaaaatggttgagatattaaactttcctcttactcattactcgacccgtaaaataaacacttaaattcttatcttgagccaaagatatgactcagcaagtaagggtgcttgccgccatgctgacgacccgagtcggacccccaggtctcacacggtggaaggagagaagctacactctgacccccacacgggtgtcatggcactgtgacctggccacacccagacatacaggtgcacacacaataaatgaagtaataaaatttaaatcttcactttgctttgggcgtttattctaaactgtagtcattatttcttaaacgtcagagacaaggggctaaaatttaattctttctactcatgctggctggagtaattttctcgaacagatgaattatctaaaaaacgtttcagaactcacaaccagattgataccgccagctaatttcctgtttcatatcctctttttttattattacagcattttaattatacagactaatggattttaattataccgactaatagatttcactgtgacaatttcatacataaatgtaacatactttttgggttgcgtttctttttaatcacagcaacatgatgaaaagaaaatccaacttttcaaagatctgactccgtctaaaggaatgtagggctaatgccagtgacgggatggacttgccaggagagcaagggcaagaagaagcaggcgctgagcaagctgcctccttccctgccctttatccaggctgccagcagaaggtgtggccaggttaaaggcggatcctcccatctcaaaagagctgggttagaggtcgatttttccaccccaaaatccagatcaaaagcgggccttcccacttcaaatgatttaattaagaaaaaatatatacatacctcacgggcgtaccagctgcttgggttttagttaattccagatgcagtcaagttgacaatcaagacgagtcctcaaagatccactgtctctgtcttggtcaggaggccagtgcccaggtcctggtcccttcctgtaaacataccgaaacacttgtgggaaacactggtgggcctcttcttgtgggaaaagaagaagccattagaatgccaa

SEQ ID NO: 2049 - DNA, 876 bp, Mus musculus
cctcttcgggcttagccgccgcgctgcccggctgctccgtcctctggacgcccgcggcgatgttcacccgcgccgtgagccgactgagcaggaagcggccgccgtctgatatccatgacggagatgggagctcaagcagcggccaccagagccttaagagcacagccaagtgggcatcctccctggagaatcttctggaagacccagaaggggtgcagagattcagggagtttctgaagaaggaattcagcgaagagaatgtcttgttttggctagcgtgtgaagatttcaagaaaacggaggacaggaagcagatgcaggaaaaggccaaggagatctacatgaccttcctgtccaataaggcctcttcacaagtcaacgtggaggggcagtctcggctcactgaaaagattctggaagagccacaccctctgatgttccaaaagctccaggaccagatcttcaatctcatgaagtatgacagctacagccgcttcttgaagtctgacttgtttctgaaacccaagcgaactgaggaagaggaagaagagcccccggatgctcagaccgcagctaagcgagcctccagaatttacaacacataagctgagcccttcaccccagcgaaggagagggatggactcttaggactgtacaggctgtcatttctttgttgtgtttgaggactggagtgtgctagaccttccctctggatatgtgtattttattaactgaacagcaacctctgcatgatgctaatcttccattaaaaacaaaagtagctttaaagtgtcagttcacaaaaacacatgagattctgccaatactggacactcagcctttcaatcctgattaaagtgttcgtgaagctacaag

SEQ ID NO: 2050 - protein, 198 aa, Mus musculus
SSGLAAALPGCSVLWTPAAMFTRAVSRLSRKRPPSDIHDGDGSSSSGHQSLKSTAKWASSLENLLEDPEGVQRFREFLKKEFSEENVLFWLACEDFKKTEDRKQMQEKAKEIYMTFLSNKASSQVNVEGQSRLTEKIEPHPLMFQKLQDQIFNLMKYDSYSRFLKSDLFLKPKRTEEEEEEPPDAQTAAKRASRIYNT

SEQ ID NO: 2051 - DNA, 63118 bp, Homo sapiens
  misc_feature (1)...(63118): n = A, C, G or T/U
atggcgaaaccctgtctcttaaaaatacaaaaattagctgggccgggcacgatcgcttacgcttgtaatcccagcactttgggaggtcaaggcagacggatcacttgaggtcaggagtttgagaccagcctggccaacatggtgaaaccccgtctctactaaaaacagaaaaattagccgggcatggtggcgcacacctataatcctagctactcgggaggctgaggcaggagaatcgcttgaaccagggaggcgagattgcagtgagccaagatcatgccactgcactccagcctgggtgacagagtgagaccccgtctcaagaaaaaaaaaaaaaaaaagcaactagctgggcatggtggcatatgcctgtaatcccagctactcaggatgctgaggcaggagaattgcttgaacctgggaggtggagtttgcagtgagctgagattgagccactggcactgcaccccagcctgggtgacagaacgagactctgtctcaaaaaaacaaaaagaaatccatcctttctatcactcccctacccctactccctattctcccccaaacaaccactgatctgtttctgttactatagtttagtttgcattttctagaattttacataaatgaaatcatacagtatatatcttttttggtctgttttttttttcattgagagtaattattttgatatttacctatgtttttgaatgtgtcaataattcattcttttgtatgtttataccacaatttgtttatccatgcagctgctgacagacattgggttgtttccaggttatgacaactaaagctggcatgaacactcatgtaagagtttttgtatggacacgttttcacttttcttgggttaaatacctaagagtggaatgtttggatgatatgataggtatgtatttaactttttaagaaacttccaagtcacctttgagagtggctgtaccatttagtattcccaccaccaatgtgctctttctgagtttttttttggaaattgtctttgttttgaaattttatgcaggtgtaccttgttgtaggtctcacattgtgcccgttatggactctttgcttttggagatgaattttcttcagtgtgggaaattttcattcattctttttttttttttttaagagatggagtcttgatatgttgcccaggctggagtgctatgactattcataggtgagatcacagcacactacagcctcaaactcctgagcttaagcagtccagctgccccagcctcctgagtagctgggactacaggtcacaccaccatgcccatctcagtctgggcaattttcttgaattatatctttaattttctctctaacattttctctgtaatgtctttctggaactcctattacttggattgattctccaatctttctttctttctctcctgttgtacatttcttcatctgctctaatcttcaggagatttcttcacctttatcttcaaactcctttattgaaatgttttgtttctacttcatttttatattccaatctttcttcttttatgaatggatgaaatagcttctctctctccctctctgagctagttatagtattttaaaagattcatgcctattctctcttgtctttcgcctgaattcctattttctatttctctctgtctctctcattagagacgttccttaaatgtctgtggtctttgcatagtcctcatccttgagaaggaggtgtccaaagctctttggaactgtgtgtgtgaaagaggcatgtggattgtgtatgtctgtgtagttggccagtgctaactctggagaacgttaaatgttaatttccattgttttgttttgttttttgttttggagagagtaaatttttctagtacatctggctgctggggaaggggctgaggaagaagggcctcccaatcctgtgtacagatctaggcttaacactctctttgatgcccacagctcatctgcacctttagctcagccagtagttcataagtccagagcttctgtacttcactatttcccaagatcattatttcctaaggtaggtggcaggggaactgaagtctccttatatagacttctatcaatctccccttttcagtccttgcctgtcctcttctctgtggtctgtgcctttgggtcaggagctcctctgaggctctgcagggtgaattggcttgttctaactggcacgccctgcctgcatttaggttgtagctccttcctcttgttaagtgtttctgcttctccatctcctttctgattggctgaaatctctctcccattgttgtctcctttttcttttctttctttcctcccttccttccttccttcctcccttcctcccttcctcccttccttccttccttctttcttttctttctttttttttttttgagatagcgtttcactcttgttgcccaggctggagtgcaatggcacaatctcggcccaccgcaacctccgcctcccaggatcaagcgattctcctgcctcagcctcccgagtagctgggattacaggcatgtgccgccacgcccggctgcagacatagacaagcaagctggatgcttgcacgggtgaatgccggcagaaaaaaagctacttgggactaggcatgttcagaatggcggctccatcttcccttgtctttgccagccacatgtgtataaggagcagacaagatgtcaccagtcaagtggaaaactcatttgtgtaataagattagggtggggtggccagccttccctgggcgctttgtaaacgtcacatctgatctaaccaatctgtgggccctatgtaaatcattcaccgccttctcaagcctgcctataaaatccagtgaaccccaccactgttggtctttcctttcggaagcccctctctctccctagagagagaactgttctcctttctcttactcctgcgtattaaactttctgctccttagccccacaccctccaaaaaaggtgggagtcctgagatgggaaaagggtatttgatatgaactctggatgataacgatgtgtcattgtaggttccttgattgcacaaaggtacctctctggtgtgggaggtcatatgctataagaggctatgcgtgtctggggcaggaggcatgtggaactctactttctgttcaattttgctgtgaacctaaaattgctctaaaaataaaatttacttttgccaggtgcagtggcttacgtaatcccagccctctgggaggccgaggtgggcagatcacgagatcaggagatggagaccagcctggccaacatggtgaaatcccatctctattaaaatacaaaaatttagccaggtgtggtggcacgcaactgtagtcccagctacttgggaggctgaggcaggggaattgcttgaacctgggagatggaggttgcagtaagccaagattgtgccactgcattccagcctggcgacagagtgagacttggtctcaaaaaaataaaaataaaataataatataataaagtttactttaaaaaaaattgtattaaaaaaacctagccagctagacgtggtggctcaagcctataatcccaaccctttgggaggcctaggaggacggatcacctgaggtcgggagtttgagaccagcctgaccaacatggagaaaccctgtctttactaaaaaatacaaaattagccaggcgtggtgccgcatgcctgtaatcccagctactcgggaggctgaggcaggggaatcgcttgaacccgggaggcagaggttgcgatgggccgagattgcaccattgcagcactccagcctgggcaacaagagcgaaactctgtctcaaaaaaaaataataataataaaaaacttaaaaaaattagccatgcatagtggcatgtgcctgtagtcccagctacttagaaggctaaggagggaggatcacttgaacccagaaattccagttgagcctgggcaacaaagggagacagacccccatctctgcaaaataaataaataaataaataaataaaattagctaggcgtggtagtgcacacctgtggtcccagctactgaagagggctgaggtgggaggagaggattgcttgagcctgggaggtggaggctgcagtaagctgtgactgcatcattgcattccagcctgggtgacattacgagactctgtctcaaacaaacaaacaaacaaacaaacaaacaaaccagataaagagtgctgtaccaggaaaactgcctgcccaggagtcgggaaacctagtatcacatcatagctaaacacaagttcagcggctgtctgagcctcagtttcctgatctgcagcataatatgctgatctccaaggatccctccagctgtgatatgccaggaatgtgggacttgaagtgcaagagagatcaaagatgggaaacgcagccagtgtctgcttgctccttcaatgggaaattaagagttttaagaaagcaaaactaatgtaaaaatgaaggcttacccaggagtgggtagcagtgagctatgattgtaccactgcactctagcccggatgacagatggagaccttggctcttcttgtttttgttttctgagacagagtctcactctgtcaccaggttggagtgcagtggcgtgatctcggctcactgcaatctccgactccctggttcaagcgattctcctgcctcagcctcccgagaccagggactacaggcatgtgccaccacgcccagctgatttttgtatttttagtagaaacggagattcactatgttggccaggatgatgttgatctcctgacctcgtgatctgcccccctcagcctcccaaagtgctgggattacgggcgtgagaaaccatgcccggtgagaccctgactcttaaaaaaagtgggggcggggaggggaggtgggtagggaccagatgctgtagctcccacctgtaatcccagcactttgggaggccaaggtaggaggtcaggagtttgtgacctacctgggcagcataacaagaccccagctctacaaaaataaatgaatgacggctgggcacattggcttacacctgtaatgcccagnnnnnnnnnnnnnnnnnnnnnnnnnnnnnnnnnnnnnnnnnnnnnnnnnnnnnnnnnnnnnnnnnnnnnnnnnnnnnnnnnnnnnnnnnnnnnnnnnnnnnnnnnnnnnnnnnnnnnnnnnnnnnnnnnnnnnnnnnnnnnnnnnnnnnnnnnnnnnnnnnnnnnnnnnnnnnnnnnnnnnnnnnnnnnnnnnnnnnnnnnnnnnnnnnnnnnnnnnnnnnnnnnnnnnnnnnnnnnnnnnnnnnnnnnnnnnnnnnnnnnnnnnnnnnnnnnnnnnnnnnnnnnnnnnnnnnnnnnnnnnnnnnnnnnnnnnnnnnnnnnnnnnnnnnnnnnnnnnnnnnnnnnnnnnnnnnnnnnnnnnnnnnnnnnnnnnnnnnnnnnnnnnnnnnnnnnnnnnnnnnnnnnnnnnnnnnnnnnnnnnnnnnnnnnnnnnnnnnnnnnnnnnnnnnnnnnnnnnnnnnnnnnnnnnnnnnnnnnnnnnnnnnnnnnnnnnnnnnnnnnnnnnnnnnnnnnnnnnnnnnnnnnnnnnnnnnnnnnnnnnnnnnnnnnnnnnnnnnnnnnnnnnnacacaaaactgcaacagaaatgaagccttatgtatttttgtggcattaaacccagtagagatttcaactagtctctaattagtgatttttctccctgatttaaaagcacatacattgcagaagtttgcaaaacaggaaaatgtaatgaagaaaaaagaacccattatcctattatctagagatatagtctagtaatatttaggtgtaattaactgctagctttctaggtataaacataccgtattctcctcttcctccacactgaaaattttctctatatttgtatcctgatttttcaacgagagcttcgtctaagattctttcatctttctctttgcactagttttttccaccaagttccaaagattcttcacagttttttataactgttaaatattctatcaggagaatatgttataccttagtcattctcttagcgggcatttttagctactgtaaataaccctgataaaaggaagtgttatgtttaattgtacacgtaaatgttcgcatcatttattgtttttcttttggcacaaattaccaattatagaattattcactagtccaagaggtataaacattttgaagactcttacatgtgttgtcaaatacatatattaacacatctgcttctcttccttctagagaggttgtaacaatttactttccctccttcacagtgtagtaacaatgtgaacatcagtgttactaaccctgccaatttcctataattgaaaagaaatccacttttgactggctgtaccataaagtttatcatttattaaaacatcattgtagggggagtaagagtaattaaaattccagtaattttttgtgtgcctacatgtgctgggcacgatgccagatgcttttttgtttattgctattgaataccacttgctcggagtgtaggtggacctctccttgccctgtcccttgaggctacgatgtgtttgaggacacatctggtgtgtccacacagctggttgctgtttggtcagattagtacccaggtctcttgactttaagttggccacttattcattttactataccttgtctgcctcaactggcctagaatagtcttgttacataaattctggtgatgagaggctctaaaatgtattcacagcttaccaatattttagtttctgggtagaatgaaaatattgaactccaaagccagtaatccctctgaaatcttgtgttaccagaagacatccggggctcttgcttcttgcctgatgtaaacatccttgaaccaaaagtgagaccagcaggggaagaaaggggctaaaccgctcatcctcttcttccccacactggctaccgcagtttgtttgtgaaggcttgacttaggaggctaaggagggaggatcacttgagagcccagaagtcagaaatcagcctggacaacatagtgaaacctctgtctcaaaaaaaaaaaaaaaaaaaaaaaaagcttcagaaagtgcatgctggaattacaggaaaaatgccattgggatggtgagcaccttcaatccaatgcaaaccacggttggaacttaatcgtgtgtgtgtgtgtgtgtgtgtgtgtgagtgtgtgtgtgtatgtgtgtgtgcatttggcaagttttaggagttaggaggctttatacttttatacgtggtcttttgcacaatacactttgaaaactggcttttgaaccttcagacacttaaaacaggtatttatagcaatttcaatgtcccaggcaaaaattttaaactgtgcacttaaacgttaaccatgcatttttttttttttttttttgagatggagtcttgctcagtcacccaggctggagtgcaatggctcgatctcagttcactgcaaactctgcctcccgggttcaagcgattctcctgcctcagcctcctgagtagctgggattacagatgcctgccaccgcgcctggctaattttgtatttttagtagagatgaggtttcaccatgttcgtcaggctggtctcgaactcccgacctcaggtgatccgcccgccttggcctcccaaagtgctgggattacaggtgtgaaccaccgcacccggcctttttttcctttttttggagacagagtcttgctctgtggcccaggctggagtgcagtggtgagatctcagctcactgcaacctcctccttcagatcttggctcactgcaacctcctcctcccaggctcaagtgattcttctgtgtcagcctcctgagtagctgggattacaggcacctgccaccaggcctggctaatttttgtatttttagtacagatggggcttcaccatgttagccaggctggtcttgaactcctgacctcaggtaatccgcctgcctctgcctcccaaagtgctgggattacagacgtgagccacagcgcctggccctaactatgcatcttaatttttgtacttactctctgatgtgctaacaggacagtaaaagtgatttaaggctgttatattttccctttatttaagagatgcctggggttcttagctcaggagggattcatagcatgtcttaagccacaccagtgtttttcaggacacgctagggtggacttggcaactagcaaaacactgagctgctgtgcctaacttttacccctgtgtgccagtgtgcttatttcctgtcttaggattacttgtaatttggtctcggggaagttttctgggtgagtgcgttgcaccaattcccttattgttttaagaacgcagtgacctcacttggatccaggactctgccagcatttaaaatcccgctcttacgaaaggtgaaactcttgcctatagttaagtatcacagcttgatcccattacaatgagatggaagtttgtctgggcccggagtaggccaacaacagcagttttaaaagcagaactccccccgctgggtctaaccctgttcttggtcaccgcgttcgcttcaggagcctggaaatcctcttttggcagcagaagggggagagtgcttggaaatgctcggaggaaaacgacttttggagggggaatagcggggagggaaacaacaagcaaccaccggccacacttggggtgcaactggggctgtggggtgggtagagggagagggaaagtgagcagaactggaagctcagaatagaagatacaaaagaaagtgccaagtagtgaaaaaaactgcaaaaggacggggggatggggggagggcgactggggaacggtttggaaaaatagcaattagtacagctaaaaataaagaccaatttagagacaaagccagatacacaaggagaaaaataaaactcgccagaaagacaatttcttgcaaaccaaatgttcaagaaaatgggggctaatgacatcccctctggggctgctccatagaagaaatgaaataataggagaccgtagagcgcgcagcgcccagcaggtgacgccgtgggggcttgagtggtccgggtcgtggagcctgaaggccctgccagaggcagtgcccacgtgtccccaaagttagagaagtgtcccgagagcgcggtgtgcgggacagagcaccgcccggcgcaggaaccggggggttcctgcagaatcctctcagatctccccgagtcctggcgcccgcgcggcacggccggggagagggcgcccacccgcggcggctcggctagctcagcgcacgggccctggggacgccccacccgcattcgcggggcgggaaggcgcagcgcccacgaagtcgaggagcagccaggccccagcaggcggggatcctggtgacgaggaggcaaaggccacaggctgggccgcgcccggactctgcagaaccgcgaggcctaggcttcccagcctgtgacccgggaggggaccccgcccgccacctgcgaaggctcgctgagagccccgaagcgcggtgcgcccgcggcgccgtgccagtttctccggggctacagggagaaggcgggagaccgcgatgggcccgggagcttgaagctgggcggggcgggccggggcggcatctcaggcgagggccagggaccccgggacgcgctaaccgcctccgcggggctactaagttcccggcggcgcgggctccctctgggccagtgcaccttatcccaggcgcggggcagactctgggcgatcgggggtcacccggggccgccctgccctgccccgcccgggcaccccggagcggaaccgcgagtcctcaccagcgggggcgggcagggcgcactgagcgcgccacgcggcgcctggctaggaggagggcggcgggcggggacctagagctccggggcggtgctgagcccgctcctcctccttgccctcctcctcctcctcctcgccctcctcctcctcctcgccttcctccggctcagccgccgcgccgccgggctgctccttcttcctcctcgggcgcccgcggcgatgttcaaccgcgccgtgagccggctgagcaggaagcggccgccgtcaggtaagcggcttcgggggcccgcgggctcggggtcggggcgccgtttcgcccgcccggcctcctgccctccctcttgtgctcgggcgcggctcggtggtacctcccagactggagccccggccgaccgcaccacctctccccgctgggtaccgcaccttcgcggtcccagccgcgacgggagcgcagagctcctccgggagccccggggaggaagtttggctgaaagaggaacagccgcagttttctttttagtgatggtctgggagaaaaaggagcgccccaaatctccaaactttggaggtgacatggggctccagattccgaaagcggaacggcgcgcgggcttctccctccgtgacgctctccgcctccgctgcgggcgtgggtggaaggatgccgagcgcccgggggagcacggctggacccgggcatccgactgggcccctgggcctggggcgtcgggggccttcgcttctgccgcgaggagccaaaaggtgggatcgcgagggtggcggaaccccaggatggagaagggcacttctgcggtccgagccagcgaagttctgacgttacgaaggattcgccttggccgtcactttgggccagcctgagccacgatctcgggcaacttgataggccaaagaccccacggtgaaggtggagccgtgcccttgattccggtccttccacccttttgctcatcacaatagctacgacctgtgcaggcctttgggtgcgccaagggctttgtccaccgcgttgggtgaactctcccttcacccctaggacaacccggtgagtgaggagggagcggaagccaggcgctgttaggtaacttgccccagtcacactccgcaggtgatggggaggctttcaaacccaggttcccctgactctgaagttcgggggctttgccgggcttcccacgccaagattcacttctgcttggcgctcagagtcccaacgcgttggtgcatttcctttctgctcctggtattttatgagggacattgtggtttagagactgggaccagactggctggatccgaatctcaccttcgccatattcaccagccgtgggacctttctgcagaatgaggttctgcacagtgggaataacagtagctactcgccttttaaagtacttaattggaacctgtcttccatccatcaggttttgcaaattattgtatttaatatgtaggatttcatagggttgttgtaatgatcttacattgttgcccggcaagtactaagtgctccgttagcgttagtggtcatgtaaacctttttgtgttgcatgtgagtcaaagaattcccttgtgggtgttaatgttaaccattctctatggttggcacaggcctgtggagcgctgctcagagcctggactcgaattaaactcttggttctaaccttgactctgtcattcagcaacactgggcaaattacttgatctctctgtgcctccgtttcagtgatgtgctggagctggctcaaactggcttgcaagagccagttgccaaatattcaaaaagtttggaaactggttgtaaaccataggtagcttgaaagtagttatgatgggatatttacatcatgaaaatcaacaaagctaaaaatgaaggcttcattttgactcaggagagctgatgttccagcacctttctccacctgcaaagtgggtttcatagggttatgggattaaatactcaaaaccatatgaagcccctagtacaatgtgtggcacataataaaagtgtaataattagtagcttttctcccttttgcctgttataaatagagctgctatgaatagccctgtacgcgttacttattactttagattgcttttgggttgaagactgacagatagaaccattgtatcctgggagatacatggatttggggtgattttgcgtgtagccaggttgcaccccaaaaaggctgaaggcagttttagggaacaaattatttcagggcaacaaattttaaacctcataaaatgtggttacatcactgacagaaaggtcggtctcaggccgggctcagtggctcacacctgtgatcccagcactttgggaggctgaggcaggaggattgcttgagcccaggagttccagataagcctgggaaacatggcaaaaccccgtctctacaaaaaaattaaaaaattagccaggcatggtggtgcgtgcctgtagtcccagctccttagacggctgaagtgagaggatggcttgagcctgggaggttgaggctacagtgagcttagatcgtgccactgcacttcaccctgggtgacagagtgagatccaaagaaaaggaaagaaggaaggaagggaggaaggaagaaaaaaggaaggaaggaaggaagatcagccactaaacatcatggattggtactggatgcctccactccaatagcctgattttctttggaattgtaggtgtagggtctttccccattatggaaaataacataagttcttgcctgactggtcatcaccacccagccgtgtgaaaagaagaagcctagtgagaaaggggtcatttgggcctgtgggccgaggtactgagaagacagccaagtgatttttgggaccctgtacttaatttttttttttttttgtaattttgaattatttttcttaaagaggatcctcaaattgtataaacttcaggctccacaaaagccagagctgctcctgcaggacccctgatttggacctggctgtggtcctgcctcccccagtaccttctattttacacttttcctacctttcagcaaaatctcactggagacactgtctttccgcggaggattttgagttcctaacccctccttccaaggttcagagtgggatttccttattcttcctgaggtttctcaaagtgtgttccacccgtcctgtgggttcaggagggctttgataaagtgcagcttctcaggccttgcccagactgattcagtgttggggactgtaggtggggcttgtctttgacaagcaccccagagaattctcaggccagtgaaatgtgagggtcccccaacgggattctgtccactcaccctgcccagttatcaaccttgcattgttgatagctgaaatatgcccatctgagatgccaagctgaagccacccgactccctacccctgcagctgcacccaggggtgacctctcaggggaattcccaccctgccgggcaggtttcggccgtcccctcgggcctgtcatacaggatccgattaaagccttgggaacagttttaagtttatggctgggcttgttttatttaaagatgacagtttgcacagcaatttaatgtctttgttttaacaactcggcagcagggtagccttggcagctgggacaactttctctgcagaatatcactggcccaggcctggggggacagaggggccagccgaagggccttgttttctataggtgtggtcagcttatgagccagttgagcctctgggacctgctctgggcaccacctagtgcagcccgtagcctggtgggtgtgaggtgctcacggtgttttatctctgttggctgatttgtatttgatgtgatgtctcctttcttcatggttagaaaatgtagatgcctggcgtggccatttcctagggcttcctgggtgaactgagtcacttccctccctgggtggagtgagtccccagatgctgggctctgggaacctgttgcttaaactgcactaaatttatgcccccaagtttcttctgcttcccccagatagttctttgctgcagcagcctgcgggtggcagcaggagcggagggggccccagcaggcagcagcagtggccccttgataagagctgtcaggcggcatccgctggagtgagacagtcccttgcagacttgtggggacaaatttcccttccaagcaagttcccatctgtcaagagccctgctaagctccctcaggtccaccttgctgccccactgcctggtgggggaccccttatctgactgagtccttcccagccccatttttcctgctccctactctacccctggagggactggacaatactccctctgtgcctttgctcccccagctgtcctttgtcctgtcccaaagcctgggtccccctgctccaacagacccacccttctaggcctcgctgcctcccaccctccatgcttgacagagcagcttgtctgagcaggagggaaccatttcgtttctccctcaagggctgcagaggccactaagaggcagggacttgtccggaggcacccatttctgaaggggcagagaactcaagtcttggacccaagtccacggccacctaaacacaacaaccatttagcgactttgctaaaatatatttagagaatgaatgtggagctgacaactttcctcccttcctccatccctctctcctccactccctccctcccttccttcttccctccctccttccctcccttccttcttttctgtagtcaggacattagaaacaaacaaagccatcatcaaacacctttatcatttcacacagaaaaggacattttaacacccccaatagtaggaaagatataatctcaggtaaagagctgtcctgatccacagaatcttgtagaggttgtcgctcctggggagagacactgggcacctgagggacagaggtgtgaggaagactattacaccacactcccttttgtatgtcctgcactgtgccccacgtaaagaaacatagtgatctatttcaaagcaaaagcaaaacaagcaacccaagactgtccttcctctaccagcacagttcacttggtaaatatttcctagtcttccttctcgtttatttgtggactagtgaagaaaaccgcctaccagcccgtggcactgtgggcaggcggccacctgggaacccctggcctcctctcctcaattcattttaagttctgtgagaaaatagcccccacctttcatttctggcatctttctctgtgtttttctctccagccagacaacctggggttgcatcccagctcatccacttccttgcttgcttctttgtagcaaattatttatcgtctctgtgcctcagtttcctgatctgtaaaatggggcccttgaggaaactagcttgcaagtattgctgcaaagtttcgatgggatatagtaagtgctcagtaaatgtcaacttttctttttcttttttttttttttttgagacggagtttcactcttgttgcccatgctggagtgcaatggcgcaatctcggctcacggcaacctctacctccggggttcaagccattctcctgcctcagcctcctgagtagctgggattacacgcatgcaccaccacgcctggctaattttgtatttttaggtttctccacattggtcgggctggtctcaaactcccgacctcaggtgatctgcccgcctcggcctcccaaagtgctgggattacaggcgtgagccaccacgcctggcctcaactatttttaatagctatccgtcctcctttctgtgccctctacccttagcctggtgcctggcttggctcattccttagaaaatgtttatcactataaaatatatacttgagtgccagacatcatgctgaccctgaggaagactcagcccttgctttcaagaaatgcaccatccacctgactgaccctggaggaaaaagtcatttactttgcctcgagggagggtgcgggacagattgaggcagagtaggagggggagggcagctttacgcagaaatgtcaggccccagaggacacacaggggcttctggaagtggagaaaatcgatgacagggtctttgttttcgggctagggctgctgggccattttcttttttctggactttgcctagaaagtggagagtctagggaggctacaaataacagtttggcgttcttatttccttccctctagtagaaactggaaaccagtggccatctgttgtttagtccacttaaaagaggatgttgaggcttgttttttcttcggacccaagggtgctcgggagccctccagtctctgcctttctcacacaaggcgtctctgggaaggcagtggattgttggtctgcgtggaacttctcaggtggacaccagagcatggaacgtaaggaatcgcccccacccctttccatgtccgcagtttgcctgtcgccttggccctgggcggggcaggggctgggaagagtgtgctgtgaggacacagaggtgcacaggtgactgtggaagggccagtaggagcacttggctttctgtgagtcccgaaccctcgtgtgaaaacgccacgatgccctttctgagtggagccaaccctctgccaccagctttcctgctcctgacttggatgctggctattactatgattattgaaaaacttttttcacttttgatgttatttcctgctaactgcagttcaatcagatctctctggcaagggaattgcatgcaggtggggtagttattctcagcagctagatactggagccgataaacacttaagtaatatttagataccatgtttccatgacccagtttctctggagccttacacagatcaccagttgtaacaaaatgactctctgattctaaattgggaggactttttaaaaaatgtactacacttgatgtggtataggtgacaagaggttttaaataagttttgtggggtgtgtactttctttgaaacttcattacaaagtagagtattttaaaggagtacagtgtgtgtgtgcacgcctgtgcatgtgagttgtaccaaaccactttggaatttagggttaatatctctgccttttcctggactcgaatgtttaatagtctgtgagtttgggggagtacttaggacaaaccttctgaggatgtaagttgactctgctgttgaggaaactggatagtgagatattactaaaatattatttgacttggagaaattgtctatgcaggatgattacacagaccttcctgcaaattaacagcagaaatccatgctgtgagcattcatctccgatgagtgttacagatgccttttgagtatggatttccaaggaattaatgtctggagaaggtctctgttagatatgacatcatagcatctataaataatgcatcataaaataagctgcaagcaaccagccccagccatctgcactgtgatgcttcacccatccttgaaataatggcttttactgacgccagaagccacataggacagcataatcataaatggaaaacgcatatacattgtgtttgtgtgctggatgattccacctggtcttatgtgacttttttttttttttttttctgcatggattggactcttaacagttttctgttttttccccaaagtgtgattgttcttggtctcttaaaggctgttgtgttctggcctctgtgagtataaagatcagcagatataaaagctaaaaatggcagtagagcccttggtaaagagcgtgtactctggagcaggagtacctgggtttgggccgtgatttcccattttctagctgggacgcttgtaagttaccgtgcctcagtttcttcgtctgcaaagtggaaataatactaaccacgtcagtaggttattgtgagaactgaatcatttaattcaggtaaaagcttggaacggtacccagcacactgtaaatcatttgcaagtttttcttttttctttttatttttttgagacagagtcttgctctgtcaccaggctggagtgcagtggcttgatctcggctcactgcaacctccgcctcccaggttcaagcaatcctcctgcttcagcctcccgagtagctggaactacaggcgtgcaccaccacacctggctaattttttgtatttttagtatagatggggtttcagcacattggctaggatggtttcgatctcttgacctcgtgatctgcctgcctcagcctcccaaagtgctgggattacaggcgtgagccaccgcgccaaccttttttttttttttttttttgagacagagtctcgctctgtcacccaggctggagtgtagtggcacgatctcggctgactgcaacctccgcctcctgggttcaagcaattcttctgcctcagcctcccgagtagctgagactataggcacgtgctaccatgcctggctaatttttgtaattttagtagagacagggtttcatcgtattgttcaggctggtcttgaactcctgacctcgtgatccgcctgcctcggcctcccaaagtgctgggattacagacatgagccacagtgcctggccttttttatttatttatttatttatttatttatttatttatttatttatttattttaagacaggttcttgttttgttgctcaggctggagtgcagtggtatgatctcagctcactgcaacctccgcctcctgggttcaagtgattctcctgtctcagcctcccgtgtagctggggattacaggagtgcaccaccatacccggctaatttttgtattttttgtagagacgtggttttgccatgttgcccaggctggtcttgaatgcctggcctcaagtgatccacccacctcggcctcccaaagtgctgggattacaggtgtgagccaccatgcctggcccatctgaagtattaaccattattattagctaatgacagagtagtctgaaaataaatttgctgaaaaatacgtattttgcatgcaaaaaatttgaagatctaaaatgacgtaaagagcccaggagctaagaaaacaaaatgaaacaccaaaaacttttattcattgcaaaaatgttttacagctgaagtaaacaatgacaacaaaaataaaacagcatgataaaattgaaacaaacaaatatcacaagcaggtcttccctagctggagagatcgtaaagctgctggagaacatgcctgacattttttccacctattcatgtcagtcctgctttcttgtgtaatctgtctgaaatggaaacttttatcaatgaaaagggatagaagaatattgcaactttgtggatccaggtaccagaagttgggcagctgggaaatcttggttttgctttcttcttaagttcagaggtaaacctgctttgctattgagaaagagtatttatttcttctaatattactggactggttgtaacatttatttatgtatgtatatatgtatttatttacttacttactttaacctgcttccccttccaccttggttgttaacatttttttctttttttttttaaacttttttccctaagacggagtctctctctgtcacccaggctggagtgcagtggcgcaatctcagctcactgcaacttccgcctcccgggttcaaacaattctcctgcctcagcctcctgagtagctaggattacaggtgcgtgccaccatgcccggctaatttttgtattccatgttggccaggcaggttttgaactgacctcgtgatctggctgcctcagcctcctaaagtgctgggattataggcgtgagccactgtgcccggcctcttttctttttttatgatttttttttttttttttttgagacagcgtctggctctgtcacccaggctggagtgcagtggcgcaatatcggctcactgtagtttctgcttcctgggctcgagtgatccttccacctcagcctcctgaatagctgggcctacaggcccataccaccatgaccagctaatttttgtggtttttttggtttgtttgtttttgttttattttgttttgtttgagacagagtcttgccctgtcacccaggctggagtgcaatggtgccatctcggctcactgcaacctccacctcctgggttcaagtaattctcctgcctcagcctcccgagtagctgggattacaggtgcgcaccaccactccaggctaattgtttgtatctttagtagagacagggtttcaccatgttggccaggctgatctcgaactcctgactttgtgatctgcccacctcgtcctcccaaagtgctggtgtgagttgccacgcctggcctaatttttgtattttttgtggagacgggatttcaccatgttgcccaggctggtcttgaactcctgagctcaagcaatctgcctgccttggcctcccaaagtgctggtattacaggcatgagccaccgcgcccacgggtcgtaactgagctgagatggcttaggaattcattacttagtgtgtcccctgagcaggggaccctgagttgcagaagtgccctcagcctaagggctatccctgtctgctcagtcatattggaggctggggatagtgacttggaaaagagagatgccactgggtgagtggagtttgcaaatgctgtctcatcaagatctgtctatactgatatcagtcaagatggatttgaaaagggtggggtgccatagccaaaagccttaaacttgaaagacagtcaggaagtcttagaaaaattcaaaccaacatttttggggaaaataaaaacttatgacagatagagagcaggtatctcagatagaaggatcttctattccacttatggggacagaaggtgagcaaaaaggcaagaaggaattgctctttatctagagcaccatagccagaaaaccaatacccatggctataaaaagcagctccatcttggcatactttctgacccgtccctgaaaactccatgctcttctgtaatagtgtcaattgttaacgtatttcatggcatatgatataagggagatcttagcccaggagaccatggaatggaagggcccatcggttttctaactatgttcccaggagccctgggattctgcagacatggccctggtgaggacagctgacctcccatacaggtcccagtattgggtccatccagtgattcattagctgcatcaccttggataggtcattctatcttctggatttttgcttcccagtctataaaatgaggtggtgggggaggtgggcctggaccacattagtgtgttttgagttgtaaaattttttgttcaaatgaaaacacatttgaacacataaacctaatatgcaaaaatgattagagtatgaaataaagggtgggggttggcaattgtctaacagtgaggtcagttcttttaactctcagacattttgttggctaaatggtaatctactgtgtgtatttatttgcaagacagcgtggcagtgaaaacccaaacatggtctggtttattatggaaaagaatgtcaagagttttggaatcctttcagaccaaggttgaaaacttatggccaaagtggttctgccatggcaagagaaatttgcagctgcctagattgttcctggaacagtgaacttgtgtctctagatttatttacttaagagaagatctgctggggaaatggagtaaactgtcaaactgtattctctgggcaaagagcagaagagtaaattagtggaatgcttggcagaatgaaccctgctgcagaaatttcttgtaataatgatcttttaattggatttatactttgttggaaagaaactcagtgttcaggagcttgccactgcagcatttacaaagagaacagggaactaatttaatatccacgaactggagggtcactttagaaaagcatcagctccatttggtgatgtgtttaagtgagtttccttcatggttagaggaaaggatttgtcccaaataattctcttacgtactctattgccaatgagcattgaagcatggtccctgctgggtttctgggtttctgctttattgatgattgattgattgagacagggtcttgctgtcatccaggctggagtacagtggcccaatcatggatcactgcagccttgaactcctgggctcaagctatcctcctgcctcagtctgtcaaatagctgggactaaaggcacatgccactatgcccagctaagttttgtattttttgtacacacaggatttcactatgttgcccaggctggtctcgaacacctgagcttgagtgatctgcccacctgggcctcccaaagtgctggggttataggtgtgaaccaccgtgcccagcctagtttttaaatattttatagagatggggtcccagtatgttgctcaggctggtcttgaactcctgagatcaagccatcctcctgtctcagcctcccaaggtgtttggattacaggcatgagccactgtgcccagctggcctggttctaatttagctcatgtcatctggtgaatgtctaaaatcctggtagtttccccaggtgcttggatttggagtcccaggggatcaagaagtcaacatgtattttgaccccccatagaacatcagagatcacaggagctgttactattaagtaagtccagtgtgctctgatacagattttctccaaaaccatttttagctgtgtggccccctagctgtttgcagcaattaatatttatgagactttatttaaaaaaatatatcatttagaggtggtttgctgtgctgatttatttatgtatttatttaatcagatggagtctcgctctgtcaccaggctggagtgcagtggtgcaatctcagctcactgcaacctccgcctcccgggttcaagcagttcgcctgccttagcctccctggtagctgggattacagacatccaccaccatgcccagcaaatttttgtatttttagtagagacagggtttcaccatgttggccatgatggtctcgatctcttgaccttgcaatctgcctgcctcggcctcccaaagtgctgggattacaggagtgagccacctcgcccggccttgctgatttcttaattaaaagtttattttctcctagatttgaacttttttttatagaaacatgtctctagctttggaaagaaaaaaagtcaatggggaaaaaagtgttagttatagaagtagtttgcttgatagatggttattttagagatgggaagaaaggagctcacatttgttgagcatctactgtgtcccaagtgtgctgctaggtgcctgatgtgcttccatttttgaatccttatgataacccaagagatgggggatgattttcaaatatacacaagaattttgcccaagatcctatagttttgaattggggaaactgggttttttgttttgttttgttttgtttcgtttgagtcagagtttcgctcttgtcacccagactagagtgcagtggcacgatcttggctcactgcaacctccgcctcccaggttcaaatgattcccctgcctcagcctcccaagtagctgggactacaggcacccaccaccacacccagctacttttttttatttttggtacagacggggtttcaccatgttggccaagctggtcttgaactcctgacctcaagtgatccacccgcctcagccccctaaagtgctaggattacaggcgtgagccaccgtgcccggccagaaactgggttttgaacctggccccatctgaagtgacattccatggttcttccttgactccaggaagggatcacatgccatagaatgaagcatgctttaattgttccctcctcctacaggcaagtggccaaagtgtgttatttggagattccctgttcctcccaggagacttctcagtgtcgtgagtcagagagtacagtggaagatgtgcagatgcaaagagttttcatccattttctctgtgcaccaaaatgtaagagggttgccaaaaacctcaggcatcaggataatgatatttatttatttatttatttatttattatcattatttttagatggaatcttgctctgtcgcccaggctggagtgcagtggtgtgatcttggctcactgcaacctccgcttcctgggttcaagcgtttctcctgcctcagcctctcaaggagctgggattacaggtgcatgccaccacacccaactaatttttatatttttagtagagatgaggtttcactcctgacctctggtgatctgcctgccttggcctcccaaagtgctgggattacaagtgtgagccactgcacccagcctataaatgatatttaatgcagtgttttaaaagatcaaaattaatgcagaaacatccgtaatgaacaaatatccgaagtttaaataaagtcaggaaaaataacagtgtgatgctgagccatattggactctgaagcaaaaggaaaaatcagcataaccgatcctgtctttatttaaaatttgggtattttgttcatcatggattttttagcataaattttgattttttgaaaaagtattgcctgaggaactgggcgcggtggctcatgcatgtaatcccagcactttgggaggccgaggtgggtggatcacctgaggtcaagagttcgagaccagcctggccaacatggtaaaaccccgtctctattaagaatacaaaaattagctgggtgcggtgggaatcacctataatctcagctacttgggaggctgaggcaggagaatcgcttgaatctaggaggcagaggttgcagtgagccgagactgtgctactgcactccagactgggaaacagagtgactctgtcaaaaacaaacaaacaaacaaaaagagctattgcctgaaatgacatttatcttgatgcctgggtattctggcaaccctctgacattttgcgccatcacgtgggtcccgtcctgcaatgagttttttaatctctgtgccagataatgagctaggtgctggagatacaagatgaggacacataggagccttcagactagtgggagtcagtcatgtaaatagtcacaacacagcaccataattctaagtctgtgcacaaagcgccatggggaagcagttgctgttgaatcaaggttctcttggaggagggtttgagtgcgacttgagggctgcctctgaattggccagtggacacaagagtaggggaaggatttggtgggaaacagcaggtcccttcatccctccgagcctcagtttacccccatctgtaaaatggaggaaatagtagtgcctgccttacagggttgtgtgacaagaatgagtccatcatgttaagcacctagaacagagcctgacgcataagtcggtgtatgtcagccgtgatggtgatggcagtgctgaccattgcatgcagatttcttaaaatgacagtgtctgttggccacatatgcagtctgaactttgctttgcagacatccacgacagcgatggcagttccagcagcagccaccagagcctcaagagcacagccaaatgggcggcatccctggagaatctgctggaagacccagaaggcgtgaaaagatttagggtttgtctttttcattgttaatcgggatggatgcagtgtgtgcagaagttcagatgcacacaggggagaaataggccagttcaacattgtctgtcagcgtagcactctctatgccagcttgagagttcagtactgtctatcccagcttgagggtgagactttctcatctgtcatgactgtgttggcaacgctgtcacagatgggtagcctgtttctggtttttgtgtagtgaggtgggaggggtacagggtgggaggagagagaagataccgtgcctattggtggagtctgtatgaggaattcccagctctgggtctctctgacgtgaaggcttgttctctcgtgcttgggggattctcagaatgcattgttgacagagtaagagaggctggcaatgagaacttggcgaagggacctccgagagcagggctgatggatggggaactgttgatcccatctagaaatagcttttctgaccagcagaagcccccggtgccagatggaggaccatatgtgaatttcaagaatgagtcctggttacttctgtctttaagtcttgggtcaggaataggatgagtcctcatgcagttggtgcctgttggagctcccagggagggagtggcaggtggtactaggcttctagttcctggtcgccaggccactgtgagcagtgtttgcaactcaggaggtctctgcacagcagagtagctggctgtgccatggactgcccaagatcggccataagaaaacacacatacctccaacttaaaatagtttgtatcatggtgtctttagacatacttaatgtgctttcttttcttttgtttaaaaaacagcctgattttagaggaatgtactttgtttaaacactgtctggaaggaaccaatatatcttccactttaatttactttttggtaatttattgtcagcttagaaatatgagtacattcctgcttcatttgtactcttctttacaatgtcaaaaccattaaggtcaaatgcatatgaaattatagctttaacattaaacatactcatttgtttttcagagtggggttttcgaagagtaactgaaccatgctcctctgttgaattttgccaaatcagtctttgaagggaaatgccatttgttttattttttttttaaagtagaatactgtgtgactctttttctttgtatccacaggaatttttaaaaaaggaattcagtgaagaaaatgttttgttttggctagcatgtgaagattttaagaaaatgcaagataagacgcaggtatttcctccactctgataatttttttcccttataaagttacaactgcctttccaatagattctgaagttgcctaaagaaacctgattcatattagttttgggggaagatttaagcttcagattaggtatcttgtgttgatcaaatattaatcatttttaaaagggtgagttaatccatttttaaatggagctgttcaaatggaccaatatttaaaataaaaataacaatttatgtcacttagagttcctcattgcatagaatttttttcttcatgaataagttatgaggatgttttccccacattttgacatgttagcattttggacgtggtaaaacgatacgcagatgtgtaatgataaaagcacaaggtgcatcagagggattgtcaattattcagtgtatcgtactgagcgtcccatagttggcgagcatcctgcagagaaagcctctgattgttctcctgggtagatgtgtcctctttgccttcattcccagtgtcagctggttgggtatgagggagggtagatgagattatggggaaggaggcctgtgccctgggtgggtttatgaggcctggccctgtatctttctaagaggctgctggctaaatgcctgcaggagccagtaagtcatgtgaatgaaggaggctcctggtgtgaggctggagggagtgttggggactggggccagctaaggacgttctgtctgcctgcacaggctgcagctggtggttcagggcctgtggctgtctgggcttcccctgcttcaggttccgtctccgccagcttactgatggtgatctcctagatctttgcttgccctgcgaccctggtggactttcttcccaaggcatgtcttatattccacctagtaccgcctgtttttctaaagaagctggacatttggatccttacgtgaaaccagatgatttttaaatgttggaactaattaaaaaaaaatttaaaaccttgcctaccaaacaaaacatacccatgggcagatgcggcttgcgcgttgccagtttttgaggcctcgtctccaaaagctggaatctatgggccagaagccgtgaagcgtttgcagacaactgcttggaaaatgtatatcatgggtttattcaaaggcctttccgggcgcagacacccatcctcctggatggcgcagcgcggccttttctccaccaccttcctctctggaggtggcaagggagtattctaagatggattctctttggcttgaacttcccaggcccacctcgaaagctgttactgggcgggacccttggattttgctttctggctttttctctcctctggatgacgttggccggagcctcctgggcagagaggggccccaggggaaagtgagaagcaggtggtgggggatgctttgggatgctaggattcaggctgagggccttcagaacaagagcctcattgttgtcctttgtctccagcaccgaggacagggcctggggaccaccatcgataaatgctagactgtgccaccgctgcgaccagcctcaccataaaatcctagctcagagtcaagcaagccaacagatgtccattcccctgccttattcttttgagtgttagaggtaggaggggcctgtgggtgggccggtccgcccctgcagtgtagacaaggaagtgaggtccccgcaccgtggcagagctaggacttgaactagctccctgaagtcacccgttgttgtctgcaccaccatgctgctctgtgcctccgttcagttgaattccccaaatctttgtgaagtgcctgcttggtgcccagcactgaacaggaaggcagcccagggacaggacaggtgagcggctccagggaacgggcacctcaaggggagcaagcctgtgcaagtgcaatgagtgtagagatgggaagcacatgtgtcgtgggagcaaggcgtgggcaacggggagggatccaggggaagtggctttttagctgagacttggcattgagattgggagggggttcccgggagcagggacagtgtgtgggcaggcagggctggcgacaagagctgagggaagaccagaagggctgaatggcatgtttgagggggaggccactgtgctgtgcttcaggctggcagggcagccacacctgggaatctgggtgccaaggtgagcagggctgggaaagcccctgtaggactttaatggagtggttggaaggagggggtcaaactttcaatgtgcctcttccagcctttcaggtcaggcaggtctggtgttgggttgccctgccctgtccacatcctacagagagagcttccgaatgggcagcccctttccatgcctgtacccctgacatccagcataggacttcttttccttttttgagacaaggtctgactctgttgcccaggctggagtgcagtggtgaggtcttggctcactgcagcctccgcctcctgggttcaggtgatcctcctgcctcagcctcccgagtagctgggattacaagtgtgtgctaccatgcttggctaatttttgtattttgaatagagacagggtttcaccatgtttgccaggctggtctagaacttctgacctcaagtgatccgcctgtcttggccttccaaagtgctgggattacaggtgtgagccactgtactcggcccagcataggacttcttgaaagtctgtgtccttaagcctggaatgcacccggcaattgctttagagcaatgaatgccaccctcccgtcactgcctgagaatgcagattgggtggaggcattggtgacacctggggtgtttggcctggagtgtttgggccccagtgtgagtcactgttcccattcgaagatgcagggatatgacttgagtggttaagcggcagctcgcccgaggctgggcacagtggctcacgcctgcaattataacactttgggaggtcaaggtgggtggatcacttgagcccaggagttcaagaccagtctgagcaacatggtgagaccttgtctctacaaaaaataccaaaaaaaaaaaaaaaattagctagacatgatggagtgcgcctgtagttgcccagggaggtcaaggctgcagtgaggtatgattgcgccactgcactccagcctggatgacaaagtgacaccctgtctcaacaaaaaaaaaaagaattcagagccacatttctgactccaggcattccctagtgagtcccgctgcctaggaagtaaaaccagggagtaagctctaaattactacaaaaagtgtggaggaacataggcactgggagaagtcgcctaactgaatgtctttgtttttttttttttttttgagacggagtttcgctcttctcgcccaggctagagtgcagtggcacgatctctgctcactgcaatctccgcctcccgggttcaagtgattcttctgcctcagcctactgagtagctgggattacaggcatgtgccaccatgcccagctaatttttgtatttttagtagagatgggtttcaccatgttggcgaggttggtctcaaactcctgacctcagatgatccacccgcctcggcctttcaaagtgctgggactacagacgtgagccaccgcgcctggccagttctttttaatcctctgttgtgcacgtaacctaactggatttcacagtcaaacttatcacatctgttccagcagggagaccatgggaggatttttctctctccatcaactaaggctgttgaggagtcgatacaaatcccactctcgcctctgttgttttaataggacctgtgttggttcattccttgacgtggattatccagcattcaacaacttcacatatccatgtcatttacttgtccgtcttctgtgtggtttgtcttctggaatctgggagtggggggcctcttcttccccactgtctccgagggtctagacccatgcctgacacatggtgaacctccttcctctttgtaggatgaaggcattccatttcctggatccaagtcctcttctctcctgagtcattccctcattttgggaacagcacacgagaatgacttcttccctccagaatgactcatgagagaagagctcaaaacacagctggcaatagcttcctgagaaggggggtctggcaggtaggtatgtaaagaccttgttgagtggaaatgttatttttttccctactctcctacttcactggtaatctgacagagcatagaattctggggtgaaacacactcagaagtttgaagacattattccttagtcttctacttttgttgagaatcagtaatttatatgtaaactgttctgttttttttttttttctttttttccctctctgggatagtataggatctattttcttttctatttttcccctttcctcctttccttccttccttccttccttccttccttccttcctttctttccttccttcctttctttctttccttccttccttcctttctttctttttttttttaatggggtttcgctcttgttgcccaggctggagtgcaatggcatgatctcggctcactgcaacctctgtcttccaggttcaagcgattctcctacctcagcctcccaagtagctgggattacaggcaccctccaacacacccagctaattttgtatttttagtagagatggggtttcgccatgttggtcaggctgatctcaaactcctgacctcaggtgatccacctgccctggcctccctaagtgttgggattacaggtgtgaaccaccacgcccagcaattttcttttcttttctttttgagacagggtctcactctgtcacccaggctggaatatagtgaggtcacggctctttgcagcctggacctcctgggtttaagcagtctcaccatgttgcttaggctggtcccaaaagaaatcctctcgcctcagcctcccaaagtgctgggattacaggtgtgagccactccacctggtcaggatcttttcatcactagtattctaaaactgttcagtcaggggctttggaggcagaggcggagttcattcattgtgtgaattctttgtggagccatataatctggaaatttgtagttctgggaaatggtcttatgttgttattgttatcatcattttagtaactttttttccttccattgtctctggtctcttttccaatgatgacctttcacgccctgcattgagcccttaatttcatgttttattcttcctattttttaatttttttttttttttgcttttggagattttgactacatcttcagatcctcctattgagttttttctgcttttttatttttccagacaagggccctctagtctcttcctggggggccataagcctgatatgttcctgaactaaacatatttctaattaactgtgtcaggagaattttgctggcgcggggggtctatatttggaatttccctgaatccctttattcggttcggcgtctcattcttgccgtcctctgtgcctctctgttccggagcctccctgggtctgtttctttagataagaaaactcaactcttctgttgaaggtggcgggggagccacctgactgctcaagtttggagcaggacctggggtggaggacctgggggtctgatggcttctttctgccgccctcatcaattccgtctgggctacctgatgccctcgagctcctgccgtctccggacgcgcttctcgttggcaccccctccccacctgttcaggggcttggcttcattcttctgggtctctgcagagtcatctgctgtgtctccgactgcttctcatttcctgagccagttcttgaaaatattctcatatcatttattggatattttctttgcctcattctctttctgaaattgatgttagtaaagttagtgtcttgatcctttcattgtcctaggaattgtctcccacattccatctctggaagaagacggggtggagaggagccggaggccagcagacgggatgggggtggggagtggctacaggggatcgaagtttccagcttcccagagtaggggctacagggcctgccagccagaaggggaccactctgttcctttgtgttaattcaaggtgtcagtgggatgtccatgcccacattgctagaaaccaactggctacatgggtcagtagcttgggggagggttggtctgaaatctgggggggacatggagttagagttgtcaccaaggacagaagtctgggaaaccccagaattcacggaggggacagggagacaggagctgggggacagacagggagacagaagctgggagacagacacagggagacaggagctgggggacagacagggagacaggagctgggggacagacacagggagacaggagctggggggcagacagggagacaggagctgggagacagacagggagacaggagctgggagacagatacagggagacaggagctgggggacagatagggagacagaagctgggagacagacacagggagacaggagctgggggacagacagggagacaggagctgggggacagacagggagacaggagctgggagacagggagacaggagctgggggacagatacagggagacaggagctgggggacagacagggagacagaagctgggagacagacacagggagacaggagctgggggacagatacagggagacaggagctgggggacagatacagggagacaggagctggggacagacagggagacaggagctgggggacagacacagggagacaggagctgggggacagacacagggaggtgttggggatcctgagaggacagggctcttacaaggtgagggaagcgggaagagaagaaagtcgcaatgctgagcagggctggggccagctcactccagaggaaggtctgagaggcctcgctgcctgggcagcgtcagccggctggtggagcagcgctggctgggcggaagcctgtgtgtagcgtgaggaatgaatgggagggacaatggaggcaggggtgcatgcttttcttttaagagatttcaaaaaggaattggagactaggcacggtggctcacgcctgtaatcctagcactttgggaggctgaggcaggtggatcacttgaggctgggagttcgagagcagcctggccaacatggtgaaaccccgtctctactaaaaatacaaaaaattagccgggcgtggtggcggactcctgtaatcccagctactcgggaggttgaagcaggagaattgcttgaacccgggaggcagagcttgcagtgagccgagatcgcgccactgcactccagcctgggcgacagtgagactccatcttgaaaaaaaaaaagagggattgggggtggtgaggccattaacccccatgtagagagctgtggggtcaagggggatcttttattttccagtgggaaggttcgattggggagggcggggccagtgtgggaagcagcgctcttctgagctttgggcccctggtgactttgctgttcgtctgcatagaggtgcacttctggggctgataggaaagtgaatttgcttctcctgatcgtgcacctgcagggagccgggttcgagagctgacgtctggctgagcattgtcacagttgagccactgctgggcctcgaagaagggcctcagccttgtggggtgcctggaaggtgctcactggggtgcaggtgcttcctgggcagtccccgagttgatgggccaaggtggggccctctccagcacctgccaggacagcctcagatgctggacacttcaggtctccccagggagaaaggggctctctggtccaggctgtggccagccacatgtgtcagggccgtggaagagaagtcggccatccttccaggccacagacacagaatcaactccaccagctctgttcctacccggacagtagctagaatagggttaacaaagctctggaaaaatctatcaaaatagctccacagactgtttcttcttttctgctcatgttctcggcctagacaccaggccttcccgtgactggcttgtggtcgccgtctcagggtttcccttttcagtcatacttcctagctccgccgagataagctgagccctgcagctgctcacagtgggcatctggtcagccagggccttgaaccccacattgttctcacgcagactcaggagggacagccggtggaagagggcagggctgagaccctcaaagcttatatacctgcagtcactggaacctacttcctctcccccggcctcttctgccccacctcaaagactcaagccattcattgcacttctctatttcagaatcactcaagatatcctggattcatgtgtgtatgtgtgtgcgtgtgtgcacgtgtgtgcgtgtgtgtgtgcgtgtgaatgtcaaggggaggaggggaggtctaaagtgatttctgcccccagacctctgcatggagtttgctcatctgcctggccgaaattctcctttcatgaagtggctttaaaacaggaagtggttttccaaaagggttgcttcctgacggaatgggggtggtggagggaggctgtggcttcatggagctggtgggtcttggagaggacagcagggccagctcctaagtgccacccccttgggtctcgaggatggcccccagacctgtcccttagatagccacgcttgtctggagagactcctgtgtcactgagtctggcatcgattcattgctcctattgacagtgaagacatggctttcggtgttcacccaacctgggccgtctccctgcaagtgctggtgaggcttgctttctcgcagaacaggacatggccaggccgtggcttctcaggatcttttgtccccagtgccctgaactaaaaaagggctacccttccttcctttcatgccccagctatcaaaaccttctggtggtttccttaagggcagaaggtttgcagagcttgggatttcccaaaccaagccccacagcacatgcggagccccagttgggctcttggagagaaaggcagttttccaggccccccacacacatgtcatagctgtgtggctgcattttagaggcatttgttgtctgccttgctctgtagggtaaggtcatgctttagactctaacgttcagagaaacagccccgcttttgctgttggcgaggtatgagcacaggaagtctcctttctctaaaagaaaatcgagccctcaggggaagttctggaggagagggctcctgcgcctgcagccccgccctgaggcgcctgtcctgaagacacagttctcactgtgaagtcatctccttaccatcagtgagtgctcctgagccagcctcggttagtttcgggtgaaacaggaagccggtacctactcacggctcctgcttcccagcaggactgcactcgggacttgagggcgggcagcgagtgttttctccactgctgtgctcagtatctcgttagctaaaaggaaatgcaccctgcctgggaaggccgcataccgcacaacctggaggggccaatgtgtcttgcggaagtggaactgagcagaattcagaggccttggagccaaacagtcctaaggctcccggaagctctcagataagccatgccacctctcctgacctctgtgtcctcatggggaaagtggggctaacaagaaaatgccctttgctgcatgtccaggggattaaggaaatgggatccctccaagcaggtgcctgcagcccagtgggcgcttaataactggtagggatagtaggtgtgcatactttaacttgatttttttttttttttttttgagagacagtctcactctgtcacccaggctggagttcagtggtgcaatctcagctcactgcaacctctctttcctgggttcaagcaattctcctgcctcagcctcctgagtagctgagattacaggtttgcaccaccacgcctggctaatttttgtctttttactagagatggggtttcaccatgttggccaggctgctctcgaactcctgacctcaggtgatcaatctgcctcggcttcccaaagtgctgggattacaggcatgagccactgtgcccggccacaggatggctgtaaatggtactgagtgctctctgcgggccaggattctttctgtcatcacttctgaatggttaatgcagcaattttgttccaggagaagtggctgcaggcgcatgaaggggcgggggtaggggcttggcagtgcaggctctcccatatagaaattctctctggagtggcctgagagcccctgggctgtggggggtgcctttctcttgccacagcagctcctgtgggcctggctggaggggagagcagggctcaggccgggaaggctgtgtgtgcagatagcacaaggccccatctgtctcctccagatgcaggaaaaggcaaaggagatctacatgacctttctgtccagcaaggcctcatcacaggtcaacgtggaggggcagtctcggctcaacgagaagatcctggaagaaccgcaccctctgatgttccagaaactccaggaccaggtaacccgacttccctgcctgcaccttgatttgaaaacctacattaattccaggcctggaagaatttactgaaacacccgatgttagactccctggaaaccatctcatacggccgggcagaccgaggtacactgaggggccatggttggggagagtggggaccagaattctaagcttgagatttgccccacaggagtccccccaggcctgtttaatcttggtctacacacagtttagaccagtttatctgccttctcagtccagattagaggggaggctggagctatttgaggagcctgtactgagaaagcaacctataattgctgaaggtaagaatagacggaaaactccagaaagcaagcaggagaactcaaagtggcaggctgtttctgtgcaaatatccagacacctccacatacttctggtggcctaatgctgtaagctattaatagttcatcatgtagcccctgaggcataatgaaaaggttagcattgggcagcatattccatgtgaattctgattcacatttggctattgaaggagacttgcggagggcctcctggaagtggtgaatttgagccagtcggaaggacgcatgggcattgatttgcgctgggaaagggagtggaatgtatggtgaaaaggcagtttttgtgactgtagccatatgaggatatcgaccccaccctggacctcagaatcttgtcagagctccctagggcacttgaaagtgcagccagggttgcgaacctgtactgacctctgtgctctaggtattctcagtaatgacaacactaactaccatttcgcttttggttctgtgtttttgttctttttttttttttttttaataccaagtcttactctgtctcccaggatggagtgcagtggcttgatcttggttcactgcaacctccgcctcccaggttcaagcgattctcatgcctcagcctcctgagtagctggaattacaggcgcccaccaccacacacagttaatttttgtatttttagtagagacagggtttcaccatgttgactaggctagtctcgaactcctgacctcaagtgatccaccctccttggcctcccaaagtactgtgattacaggcgtgagccactgcacctggccttttcaggtttttttctttgaaacgaagtctcactctgttgcccaggctggagtgcagtggctcgatctcggctcactgccacctctgcctcctgagttaaagcgattctcctgcctcagcctccctaccagctgggattacaggcctacaccaccacgcccggctaattttttgtatttttagtagagacggggttttaccatgttgactaggctggtcccgaactcctggcctcaagtgatccgcccgcctcggcctcccaaagtgctgggattacaggcgtgagccaccacgcctggccctaactaccatttaggactgcccgtttgagcctgatgtcacacttggtgtgtattgtctcattttatctccaatgagtgttattattcccattttgctgatgagaaaagcaaggttcagagagattaagtgttttttttagcattaagtcatgcagggagcaaaagtgctggaagccagattccctcttgtccatctgccttcaaagaccatgctccccccatgaccatcatggcctgtgttgctctgccaggctcctgggcagcctcttgctgtttctcaaagctcggtgaggcccctggagcagagggattggaaaggctttgtgaatgcaggtcatcccacttcccaggactgcgggagccaaggtaggatgaggaatgggagagttctgactccatgcggtagcactgcaggctctgagagatccagcccgcctgcccaacagctcagaacggagctggaccttatgagtaggcgtgccccttagactcattcagtgggaggcttagccagcacagaaaggaagaaacacaggggacagaggctgattgttttttttttcttttttaatgacaaagaattttatttatttatttattttattttatttttgcgacaggatgtccctctgttgccctggttggagcacagtggcatgaacccggctcagtgcagccttggcctcccgggctcaagtgatcctcccacctcaacctcccaagtagctgagactacaggtgtgtgccaccatgcccagctaatttttgtattttttttgtagagatgaactttcgctatgttgcccaggctattcttgaactcctgagctcaggcgattctccagccttggactcccaaagtgttgggattacgggcaagagccaccaggcccagcctcagaaaaattttttaaaatagtttttatccaactgtaagcatcacacatgctcagcaaaagaaacttgggaaacaaaaatataaagaagaaatcatttctttattgcataattgcacacttggagataaccaccaaatagtattttatctgtagactttccatctttttttctataaatacacatatgcacatgcccctaacagatgtggcctaataagtgtaataataatgtatatgtttatgcacaccaaacagatgtgcagtccaaactgctgaatgtaaagcaagtactgttatactctgttgttaaaaatctattattggaaggctgggctcagtcgctcacgcctgtaaacccagcactttgggaggccaaggcgtgtggatcacctgaggtcaggagttccagagcagcctggccaagatagcgaaaccccatctctgctaaaaatacaaaaattagccaggcgtggtggtgggcgcctataatcccagttactcgggaggctgaggcaggagaactgcttaagcctgggaggctgaggctgcactgagccgagatagtgccactgcactccagcctgagcgacagagtgagactccacctcaaaaaaaaaaatttttttttaattgcatagagagaaagatccacgaactttcttcctaaggcataattgggtgaaaacaaggtatttggaatcagagccgatttcacagtgagtctccatgtgaagggcccctgtgttccgttttgctttgaaaactctgtctctccggggccttgctgtaactgtcaaaatgcgtgctcagcattagccccggtttttttcttgcaaaggctccctcgagagctctgttttcctaagtgaaggagattgaagctgaggggaacatgtttggagccacaagatttcacggaactttcaaaagcctctcccgcggctttggctttgctgagcactgctgggcttcatggtggagccgcagagcagccgctttcctgtgttcagcaccgccgcccccgaacttagcccctcatcaccacgtgcggctccgctgctctctgagcttctagtagggcagctctgactttgtagggcaccgctggaacctagaagaacgggaaaatcttccctgagccccaggctagatgagccaactcccatgcaccctgtttaaaggagagcttcaagagttttcagtcaggtcctgtttattcttggtttgcacacagttctaacaggtttttccattcatagcagatttgaagttgtggtagagactatggagtgatgagcagcaagaggtgatcactgacagctagggaggacacagaaatgacactgagtacaagcacagcaccgaggcctgagcctgggcgtggggacctccattgccacacgccgcaccatgggcatccctgtgctgtgggacagtgacatgataagtgagcctggtgaccccaaaccatcaagtagaagtgaaattgaggtcggcgtattatgtgaagagtgcattattcattttaatgagcacttcatcaaaaacattttttttggagacagtcctgttctgtcacccaggctggagtacaatggtgccatctctgctcactgcagcctctgcctcctggattcaagcgattctcctacctcagcctcctgagtagctgggattacaggcgtatgtcaccaggctaggctaatttttgtatttttagtagagatggcatttctccatgttgtccaggttggtctcaaactcctggcctcaagtgatccacccacctcggcctcccaaagtactgagattacaggtgtgagctactactgtgtccagccaaaggcatcctaagagaagcttgaggggcttaaagctttgctacctgggaaattcatgtaagtggcgagatggttctctgatttaattcagttctgcaagcttggtgtgcccagccctttggaggcaaagccaggagaggcgaaaggtggtgctgtgggcatttccctagtacgttagcctagagtcaaaggctgccgttggacaaatttaagttggaggaagcaggaaggaagggggttaccttacaaagaggtggtttcttcagggaattgcagttccttacagtgtcttttcttctttaaaaacatgtattacggccgggcgtggtggctcacacctgtaatcccagcactttgggaggccgaggcgggcagatcacaaggtcaggagatcgagaccatcctagctaacacggtgaaactccgtctctactaaaaatacaaaaaattagccaagtgtggtggtgggcgcctgtagtcccagctactcgggaggctgaggcaggagaatggcgtgaacccaggaggcagaggttgcagtgagccgagattgcaccattcaactctagcctgggtaacagagcgagactccatctcaaaaaacaaataaacaaaaatatctattcctaggagatttgattcagtccttgttggtctgctggtttgtggatttgttgttttattcattcctttatgctgcaattatgaactgaggccctactctgtaccagggactgtgctaggaactgtgtgtacaacagggaaatcagcatctgcccccacacggagggcagagaaagatcaatgctaagaaggaaatgcaacaggggatgagctgagaggtactggaagaggcctgctagggtctgtgctcaaggagggctccctggagaggtgactgggatctgaatggcaagcgggatctggatgagaggacctgggagccgggaccttccaaggagaggtgagcgcaaaggccccgaggcaggggcagcaggtgcgttagggggtcagcattgtaggaatgtagcacatgagggggtggtgaaagttcagttgggagggactggctgggtcaggccccgaggctgtggtagacagtttaattgcagggatgtgaacagtggctgtttatagaatgtgctggttgggctggtaaggcttggacctcttacagcctgagccccttggctcaggtccctagttcagggctgtgcccgtcccataccagttgggcaagagaaggcggatggcttggtgcagagccagctccgttattagaaagtcagccgtgaaaccctgacctcctgactgtggctcaccatttgtatggtgagtgggagtggcctgagctctgcccctcccctctccccccttccccctctccccctgcccatcactccctggatatggagatgccagattcatcactgttatcacagtgcatgcatgagcttggccctgagcaccagaggcagaagtgggggattctagtccagccctgccgctgtctgaccccaggagggttctgtttcttactgtggcttctgagtccccatctgtaacatggggctttgggcaaatactctgctacctctctgagctgcgctgccaagcagtctatgagcgttcaatgccctggtgttaaaaagtcactgataactacagccttatttccttagatctgactccccctgctgcccctaccccaacttctttgactttatttatatatatatttttgaggcagggtctcactctgtcacccaggctggagtacagtggtgtgatcttggctcactgtagccttgacctcctgggctcaagcaatcctcccacctcagcctcccaagtagctgatactacaggcgagcgtcaacatgctcagatttttttttttaattttttgtaaagatggggtctcactatgttgcccaggctggtctcaaactcctggcctcaagcaatcctcccatcttgacctcccaaagtgttgggattggaggcataagccactgtgcccggccttctttcactttagaatttagttactgtgagattgtggacaagacttgctccctctccgtgcctagcttttctcatttgtgaagtggaggttataataataaggtatttatgaactcctgacctcaagtgatctgcccacctcagcctcccaaagtgctgggattacaggcatgaaccactgcgccctgcctattttaattttttttatactgggtctccctctgtcatcgaggctggaatacagtggcaccatcatggctcactgtagccttgacctcccaggctcgatccatcctctaaccttagactgctgagtagctgggactataggcatgtgccaccacacttggctaatttttaaaatatatttttctagggatggggtcttactatgttgcccaggccggtcttgaactcctgggctcaagcaatcctccagccttggcttcctaaagtgctgctgtgattacaggtgtgagccacagtgtctggcctaaaattatcttaagttattgaattagtacatgcttattgttaagataaagaaaagaaaattcatgtgtccaggtgggtatgaagtgaaaagttaagatcccccagtcctgccgctccttctctcttcttagcaggaaatcgatgacgttattggtcctttcaggctgtactcaaacattgaagaatggaacacattgaagtctgctcagtgacttaaagttgttccatatgaaagatttaaaacaaaattctcctctggcacatttcttagccccagtttacacacctttcttgctcagaagcctttggtttaagttctatatacagcgcagcatggtctggaacagccatgagcttgatgaagatagaaaggtccagatcattgcacatggcagcttcgtggctttctcagtccatggaagagaagggcatgggtttggggttgtggggtgctcattcttcttccatgaatatcaggggtccccatgcctacacttaaaagcagattttgggccgggcacagtggctcatgcctataatcccagcactttgggaggccgaggcgggtggattagctgagttcaggagttcgagactagcctggccaacatggtgaaacttcgtctctacgaataatacaaaaaaattagccggacatggtggtgcacgcctgtattctcagctactcaggaggctgaggcaggaaaatcgcttgaacccgggaggtggaggttgcagtgagccgagatcgtgccattgcactccagcctaggtgacaagagcgaaactctgtctcaaaataaataaatacacaagcagagtttgcgtctgctagggtgccttcccgaggctttggatctggtgctaaactctagcctggaaaagcagagatgaggtggccttctccactcaaaaagaagtcctcagcctctggtgcttacaaaaaaaatggaaaaccagcagtttgggaggctgaggtgggcggatcacctgaggtcaggagtttgagaccagcctggccaacgtggtgaaaccccgtctctactaaaaatacaaaaagtagccggacatggttgcatgtgcctataatcccagctacttgggagtctgggtcgggagaatcaattgaacctggaagggagaggttgcactgagctgagatcatgccacagcactccagcctgggcaacagagtgagactctgtctcaaaaaaaaaaaaaaaaaaaaaagccttgggtgagatgctagtgctcccagccacatccttgacagagaaaggagccatgaatggggtccctttttagcaatgcagtttctttgagttttcccagaacgtaagaggggaaaaatgcttcctttttcaacgtaagtaagaggggtgggccagctattgagggcctcggagggtgagagaggggctgtccggcctgtggcagtcatttgggggcccattctctcccttgccccattatttctccaaacaggaccttggcctgagtgcccctgcatgaccatggtcccctctcctgggtggtggcagaggctgtggtggtggccagagccagggacttaggatgtgtcagtcttatgggtgccaggtgacatttgctccaaaagatcaaatgcagggaagaaatgggtattttccagcatgctccgctagaaagggcaggtgtggttttttgttcaaacagaagggaggttggctgtctgcgtacaccgtagccatctgcctcacgagggtcaggatgggaagggcagtattcgagatactttgagatgtttcttgcaactttaaaatggtatttggtgctgggcatggtggctcacgcctgtaatcccagcactttgggtggctgaggcgggaggatgacaaagtcaagagattgagaccagcctggctaacatggtgaaaccccgtctctactaaaaatacaaaaattagctgggtgtggtggcacgtgcctgtaattccagctacttgggaggctgaggcaggagagttgcttgaatcagggagttggaggttgcggtgagctgagatcgcgccgctgcactccagcctggcgacagagtgagactccgtctcaaaaaaaataaataaataaaagtatttgggggaagaggaggggagagtggcactcagaggagcattcaactccccttccgatggcaaaaggcaaaattaaaatgccttcacccccagcagaaagtgagtcatgtcatttgggcctggaatttgaatcgtgtggacggtagaaaaaagcggacaatccgctccacacgtgtgaccgccacacgcgtgaacccgtgagcttgggaggggatatcgtccaagcgaggtctctctgatcccgctggtgtccagactccttctggagttccaatcccacccctggcacactgtccatctctggctggtctgtcgtgaagctggagagccgtgcaaggcgacagagccttctgtgtggcccgtcctggcgctctggggcaagggctgacttgagctgcttcgtctgctcatctgctgtctgccagctgccctcagacctcctcctgggtgcagcccgttcccacttgagagggaggtggtcttcactttagggggtaggcacatccctgtttgcgccttgccccgacagcctcgtcaatgcccagccacttctgagggctggagggacaggaacttcctttcttccccctttctgtctcctcgcgtgggtacaaaagcacgtctgtagtccatgtgtgtgaagagaggacgcattctagagccgcaattcagagacggcggtgcttccaccttctttcagcgattttcatatacaagcgaaaccaagttcttaaagcagatatgatatcccgctaattaaactttcattgccttaaggaatgatttttttcttcctgtgctggattaaaataaaatggcagagggttttgaagagaagagaggatgcatgttttgtttaggtcttctgtacttgtcttctgagaagtgttaaaatatttattaggcttgaaacgcaatgaatggagacagtgacgcaatattcacagaggggccttcaaggctggttgaggtcctcgtttctgcacagatgagtatgcgtcagggggacgtcctttcctggagcggcacatttggaacagtctgaagttggggcactgcatggatatttttctttcaggaaggcaaatcctgctcagccatggcaatgtctgggatctggagaggaggtggcttggtgatataaagaccttgttctgcaggacggttgtgcagagttgcacatctgcaggaagcctccctcctcatttttgtccgagtctcacttccagcagcctgtaggattggatcccaaggcaacgatgctaaacagtttacagtccgggcgtgcagcttgcagatgtggggctgccaaaaccccaaagcttgctaagccgcagctgtcttggccaaaaaaaaaaaaaaaaaaaaaaaagatgcagaatgcagctcagccgccaacttgagttttccgcttcaccagcagccgtttgttggacggatggtggcctcagctctgttcccgtgtcttccactcacctgcggcctcctgcttagcccagatagctccattttcttctttctctgccttgtggacccttaaggagtctgaccgtgttgttcaggtgcccatcacagtccaaacctggtgaggtcatgtctccccctcagggatccctgcttgttggaactgtctgggacccctaggcccatctcattttctgtgtttgagccggggtgaggtgaaatcaacaagccaactggatgagcctccttggactgtcataagcaatgaccccaagtcaagtggcttcaaacagcagaaacgtattcgctcagcagaaacggattgaaaatatgacatcaaggtgttggcagggccctgttctccacaagactctggtgggtggtggcgagagggtgtggggtgtgcttacttgccccttcagcttacagactgctggtggctgccggcactccttagcgctccttggcacgtggctgcatcaccgatgtctccctctgccttcacacgccttcttccctcagtgtgtcccctcctcttctgataaggacacccagtccctggatttagggcctaccctaaatgcagtatgattttattttgagacccttatgcaaccctcttttcaaatgaggtccattctgagattcgaggtgaatgtaagtttgggggaacaccattcaccccactactgacctttggggacatattgtttctcacttagacacatggatacactcttaaagaatgtatttggagccgggcgtggtggctcatgcctgtaatcccggcactttgggaggcctaggagggtggatcacctgaggtcaggagtttgagaccagcctggtcaatgtggtgaaaccccgtctctacttagctgggtgtggtggcgcacacctgtaatcacagctactcaggaggcagaagcaggagaattgcttgaacccaggaggcggagtttgcagtgagccaagatcgtgccactgcactccagcctgggtgacagagtgggactccatctcaaaaaagcaaacaacaacaacaaaaaagaacgtatttgggatcattgtttttagatagggtgtgtttttaaaatttagtatcagtcatttaacattcacgggcagttttccatgttactctctttgcagccctcgtttttattgtcctgccatgcgagtggcagatggcctcatggttgggagtgggggctgcagagcctgccagggctggccttccgcccttctcttttgctcactgttatgggctgaactgtgctcccctccctaatccatatgttgaagtcctaatccccagaatgtgactttatttggagatagggctttaaaggggtaattaacattaaacgaggacattgaggtgagctctaacccaatctgactagtgtccttgtgagaagaggaggtaaggacacacgtgcaccggggagaccctgtgaagacgcagggagaaggtgtggtctacgagccgaggacagcggcctcaggagaaaccaaccctgatggcaccttgacttggacttctagcctccagaactgtgaggaacccctaagcccctcgtttcttcctctgtcaaatgggggtcttcagagcgctggagggagaactgaatgaaagaatgcccacacgctgcccagcgcagggctggagggcactgcagccgcgttggtactagccgggttcatttccccagcctctgctgctgcacagcgcacgatttctcttcagccactggtaaacacttactgggccccagtcacagctcttttccctgtgatagatgaggctctggccagtagctgggcacacgatctctggccactttcttggaagaaagttttaggtgcattctcttttttttttttttttgagacagggtctggctctatcacccaggatggagtgcagtggcgtgatcttagctcactgcagcctcaacctccgcgggcttaggtgatcctcccacctcagcctccttagtagctgggactacaggtgggtgccaccaagccctgctaatttttatatttttagtagagacaggattttgctatccgcccgcctcagcctcccaaagtgctggagtttcaggcatgagccaccgcacccggccttagttgcattctccatcctctaagtcacctttgctgagccccgtcccaggagcaccctgttgctgtgtgctcctgagccaggcccagggggtcgttggccggtggcagtcagaagtctgcccgtgcaccccatgtaaagcaatcaggcttcccacagcccaggcgcacgagggctttgggggcgacatcctctcctttctccagcctgtctgggtccaacagccacagctgcctcccagtcactgcagcagcacgggagatgggcaagggctctcagaggaggaaacctctgcctgagggacttctgcactcgtggggcatttcacacctgccccagtagggagtggcccttatgctcttaataaatagttcgcagccccctcccctcaggcttgctggcagccttgggatctcgggatctcggggtcgagtcctgccagcccggtgcagcccctgagcttcctcccagccgaagcagcctccttccctccccctcctcctctgccctgggtgcccccagcaccggccttttttcttctctactttgaagtctgagcctcagagccactacaggcaaacaggatgttcctctcccacatgcagacttcacacgagacgcttgggtcgcaccgcatcctgcttagagtggtgggtcccatctgcgtggacctggggtgggagtgggtacaggactgaggctgggtgccaggtgggaccttcgtgcaactggtttcattagtcacatttgagcgttcattgcagactttgaactaggtgagcctctgaaagtttccccttggggactcttgtgcctggaagggctgaataaggcagatggtgacgcttgcttagcacgtcggtgggaggccatgaaggagtaatggcgtttctcatcccccacctcagccctggctatgatttttgtattttctgggattaaaaaaaagtttgttttttttttctgtaaacctcagcaaattacaatcacacctggaattacaggatggctacaagatagatgactgctctagtgtggcacaggacaggggcttaaggaggcagggtcttgctgagcagctggaggactcgggcaagactagaagggcaccaggggatgggcaggcgctagtttaacagtttaaagaaaacctaaagtcccaggtctttctctgggttgtggactctgtttatagcacagtgactcaggcagttctgctgtggttgaagccatcttgggaagatgaaggtgtaaaatttgagggttccagttccctcctgaagcacctcccatcctccaagcagatgttctgagtcctttgagtccctcagatgtttgttttattttttatttttattttatttctttttttttgagacagagtctcactctgttgcccaggctggagtgcagtggtgtgatctcagctcactgcagcctttgcctcctgggttcaagtgattctttggcctcagcctcctgaatagctgggactacaggtgtgtgccaccacgctcggctaatttttgtatttttagtagagacggggtttcaccatattggccaggctggtcttgaactcctgacctcaagtgatccacctgcctccacctcccaaagtgctgggattacaggtgtgagccaccgcccccagcaccctcagatgtttaatttacaaaatagtgtatgtgtgttgggagagggcagccttaaaagatgtcagggttttaccatccacttgacaaccccgcctggcagtcagtgacattctagacatctctggaactttccacttggttgttccgtgtaccagggtgaaccatgtggatttttagttgcagagtgtactgcgagttaagtggaaaggtctgagagagagagaaatgaggggtgggaaagagatcatagcccttgacagctggaaaaggctttgtgcttctctttctctgcccctttcctggggcaagggaggagggcagatggcacaggattgggtagcagtgggggagaatgaatgctggtcacaaggactgtggcccagaaaagaggttcagtggcggccagaggaagctactgtgcctggggacagccctctgagcacctgccatgccggcgggggcagccgtctaatctggggcacttcagctctgtcgggtgtcctcttcgctcacctgacataccttagagttgtttcattctagggatgtgctccccagcctgtctgatggcacagatgttggcattctgcagctggctgctctattctttatttgggacctgttcccttgctaagattatagttttgctgccctgccctgcagtgagcacgcctcattttgactcctggtacaataataggtttgtttgagatctcggatgccagacttactgggagtcttaacaatgctggcatcatatgatatgtcagtgatctttttaacaccactgtctctacagaaatggtttctattcggctgtctcaagctcttggagaaatacatccttgtcttatctaggcaaataaagtggagagtcttgaaggacttcttggtacaagggtctgaatcagtgctgtgtgaatctatatttccgtggaaaataaaggcatatttgttcatgtgactgtctatatattccattgagattattgcataatgaccaaaaatctccaggaaatctgccttgtctagcagatgacttatttgagctttcttagtgtgttctttgcatgtgttagtattctttggcacatggtaggtattaatacatatctgatgggatgatttatggcctggattagcctcagccttcagactcttttttcttttcctccttagatctttaatctcatgaagtacgacagctacagccgcttcttaaagtctgacttgtttttaaaacacaagcgaaccgaggaagaggaagaagatttgcctgatgctcaaactgcagctaaaagagcttccagaatttataacacatgagcccccaaaaagccgggactggcagctttaagaagcaaaggaatttcctctcaggaccgtgccgggtttatcattgctttgttatttgtaaggactgaaatgtacaaaacccttcaatgggatgtgtgttttattaactgcttcaccagtaaattttgcatgatggctaagctaacataaaaaaagaataataataacttggaagttttagtttacaaaacagagattccttcaacactggacacgtcgagcattttgtagcttaattaaacctcatgtaaggccacaaggtgaaacgtatcacactaccttttaccttgtaagtgtttgctctgcctctctggtgagtggacgcatgtccacaggtcacttggtaaattaactcaaacatgagttgatccggcaaacccaggctactgggggtatggcctgccagtcgccttttgggttaaatatttctcgagagcaagttcagtgctggaaaaagaaaatgaatcactgacagcctctaaagacttgggaagcttgtgtgtgagtgtcatcaaagggttattatttcttgtgcgtgggttggtcctggttttgaccacaacccatgacatttcatgcaacacagataaatagttcatcttgacagaaacaagatctcaaccaggaaggaaaaaaaacacaagtgggaaattgttcagggtccccatggcaactcaaggtgttgttgaatgggattgtagcacaggtgcgtactgaggttggagttggtggggctgttcccttctcctgtacccatcggggacacatcataatcctttcctctctgctcctgccctttgctgaacttgctaactctggcttgagacttcaacggggaaaagaaatgctgccttgaagcctgcccttcttgggtgaggaggctgtgaatggggcacgcttgggccaggcggggcacgcttgggccaggctgtccccgccagcccaggaactccacttttagagcagagcccaccagggccaaggtcaggctcagttccctttggtgaattgttcctgctatttgtagggggttgggtgctgccaccaggccttttccaggatgtttgctaagccctttctatttgtacaaagtgaccagcttctgttgcgtgtgagcctcccaactcagactttcctgtttgcaaaattcactaatgttgaaggtggctgtataatttatcaatcaaactaggacacttttgggagaaaagagggggtgatctcaataattagactaggataatgcctattacaagccctaatctggttctagtctgggtcagttaccctactgatggctgtcccccatatgagctcctgggcagccccccagattccctagcctcgctgtctagacactgtggtcaaatgtttcctgcccttccatccagggcctgggaaagggatggtcttcagggaaccgttcactgccaagcactaaataacccaacaacattcatcagaaacagcaaacacaggcttctccaccctcctcaggtacttcccagacaggcctactctgcgcctgtcttctctctgcctatttccagaacttaggaaggagacggttatgctgagaatgacacacaagggccccgtgatcagagaaattcagttcattgtcaagcagagcagattggtgcatttattatttatttttgagacagagtgtcgctctgttgcccaggctggagtgcagtggcatgatcttggctcactgcaacctatgcctcatgggttaaagcgattcttctgcctcagcctcctgattagctgggattacaggcatgcaccaccatgcctggctaatttttgtatttttagtagagacggggtttgaccatgttggtcaggctagtctcaaattcctgacctcgtgatcctcctgcctcggcctcccaaagtgctgggattacaggcatgagccaccgcgccaggcctattttttattttttgagatggagtctcactctgtctcccaggctggagtgcagtggcatgatctcaggtcactgcaacctccgcctcccaggttcaagcgattcttgtgcctcagcctcccaagtagctggaattacaggcacccactatcatgcccagctaatttttgcatttttagtagagtcgggttttcaccatgttggccaggctggtctcgaactcctgccttcaagtgatctgcccccctcagccttccaaagtgctgggattacaggtgtgagccaccgcgcctggctagattgatgcattttaaagagtaaagatgaaaaacaacacaggttctctagctcagctttcggtttattaaccggatgcagttcggttattcagggatgtggggacagcccactgcaccattgcagacgtagggaggcttcatggcgacctgattgattccctttggaagagcctgttgtgggcaggtcccagagactgaaggtgggcgaggaggctgctctctgacttttccccttttatcaatgggtgcagagactctttgagatgaccatctctttttaagagtttgaataaagcaaatagccagagttagccagaagatcggacattaaaagaaaagccttccgcccgcccccacttaggagctgcctgaagagctgaatgccagcagggtggtgagcctcagagtttaatcaccacttactcctactagcgtgaacttatgccactccctctggcttgctcctgcctgattgcctacgtctatgccagtcgcagaaatgaggcatatgcagaatttagtgtcctgaagcaattgcaaatgtgaggctgaagtgtagggacccgcgtagccaaacagatgcttctacccagccctttgctttcgtccctatgcccatccattcatcgattagcgttgaaattgtatctttggctgggtgtggcggctcacacctgtaatcccagcgctttgggaggccgaggcaggtggatcacctgaggtcagaagcttgagaccagcctggccaacatggtgaaactctgtctctactaaaaatacaaatattagctgggcatgatggcgcatgccagtaattcagctactcaggaggtagaggcaggagaatcgcttgaatccgggaggcgaaggttgcagtgagctgctctccagcctgggcaacagagcaaaactctggcttaaaaaagaaagaaagagagagggggcggggggggcggggtggggagagagggagagagagagagaaagaaagaaagaaaaaagaaagaaagagaaagaaattgtgttttcaacgtgccagagactgtgctaggtgccgagattcacagggggaaataaagcagcaatgatgatctgtgctccggtggggtttacagatgtatgaaaatacaggttttcttactattcaggcctaatgaggccaacagtcaggagacaactgccactggagagagtttgttgctcgcagttcctaagctgaggtggcatgcgatagtcatgcaggtccacgtgggggaagcaccagggtcaggaggcagcccagagggaaaatgtgggcaagagcctctactgtggtttctttggaaaaggcaagcagggtaaacaggcttcggacgggctggtttgagtcatttcagcaggctctggggtatagggactgtccctagttgtctggccagcccgtgaggtgcttagggcagatgggtcatggcccccagtgtgagagtctgatcaaggaggcatctgggttacatgctctggattggttgctttgcatattaaaggtacaccctagttgtttactatctctaggaattagggggccctgcccgggaggggcagtctctccagtgtcagcaaggccccaggtgagcattggaataaaaagacgtgctagagacccagcatggtggctcacgcctgtaatcccagcactttgggaggttggggcgggcggatcacctaaagtcaggagtttgagaccagcctggccaacgtggtgaaactccgtctctactaaaaatacaaaaattagccggtgtggtggcgcacacctgtaatcccagctactagggaacctcaggcaggagaatcactggaacctgggaggcagaggttgcagtgagctgagattgtggcactgcacccagtctgggccacagagcgagactccatctgaaaaaaaaaaagacatgcttgatacagccatctgcaggggtctcagactcccagccagcaggccatagatgcgttttgctgtttcatggggtgtaagttttaaatctttttgcaaatgcctgaagcagagcatgattgtaatctctagttggctgcaggccccaccattccctattgccttacagcaggccactcccatatttgtgttatctgctggctccatattttgtactctgatttctagttcccatgtgcagagagcacagcctgggtggccttgtcttctgtgactttgcagtcattcattatacctccaaatccactctgcttacctgctggctttctgagagtaagttgcacaccatgtctaaccgtggtcctgcactgccccgccttctcaattgcagaactcccctctgaggtgtgaggggaaccacatcacacttgtggaacccctttccaagtgcttctttcccatcgcgtcatcgcaaacccttaaaaagtggggggacagctattcctcctgttttagagatgggaacaccaaaatggatgacgtggctcacatgagcacatgcttgtgagtggcagagtctgggacaggagccaaaccttctgtctcctacccagctccctttttggtccatcctctgcctggacagggccttcgggaagtccagggctggagtgaacattggccttttgggaaagatgctcatccactcacacaacagatatttaatgtgcacctattacatccaggccaaatactagacacaggaatgtagggggatgaaagaatgaggcattaaccctgcccttggagagcaattggctaggagaggacatgaagtctgcaccaacaactgccatcagaaagaaagtgaccagcccctgggagagggactgatgggacatgcctgggtggttgggctcatctcttcagtttacgagcggggttgttttgcctttcccataaatatcaggatgttaagtttcatgttgacactggcagtgaagtgattctttcaaacaatgtgagcatgagtgctctgttcttcagggaataagctttttatttcagttttaagtgaactccagatagcaaagtgacagtcagttagctaagttcccctcatgacttgctaatgaggacacgtgtccttttgtgtgtgatagagttaagggctgattaattggtacccaactctcaggccatggctctgaatttgggaggatgctttgtttacaatctttgcaaactactcatgactcacattctgtcattatttactttcattttggctgcagatgttctagaacttgcatttatttaagtgctaaatagtcttgtaacattagcttccagggttttaaaaactcttttcttcacaaggttagttgcgtccaatgcagtgagtactgtaaaaagtctggtgcccaggcagggagggaagaaacttcacacacagctggagccaggggtagaatcactgtgttgaaatggtccctaaaccttgggcagagcccagggctccccttggattgccacagacactacaagctttgcaagtccaaaattgaccaggtctctgagtgagaatcaggggcttgagcaacttcgcacttgcaagggagggtctcagggtgagggtcttgcacgggtgccctgtgctgcatgcttgtttagaggagcccttttcctgattcccacaaggccactgggtaggggcagctggaagtggcctgagagtctcctctgtcctgcacttcgacatctgatcatcagaaagtcctctagattcttctccaaaatatagcttcaccgtgtccatgcctgccatctccatggccacgggccctgaccaggtcacctcatctcttgcccagaggctcctcctcctagctggtctgtcctcctcacgccacacccctgctcctcatcttcatctagtatccttcttttttttttttaagagacatggtctcactctgttgcccaggctggagggcagtggtgtgatcatagctcactgcagcctcaaacccctgggctccagtgatcctcccacctcagcctcctgagtagctggtgctataggcacacaccaccacacctggctaatttgttatatatatatgtgtgtgtgtgtgtgtgtgtgtgtgtgtgtatgtgtgtgtgtatataatatatatatatatatatatatttttttttttttttgtatagatgggggtctccctatgttgcccaggctggtcttgaactcctcaccctaagcgatcctccagccttggcctcctagagtgccgggattacaggtgtgagccatcgcgtctggcctagtatccagttttttaaaagaacaaacctggtcatgctgctcactcttcttaagccccttttgtgtctttttcttgttctcaacatcaaaattcagatcataaccaaggcccgggacatgtagctcagtcccacctcaccctccatcctccacgactggcccttcccagcctcacaggcctgaagccgaccggaagcaaggcaggatgttgcttcccgcagcctttgcgtgggccacggccaatgcgcagagtggcttcctccagaccctggtgtggccggctccttctcatccttcaggtctcaggctgtgtgttagctcctgaggaggggaccgaacccctcgaggcagccccttccccctcattcacagcctgccaccccagggctgcccattgctcatggccaatccatgcctttgtcataaaaacacagattggaggccgggcgcagtggctcattcctgtaatcccagcattttaggagactgagacgggcagatcacttgacgtcaggagttctagaccagcctagtcaacatggtgaaaccccgtctctactaaaaatacaaaaattagccgggcgtggtggtggatgtctgtaatcccagctacttgggaggctgaggcaggagaattgcttgaacctagcaggcagaggttgcagtgagccaagattgtgctactgcactccagcctgggagacacagtgagactccatctcaaaaaaaaaaaaaacaataaaaaaaacacagattggagggagagaagcccaccctttcatgagcacctcccctgtgtgcaggagatgtgacttccactgtgtcagtggagaagtgagctccagcagcattgaaactgcactaggtcaccacgactcatagtggggctaggactggaacccaggtcttttggatccccagagcccaccatccatcactacaccaggctgggcttatccagctcaggcaaatctttggtcattcctgctggaaaatgtgactctgtctctgttctcccaggaagaaggctactacccagccagtcttggcccattctaccctttcctctatgggatacacagagggccccggccccagccagggaggcagagtcaatgcttctttaaaaagcctagtttgtgtttgcaaccagttttgttttttgttttttgtttttcctttagtgatatatcatgagcatctttccatgccaataaacataattatatacaatccaaaaaaaaggcctgttttgagattatctaggaaagataaatgtttcccttgtgctaattccagcaccgtttatatgctgctttgcaacacaggcaaactgttttcttcttctttaagcatttaaactctgttttttaaactgttatggcatacagatcgcaaagagtaacagatgtctgcctgatagacttgtttcccaggaaaagaatctgctgcttcttggtctccagaggaaggatgactttgaaagtatgtggcttttggtctccttctgcccctctcacccccataagaatgggggaagaaatagagcaccgcagactgcctcataaatatctgtgtctacagatcctggctgattgcagaggcagaggcgagactctgatctcccaggaggctgtccctgtgcctcccaaagggaatatttctctcttttttcctaaaggagcgaggtcactcatcatgacctgaaaacatgaaaatgtgggtccacctttactaaatttgcaggtttccccagaaccttagcactaaaagaacctctgtcaactatcatcatcattattattatttttgagatggagtcatgctctgtcacccagactggagggcagcagtgcactcttcgctcactgcaacctctgcttctgggttcaagcaattctcctgcctcagcctcccgagtagctgggattacaggtgtgcgccaccacgcccggccaatttttgtagcattcgaagagatggcgtttcaccatgttggccaggctggtctcaaactcctgacttcaagtgatccacccacctcagcctcccaaagtgctgggattacagacacgagccactgcgcctagcctcattatttgtttattattattattttactattggttagcatgagaattgtggttatgttcatgtcatgaagttcaactgcctaaattctatcccagctccgtcgcttattagccctgtgagcttgcgtaagccatcatggatcttttcaagcccaagttttctcaattattagatgggataatattggtccctatgccttagtctgtttcagctgctataacaaaatacctgggtaactcaaaaacaacagatatttattgctcacagttctggaggctgggaagcccaagattaaagacactgacagatgaggtgtttggtgagagcctgtttctcatccatggtgccttttatgtcctcacatgctgggcacatgctcagctggaaagggcaagcaagttccctagggtctctgagcactgattcccattcattcaggtgccgacccagagccttcatgacctaatcacccgcgaaaggccctgcctcttttttttttttgagatggagtctcgctctgtcacccaagctggagtgcagtggcatgatatgggctcactgcaacctctgcctcctgggttcaagcgattctcctgcctcagcctcctgagtagctgggattacaggcatgcgccaccacgcctggctaatttttgtatttttggtagagaggaggttttgccatgttggccagggtggtctcgaactcctgacctcaagtgatccgcccgccttggcctcccaaagtgctgggattacaggtgtgagccactgtgccccagccggccctgcctcttgatatcatcacactggggactcggtttcaacatgtgaatttggggcgggggtcgggggcggcacaaacattcagacgctagcactatataaaatccaatgagataatacatgcaatgtgcgcagcacagtgccttgcgcacagcggcttaataaaccttggtgattattatgaggccaccaaaccagggataggtcgtgtggtctgcctaaggtgcgcagggaagggtagcagatcccggccgggtctgactcctggatccttgcctgggactctttcactgtccccccagtcccccgcacacacatgcacacgatgttaccccgcgttcgagtcgtgatcgacgggcagccagctggacctgaatgtcattcaaatgattgcaggctcgaaaccaggggtgggggggctctcaggagaggatttgggcccagaaggggacatgcagggggaagccagagaagtgagagggagatctgagtggtgggtgccccagcagcgtaatatggctccatttccaacctggaaccaggttgttgcctctccagacattttgtgtccgaaggaaggggaagggaattcagtagacattctttggaggagcctcttggacttcggtgactttttcttgacaagaaccatggtctcctagggcagagctgcccacatgcttttctgggaggtcccgggctccccaggctccttggagtagaaggaagtctggggacccccgagagcctgcctgaaattcctggcttgagctcacgggggagctggtgagctgtggagggaggcagctcccggggttcttgcgggtccctgcagcacgggaggaccctccaaggccctgggcacccatcctggtcagaccgtcccctcccaccaacttttctccttgtctctcccagaagggtgccctggggagaccctctccccagaggctgggactgggcaggaaggtggggcagctgctcccatcctttctgccccgcacagttcaggcagttcatcttcgggcaggaagatgaggtttcgaggtacttcctgggcttgcgctgacgtttttgactaccgtccccgcccccaccccgccccactctctagtt

SEQ ID NO: 2052 - DNA, 1144 bp, Homo sapiens
tcctcgccttcctccggctcagccgccgcgccgccgggctgctccttcttcctcctcgggcgcccgcggcgatgttcaaccgcgccgtgagccggctgagcaggaagcggccgccgtcagacatccacgacagcgatggcagttccagcagcagccaccagagcctcaagagcacagccaaatgggcggcatccctggagaatctgctggaagacccagaaggcgtgaaaagatttagggaatttttaaaaaaggaattcagtgaagaaaatgttttgttttggctagcatgtgaagattttaagaaaatgcaagataagacgcagatgcaggaaaaggcaaaggagatctacatgacctttctgtccagcaaggcctcatcacaggtcaacgtggaggggcagtctcggctcaacgagaagatcctggaagaaccgcaccctctgatgttccagaaactccaggaccagatctttaatctcatgaagtacgacagctacagccgcttcttaaagtctgacttgtttttaaaacacaagcgaaccgaggaagaggaagaagatttgcctgatgctcaaactgcagctaaaagagcttccagaatttataacacatgagcccccaaaaagccgggactggcagctttaagaagcaaaggaatttcctctcaggaccgtgccgggtttatcattgctttgttatttgtaaggactgaaatgtacaaaacccttcaatgggatgtgtgttttattaactgcttcaccagtaaattttgcatgatggctaagctaacataaaaaaagaataataataacttggaagttttagtttacaaaacagagattccttcaacactggacacgtcgagcattttgtagcttaattaaacctcatgtaaggccacaaggtgaaacgtatcacactaccttttaccttgtaagtgtttgctctgcctctctggtgagtggacgcatgtccacaggtcacttggtaaattaactcaaacatgagttgatccggcaaacccaggctactgggggtatggcctgccagtcgccttttgggttaaatatttctcgagagcaagttcagtgctggaaaaagaaaatgaatcactgacagcctctaaagacttgggaagctt

SEQ ID NO: 2053 - protein, 179 aa, Homo sapiens
MFNRAVSRLSRKRPPSDIHDSDGSSSSSHQSLKSTAKWAASLENLLEDPEGVKRFREFLKKEFSEENVLFWLACEDFKKMQDKTQMQEKAKEIYMTFLSSKASSQVNVEGQSRLNEKIEPHPLMFQKLQDQIFNLMKYDSYSRFLKSDLFLKHKRTEEEEEDLPDAQTAAKRASRIYNT

SEQ ID NO: 2054 - DNA, 1085 bp, Homo sapiens
gggaaggcagtggattgttggtctgcgtggaacttctcaggtggacaccagagcatggaacacatccacgacagcgatggcagttccagcagcagccaccagagcctcaagagcacagccaaatgggcggcatccctggagaatctgctggaagacccagaaggcgtgaaaagatttagggaatttttaaaaaaggaattcagtgaagaaaatgttttgttttggctagcatgtgaagattttaagaaaatgcaagataagacgcagatgcaggaaaaggcaaaggagatctacatgacctttctgtccagcaaggcctcatcacaggtcaacgtggaggggcagtctcggctcaacgagaagatcctggaagaaccgcaccctctgatgttccagaaactccaggaccagatctttaatctcatgaagtacgacagctacagccgcttcttaaagtctgacttgtttttaaaacacaagcgaaccgaggaagaggaagaagatttgcctgatgctcaaactgcagctaaaagagcttccagaatttataacacatgagcccccaaaaagccgggactggcagctttaagaagcaaaggaatttcctctcaggaccgtgccgggtttatcattgctttgttatttgtaaggactgaaatgtacaaaacccttcaatgggatgtgtgttttattaactgcttcaccagtaaattttgcatgatggctaagctaacataaaaaaagaataataataacttggaagttttagtttacaaaacagagattccttcaacactggacacgtcgagcattttgtagcttaattaaacctcatgtaaggccacaaggtgaaacgtatcacactaccttttaccttgtaagtgtttgctctgcctctctggtgagtggacgcatgtccacaggtcacttggtaaattaactcaaacatgagttgatccggcaaacccaggctactgggggtatggcctgccagtcgccttttgggttaaatatttctcgagagcaagttcagtgctggaaaaagaaaatgaatcactgacagcctctaaagacttgggaagctt

SEQ ID NO: 2055 - protein, 165 aa, Homo sapiens
MEHIHDSDGSSSSSHQSLKSTAKWAASLENLLEDPEGVKRFREFLKKEFSEENVLFWLACEDFKKMQDKTQMQEKAKEIYMTFLSSKASSQVNVEGQSRLNEKIEPHPLMFQKLQDQIFNLMKYDSYSRFLKSDLFLKHKRTEEEEEDLPDAQTAAKRASRIYNT

SEQ ID NO: 2056 - DNA, 1049 bp, Homo sapiens
atgcagtctgaactttgctttgcagacatccacgacagcgatggcagttccagcagcagccaccagagcctcaagagcacagccaaatgggcggcatccctggagaatctgctggaagacccagaaggcgtgaaaagatttagggaatttttaaaaaaggaattcagtgaagaaaatgttttgttttggctagcatgtgaagattttaagaaaatgcaagataagacgcagatgcaggaaaaggcaaaggagatctacatgacctttctgtccagcaaggcctcatcacaggtcaacgtggaggggcagtctcggctcaacgagaagatcctggaagaaccgcaccctctgatgttccagaaactccaggaccagatctttaatctcatgaagtacgacagctacagccgcttcttaaagtctgacttgtttttaaaacacaagcgaaccgaggaagaggaagaagatttgcctgatgctcaaactgcagctaaaagagcttccagaatttataacacatgagcccccaaaaagccgggactggcagctttaagaagcaaaggaatttcctctcaggaccgtgccgggtttatcattgctttgttatttgtaaggactgaaatgtacaaaacccttcaatgggatgtgtgttttattaactgcttcaccagtaaattttgcatgatggctaagctaacataaaaaaagaataataataacttggaagttttagtttacaaaacagagattccttcaacactggacacgtcgagcattttgtagcttaattaaacctcatgtaaggccacaaggtgaaacgtatcacactaccttttaccttgtaagtgtttgctctgcctctctggtgagtggacgcatgtccacaggtcacttggtaaattaactcaaacatgagttgatccggcaaacccaggctactgggggtatggcctgccagtcgccttttgggttaaatatttctcgagagcaagttcagtgctggaaaaagaaaatgaatcactgacagcctctaaagacttgggaagctt

SEQ ID NO: 2057 - protein, 171 aa, Homo sapiens
MQSELCFADIHDSDGSSSSSHQSLKSTAKWAASLENLLEDPEGVKRFREFLKKEFSEENVLFWLACEDFKKMQDKTQMQEKAKEIYMTFLSSKASSQVNVEGQSRLNEKIEPHPLMFQKLQDQIFNLMKYDSYSRFLKSDLFLKHKRTEEEEEDLPDAQTAAKRASRIYNT

SEQ ID NO: 2058 - DNA, 22599 bp, Mus musculus
agtcccctgccccacctccaaccttgcccaagccttgcctgttcacaccaacaaggattccccagttattatttaaagacacctcagtgctcacatgccatagatgacccttgcttatggtttacacttccctgtttgtagagcagcccaccacccctctgtcctcttgggctccctattccccgatgagacagtgggatttagcaccatgaacacatgtctctgtaggccatcactaaagagtattaagtgtgtaaagaaatcccgggctcctgccatcttgtggctctgcacctctaggacccttggacaatatgcccttccttctaggggcagaggagagaaagggggagatccttctggaaacctttatgagccagattagaagtgactgtgttgccacttgtgaggccagggaacataaccacagagtgggtgcttcctagccgtctctccccaccatggcctggccttccacttctaagtcttttctctcttctatcctaaggtctcttctgttatgctcacaatgatggcctcgtaggctttgcagatggggctgacctgctcaggatagtatgtacccttgccctatagcagcaggactctgtagctgggccactgtgcttctgttgagaggagacagtctgggctttcaactagatgattcaagtatagcccagacccatgtaaaggaatgggaaagaagggctctacctacaaaggagcgtgtgggcatgggtgcagctagccgaagtagacgccagtgtacagtggatggtcacagaaaataaggaccaaatgggcccctaaacatggactttgggaaaagaaacaagggaaatgtcccacttcctggtgagtccccaagccctgaggagagtgtgggaaagtggaagagccagggaacagcaagggccccagggtgacagtggaccttcctctagcttttctaacagcagcccccagtgcacagcctcagccttcaggaatgtcctgtcgatggccagagctgccaaagagaatggacaggacccaggagtgaggcccaggcaggtggccggcagctctgacactttcctggccgcagtctgtgtcccctatggacactgctgaggtttggggggcttaagcatctgggtgtaggggagagtttccagaccttttggcccatctgctcagctctcacttggagggcttgtgttgttgagatgtctgaaatatttgttttccaaaggattaacttccagatgattccagaagggccaggaacaatccacaaggctggaggaaggaggcccttgttcccttttgaatgcaaacagtatcctccacctagacagaccagggtgacctatttttcttcctctaggcaccatttgattactctactgggtcaatcactggtcccttcagtaaatgcatcctaaagctgtggctggggcatccatggtggggagaggcagccagcaagcacctgctctgtgagtggtaaccttggtcagcaccactttttgctaagtagttagtgaggtggtagccttcaagaggtcactgtcacaagactggatttggcctggcctcccttcacagcctgatctgccagcttctccccttatgcaccggggccacttctcttgttattgtccgtacatagatataggtcagcacccactctgcccctagaaatcaagttgatgagttactacctgccctaagaaccttcttcaccttcctgggtttcacccacctcacatgatagctcaagggatagtggtggtcctatgatgcaagggaacatggatggtggcctggcccacctggtaagaccagcctgcaggagtgagggaggactcctgaaaacacagtttgtcttcgaggtcagggtctgtgtatgtttgctcagtccccgaataagaactcagatcaaagatgatgctcatatgccttttgcagccagagcagaaacagtgatgaggctgttagggtgcactgtaatagatgcagaaggatgaggaagaaaacagatgggtttgccaaggcaagctggcacctttcatgaggaagctgtaaagcatccatctcagtactcataccagctgcgggtcaagcctgagatggtgggctagctagagcagcagagggctaacacacacctgggctgcagcagcaagcagaactcttgggaaggctacagggcagaggcagaaagcagccaggattgctgaaacagtggagacaccatgtatagatggcctcaaagtggtgactgaaaaaccagactcagcactcgacagtccctcagacacgcttggctccctcttttctctctatgcccatctccagaatcctcttttgggactaagctgtcatgctttgtgtctacctagtatattgtaggagacccagtatgcctgccagggctcatcaatggatacccatgatgcctgcagaccaaagcacagtgctcatgggtcaaaccagaaataagcaagccacggtgttccattgcagactgctgctcaggttctgagaccaagtcagaaaaaagatgtgcaagatgcaggacaagtcccaggccatgtggacattacatgggcatgtgggaacccaagtggacagtcaaacttatgtctgtcccttgccactttggattgcatcaaaatgtcccccccagttcaggcctgtcctcacctgaacattgggttgatgcagatgactcaatgatccttcctcatctactcaggataagggtgccctggaattgatggtggtgtctgcatccattagaagagaacatttagactcagacataaacacacaggggaagcttctgtaaacaagaagcccgggtttggggaatgtagtcacaagttaaggacccctaggatctcctgagcttgggagaagcaggtaggacccctcctggagccttctaagaaacacttgatcttggatttatggtcttcagagctgtgctagaataaattcctgcttttggaagcaacccccaaatacccacacatactcccaaacaacagtaaggggttgccaaggcaagctggcacctttcaagaggaagctgcaaagcattcagctcagtactcataccagctgagggtcaagcctgagatggtgggctagctagagcaacaaagggctaacaccacaaacctgggctgcagcagaaagcatttggaacccacctctgacacacagtttctgttgctttctgttttagtcagtgttctattgctgtggagagacatcatgattgtggcaactcttatttttttttaaaaaaaaagcatttattttgggtttgcttaccgctttagaggtttagtctgctacatccagatccataggcagcaggaagagaaagccattgggcctggtttgggcccttgaaacctccaaagcccagtggcacacttcctctgaacaaggccatgcctccttattgtttcaaatagtgccactcctggtgaccaagtagtcaaatctatgaacctatgggtgccatcaagctactacactcttcttccctccaggttaatcttatttaggctagttgaccaagggctgtaagaaacattaagaagtgagtgttcagaaaagcagaatcataaattagacatggtggtgcacttatcatccaacactcaggggatgaaggcaggaagatcagagattaaaggtcatctttattacatagctagtctgaggtcagcatgggctacaagaaaccatcttcctacacaaaaatcagttttcttgtaccccacaatttcaaggccaaagtcaaggtgcccatgcctgtagagctgatttctccttaggttgtatatggtttatagatggcatctccaatcttctttgaatgacacattatgtcctgtccctatccaagtcataccctggtattcatgtccccatccttggataggaatgtgtctatatctacatgctgatgataccattgtgcccatgtttcacataggtgacacctctgtgcccatgtcctatccaggtgacacctttgtggcattatcccctccatatgacacctacgcccatgtcccatctaggaggcagctatgtttgtgtcctatcttggtaacacctttatgcttaggtcctatccaggtgttatctctattcttgcattctatccaggagacacccctgtgcccttatccattcaagatgacaactctgttttgttgtcctgtggaatccatgtgcctatgtttcattcaggaaacacctctgtgtacgtccattgggactcctatgcccatgccccatacaaatgacacctttgtacccatgtcccgtccaaaagattcctctgtgtctgtgttccatctatgtgtctatatgtcccatctatgtgtcctatctatgtgtcccatctatgtgtctagaaggtctagaaggtatctcttctgtatatagaaagatctctatacccatgtccttcctgggtaatacctctgagcctgcatcttattgaagtgatattctgtgtccatgtcctatataagtaacactcttatacctatgttctctccagattacagacaccactgggcccatgttatatccaggtggcacatcagtgcccatgtcctgttcaggtaatactcctgtgtccatatcccatctgtgtgacactcctgtgtccatgccccacctgtgtgacactcctgtgtccatatcccctatgtgtgacactcctgtgtccatgtcccatctatgtgacacttctgggtgcatatcccatctatgtgacactcccatgtccatgtcccagctatgtcactcttttgtggtgttgttttgttttgttttttgagacagggtttctctgtgtagccttggctgtcctggaactcactttatagaccaggctggcctcgaactcagaaatctgcctgcctctgcctcccaagtgctgggaccagctatgtcactcttatgtaccaacttatctaagtcaatatcatattgtcatgttagcatcatctacaagcttttgtccagatactaggtggcaccaccatgctcacagtggtataaaagacacattgtgtggttagttctatatggggatggtgtccagaaggggacaacgggagctggttcccaactgagagggccatagtgtgagtttaggacataagtcttggccatgaactcagaagagactgaggctcccctggatgtttcacttccactctctctatgctcattctttaggaacgttactaagaaggaatctgagaaagcagagctctttctccaccacttgtctaagttccacagccaacaacagggctcagactaggctctcactggatactagcccccattagagtaccatgcttcagttaggttctgtttgcccaccagctgctagccatcacctagtcctcaatgtcacgtactattacaatggccaaaacagactagacttgaccccaagagcccccctccccgccaaagcttactgccctcattgtactttctgccctggcagtccccagattgacaaaggcatgcctaacttgtttctggaagaagagatctagctctatcccatcgaaatgcaaatgaaccactaggagtttagcctgaccaaggaagctttcctgctcactgtccattcaatgcagtcaaaagtgctgtgactatacaggaggaacatagcagtgctgtgaccatacaggaggaacatagcagaggctaaagggccatggtgccatgtaagtgtgttctgtgcagcaactgatgaccagacagtactgagtctgcctggagcctgagttaaaaccgagaaaatagccattgcctacagttcccgaatcaccacaaggaaagaaaaaggttggtgagaaaatagagattctattttcatgtccgggggatgagcgtgcagggcacttacacccaggactcaaaggaacatgctacattcacacgagcatccaggaggcataagaattctgcaaggagaccatgccctattcttggacgtctgctgaatcagttgtggggtttatacgcgggagttgccgcgtggtggcagcaaaatcgattgcgccaaacctaaagagcccccccacccctggtattggaattcacaaatggcaatgctgtgggtcacccaagttcagtacctcaggggggtcacaaatgccactaggggggcaggacacatgcattttctaggctggtacctcgtggactcggactcccaaatcaacaaggtcggcttactctctgcaaagaatcctttgtgtgtaaagaccagggttgccgcacggcggcagtgaagtctcgtacatcgcagtcctaaaacggattgcaactgattgagttttctcccctatcaccatctatgatcccatagtcatgggcttcatgaggccaggggttcatgctagtccttgataaaacgttctcaagagctatctcaggtatctgacttatagggttctggggccatcagcgctattgtgtgaaaattgaagtatagctactatgtgtggtgatcatggaatgtattgcagtaccataatgcagaccccactaagcatggtcctcaaattctgcacatctatgaggacacctgacctccctacccaaagaatcacttaaggaaccgccaacaagaaagtctggtgatttgcgctttcgtattctaattggggcgttcagatgctaatgatctccggctcagggctgcaaacaattctgaaactgcattctctctcaatggggctcagctgccagcttggcagctgaggaatcctacatcaagccttgggtgtcagcccaaaatcaattgaagaggtggtaggacccctggctggtttgtggcagataatcgtacttatggcaaagttggggttcacctgttttgcactgtcccggagagccttgttaaaagcagaaggcaggacacctatgcccttccggaatggtctcctttggtctcagaccccataaaccagtgcatgtggttcgatgccagaaagcacaaaagccgttgtgagtggaaagaccaaattgctgcgctggtgactgtcatcttaaacattatgttccagagacagccaaagttaaggtttgcccatgacaatgtccaagggccaaagttcgggttcgcccacagcaatgtccgaagccgctatgcctcagtggtcgatatggtttataagaggttggaacacttgtgtttctggagggggtccctttggtcactgaaccccaaaaccagccagtgtggctcactataggaaggcatagaagctgttatgtgcaacaagggaacggatgctaccgcgcggtggcagcatactcctatatatcgtggcccaaatgctgccaacttggggggagcgattcattcccagcaatatcccagggtcacccaaatagggattcataggggtggtaagatgtgtgcacctctggaatggttcccttacacactgaaccagagaacttgactcattccctacacagcccgagatcgtcagtggctggtaagaccgaagttgccgagcagcgaccagtgcagtcccacatactttatcatagaggtgaccaaaattgcggttcacctatggcaaactcatgggtcactcaggcatagcattcaatgattcataagggtcatggggtggtacaacacacatttcttgggtagctccttcagtcttgcgcccttcacgatcgatcggttcactctccacgctgtgcagatttggctatagctaaatggacagacgatgccgcgtggtggcagtacaatactacatattgctcggcagacgcggcataggttggggtccgctgtgacaaagctttgagtaccccaggttcaacaaagggatcaggcatttgtgcacttacggaatggtccccttctgccttgggactcctcaagctagccagatctgttcaatccaaactcaatacagaatcggttataggcgggagacatagaaactgccgcgtgcgtgcgtccaccgaaaccccatagccataaaagcagaggctggggttcaaccattgcaatgtcccaggtaacctaggaactgtagcaagaagttgcaaagctgagattagagactaggagaagtcagggatccgcttagtttgaagtgaagcaggagggtgggtagcaagagggagcatagcgggtgtggcatggtggggttgtatagcgtgggttatagcgagggggtataatggggaggtatagtggaagtatagtgggaggtatagtaggggtatagcgggggatatagagggagttatagtgggggtatagcgggggcatagcgggggcataatgggggacatagtggggggcatggcaggaggggcatagtcgggggtataatggggggtgtagtggggcggtatagtgtgggtatagtgggggacatagcgggggtatagtgggggtatagcagggagggtatagtgggggtatagcagagagtatgggggccataggggaagtatggtggggggtatggcaaggggtatggtggggaggatgacaggggggatatagcaggggtgtagtggggaggatatagtgggaagtataggggagtatagcaagggtgatgtggggggtgatgggagacagagaccaactgccaccacaccagtgaatagcttacatgtgatggccaaccctcggcctttagtctgctgatgctgccagggttcttgaggctcattagaagatggggtcattcttttccatcttatataccgatctctgaaaaggatcatttgtttaagagcgcagagatagccacaaccaccacaaggtgacagcacagacacacattacagcgccaagataatagaggctggggtctatttatgaccaaattggaggtgtccgtcagtatcataacttagggtccacccacagcaatgaccagggcttttcacagagtaaaaatgaaggatcactaggagccagaaatgagtactcagctgacatgcagccactaggctgaggatctgccaaggtgctattgcacctcacataggtgagaaccactgctgagtggtcatgactggtcagcccttgagtcctcctcccatctggagctccggtcacttccatctagagctgctctactctctggtgccctgatttgtggatgctgactctgtggatttcagctgcataactttcaacagaagctaagagcaatggtatacgcacgcacgtggctggagggacagggcatctctcctgtccccattctatcactgatagtagtacttcagtaggatagggagaccatactgtgcctccggttgactggggtgaccaagaccagactgtaagataactaataaaactcatcgcaagagagtcctgacaaacgtgacgactcacccagaaaagggacggtgaggagtgcccaaattagctactaccttgttgaaaccactgcggccagataaggtcagtcaagcagactaggacaaaggctgggggttagccactcgtaggctgttcatactccgtgggatagtatgagacccatgccctcaaattcccattgtggtcattatacaaactgagtaaagggcagcttcagtgtggcagggtgcctggggcaccaccgttctatgaagggcttcagcaggctacggggctatatgttctcgacatcaagggagatatctggggacaatgccaggccctgtctaagggattccaaagtgggagttgtggtgaggctgtctttggagaatttcaggacgggtgcgggtgtggggtgaggcgaacgtgcgctggaacgatacagggtggaggtgggccctgcgggggccccggcggggccatgtactgattggttgacagagtaggggcgggaattctgggcggagccactccagttagaaaaagcccgggctagagggcccgaagcaccgggtgtgggaggggggtggggggtgggggtggggggtatcggggaaactggggaagatgggagagctggaggagagtcgtggggtccgaggagcacctcggcatctggagtctggcaggaatgttgaaggactgaggggctagctcaggcagagcaaaggcatcgcaaaggctggaaaacatcggagtgaagctgaagggcctgagctagggttggagaggaatggggagccagacattcatcccggttacttttggttacaggacgtggcggctggtcggataaaggggagctgctgggaagggttcgaccccagacctgggcagtgaaggtatagctggcagcagtgggcaggtgaggaccgccgtctgctgggcaggtgagtctccttcttctctcttggcctcgctccactgaccttctaaacgaaggtttagagagggggcctggtgagaagaagcggctggcctcgcagcagaatggcacatagaaaggcaggatagttagcaaaggagacatcgtctcggggggagccgagacagaaggaggctgggggaccattggcgaccccaggtggaaagagctcttagagagaagaaagaagaggtgcagggttgccagtaaagactgaggccgctgcctccagggaggtgataggagtccttggagacagtggcagagaccatgggatccagcaagaacagaagcattctaggctggggtcaaacagggcaagatggggtcacaagacacagatgggtccccagccgccacaacatcccacccaccgtaattcacttagaagaaggttcaagagtggctctggcaaagtcccaagtttgccagagcctcaataactggagaatggaaaagaagggcagtgcagggtgtcaccagaaggggagtgggggctgcaggtatcggactccagagggattttacagcaaggaggctgcagtgggtccagcctgcagacacaccattcccatgaggcactgcggcccagggactggtgcggaaagggcccacagtgcacttggtacactgtatgccctaaccgctcagtccctgggtctggcatgacagacagaacatttccaggggagtcaagggcacaggatgaagccagacgaggcgaggcaggcggggcagaatgaatgagtttctagggagggaggttgggtgcaggtagagcgagtagctggggtggtgagccagggaggcactggcctccagagtccgtggccaaggagggccttgcgggcggcgacggagcagtgatcggtgtctcgaagagctcggactggagactagggtaagtgtctgtcccgctcgtggtcacccagtctcctcccacgcaagttcaattaactcatgtcttcatttctccctatagccaggtctccagcagaggtggatgtgcctgccagtcactgaaggcgaggatgacaggtgtggtcaatgtgacagaaagacatgacatggtccggtgtgatggagaggacagaagggcagtcatccagccttcttggtgagcatactccctgccacagggctagtccgctcaaccacctaattgtccacccactcactcaggattctgtcctttgcagaacaccatgggctggcgccttgtcgtagaagccgtctgttctttcacttttcccaaagagctaacacttctctgctgctctctggatcctcctccccctaccttgaaccctcaagatgaaaggtgagttctcttctgccccatgtgggtgggagagggtgggatgccaaggacaggggtctcattctctcccacccatagaaatggtgctacccagctcatgtctgggcctttgaatccggggacttctttaagtccgtctcgttctgaatcaagaagatgctgcaatcagaaccactacactacctgcctcaggaatctgctccaaggtgagctggggcaccctttggaagcttgccaagcccactccccaccccaccccccgccccacctcatttgtctttattctctttgcaggtgaagctgaaagaacagatggtgtcaacattttgaaagagcagactcatagcacccacccacccctgagaatccatcttcatggccaactctgcctgacccgggagaccaccacccacatcatcctggagccaagcctctaccccgggatgacttcatcatctccctcctgtctttttcttcttcctcctttcctgtaattctgtttctttccttttgttccttccttgcttgagagactcaaagcacccgtgactctgtttccccatttacccccttttgaatttgcactaagtcgattgcactggtttggagtcccggagatagctttgagtctctccgtatgaatgtatacagcgagtgtgtaaacctctttggcaatgctgccccagtacccacctgtcgtccatctccgtctgagggcaactgggtgtggccgtgtgcttgaggcctcgccttcccctcgcctagtctggaagcagttccatcataaagtgttcaacatgccctacttcatcctttgcccctcctcaccagggcctcaccagaggtcctgggtccatcaataaatacagttacagtcattggtctcgtggacttcaatataatgcgactcatggggggaggttgggggggcaggggaaagaaatgagggaaggggaataaaagggatagggtacaccatccatgatgaaggggataatgaaatggggagggcctctaggatggaatggggaataggagatggcttatgaaaaggtgggtggcactgggataggaggctcatgggatggcacacagcgaaaggcctcatgggatgccaagaagctatggtatggaaggggcctatgaatatgaaatggtgcctgaagaacgggcaaagcagtcgacatcacaattaaaaaatgccagagtgccatacggagacagaggcagggctgtgagcagggtccctcaagacagagaggctggggaggtgaaggacatccttagcaatgagagatggtgggcccagccagaaacctggattctacactgctcccaaggtcctgcctggatgactctgagtcctcacactaatcccaactcccgaggcataatgtagactgcacagtaaatctgactccttgcagtaaggctcgtaatgggtaggcagctacacatgaggctgcgtagaccacagccacataaagaggcccatggtggcctctgggcttccctctcctgctccaagcatgctaagctctggactggagcccacgtcgatgcctgcagtggtaccctccccttgctgtctgctgtggataggagctgaagggccacagcagagagatagggacatgcacaagtctgaatataactcagaacacagggcacggtgaatatccagggaggacagggaggtcagcatgaatgacaggtacatgaaggactgtcactgaggtcttgcttcctagggtggaagcgtagtaccccataggtttgctattagtgtcctcatagagacagcaactggttgagctgacccccacgtctctgagcatcctaccagcctcctagctcctagactcttagctgtacagatactgggaagggacttgaagagcagattaaaaaaaaaaaaaagaggctggggtccttggctctcatccccagccccaagccccagtgcttatagcagtcaagaaaatctcctccagctgacaaagaccagacaggactgactgtcaggaacacccaccctctccaccccataccctctctgggcagtgggccagcttctccccacccccaccacatgcctggtctctcttctggaccctccacaaccctttctctcgccatcattttgccctctaattttctgggagggagacctctgtggtcttcctggacagggtggttaggcacccactgggcatgtgggtgtttctctgatcacctccatagaggttttcaaaagcttccagtcagaacatgcccatcttcctgaccctactagaggttacttgccccagtgacaaagcagcttgtcgtggggtgggggtggggtgtctacaaacagcctttattccaaacatctgaccacccaaccctgcaaaagccaggctcagaagacaaaagctgctgccttacaagacacgttggcagggacagctagtaggcactggaggtagtcacaggggatggatgttggagattggggtaagggtacccaaaaaggccctctatctaagagacacagaaatagagtcacagagtggaaagggggttcaggggtgacatgagctacctcctttgggccctgctttcctggtcctagcatgctaaatgtgagttttacacaggctttgaggtgtagggggctggagtcacacattcttaccctggggttctacccagaagacgctaagacaaatctggggagatgagggtgccagtgtggaaagggagaaattgctccttcccgtcctctcccaccggctcatggtggatgcctcctcaagccactcctgtgaatgtcacagatagtgagggtgtcacaggacaaggcctaccttgagtttatccacacctcctttatttaaggcagaaagttctgagctctcccagaaaaactggatggatgtgtggggcaggacctcaaggtgcaggctggtgggggctagatgcccccaaatcaccaaagctctgcaaacaggtgtgcctgtgggtcttgggcctcaagagcctcgcccacgggtaggggctgggaaaacagaggtggcccagccccccaccctccagccagcacagcccctccatcagcccagtttggaatgtgtttacctttagcccaacccgatttcctgctttttagaaaaggggcttagagagggctgctagacaggctccaagcctgccacccaaaggcactttcaacctcccccctccttgtgcggagaagctaacaggggcttgaatttcatccccaaaccccagccagggtgggttgtggggagggtggggaggggctggctgctccacgctgcacagcctgggagatgtttcaaatcttcatggggcccagggtccccagcacaacccccaccctgcaggcacagaactacgggggtcctcacacacccaaacccctccccagctatgtttcagtgacaagttaaggttggacaaagactggagtagcccattagagagcccttatcacacgtggtggtgtggccacagtaataactcagggcttgtccctgaggacgcatatgctgtgggcgagtatgtctgtgtgtgtgagggccacatggcctcacctatataccctggtctatctgtggtaggatctgtgtgctgaccagttggccagtggctggtgctgaggctgaagctgaggctgaggcaggggtctgtcctttttcaggatttttctgcgggggtgtatgtggtcatggcctccaggaaagtgtacccttgagctgactgcgttgggcgtctgtggtttcatgtctcaggttgaactgagtaacccaagagcacgttttaggcaggaatcgtggacatgggggagggacagcagtcaagatatttgctatcccactgagtagagaacattccaatactgtgcagggaaggaggcctctgaggccccgggggctgcaggcttgactgtagtacaccctgcagaatctcaaacaacgtagcatgagactgcagaggttggcctcccactatctacactgcaagaggagggtctcctttccaaaggaactagaaagctgggagtgttgtcctcttcagctgtgcacaccagcatctgaccagaaccagagactgggctcaaagactgtctgtccccttccagcatgatcccagcctctccacggaatacttattgtttgcatgggtgcacaagtgtgtgtatgtgcacatgtgtatgcatgcacatgcatgtgtgtgcatgtttgtgcgtgtgtgcgtgtgtgtgcgcacacacacatgagtgcatgagtatgtgtcccatgaggaactagggccttctctaagaatgtgtgaatctccagaaaggggaagagaaggttctggaaggagttgtggtcagctctggccttccctcatgctgttgtagccatgctggctcagcagagctacccaccctctttcctttcctttccatccctcacctctcctctcctctcttttctcctcctcccccctctcctggtgacattgttggcccctttccagggctgaggggagccggcgggggcccttcctggaagcccacctgcaaaggcttgctgggaaggggcctgctctccctcaggctcccacccgcccgcagccgtttcctggaagcagtcactgggtattctgttccttgtcaacgcgagcctgcaaataaagcagacactgtgctccttgtcctcagggagcccagctccatcaccccacacctggcaagacagcaggtgggtagccgggccatggggagcagtgcgaggcgaggcgaggcaggggctggacccataaacaagcccaggcgccaagtacaggaggctctacccccaccctccgtgtgacacctctgagatgaacccatgccaaaccccaaaaacagctataggtgcaaaagggaagtccccaaggaaaagacaccctgcagaccccagggaaaggctgggaacaggtccatgaagaggtcacccctgggaccctggctctgcagaaaattttttacctgaatgggaaggcccagggatctcacatgagagaggcatcacggtaagggagagaaagggattggtaaaacccttcactttgagttagggaaagaggcagagctatcatagagtcggggtcttgtgggcaccccatctaggagaagggattaaatgatgaaacctggactctagtctttctgaggggagaaatgaaacaaaggatggtgagcggcctaagagcaggggaacctccctgggcatgctcagagcacttgacggagtgtggagctagctctgagggtagaccaggaccgggtgacagatgaaagaagattcctggagggaccatggcatatagtgccacagaggactagagagtgactagtaggcttagagtgcctggtgttagactctagagtccatgcatctgaggaaaaacagacttaaaacatcaatccgagcctgacctctcagggtagtgctgtgagggacggggcctgggggaacagtggggccccatgaaaggctgggaaagactggtttattcaggtggcattcaggttgtgcgcatgcgtgccagagcccatgggactaagggaggtgtacacaaagccctcaataagttccccattggctactggtgacttcactcctgtgtcaacaccaccatgtctgcagcttcctggctggccagggtttatggagcgggaccgcgaccccgcctgggcccccacctcactcgttccacacactggcccactgttagggtcttgggggtggtggctgtatcattacatcctggtgcctcctgctctttcacccacctcagaggtcctgggacagttctttccctccaggcatccctggccagagggtatgcaggccctacctccctctccctctggaaaggagcttgaggccctggggtcacagaggcctgcagtctgtgcatgtggttatggagccaaaagtacagcacagaacagaggctgggcgagaaccctaaagggactctggggtctctctcacaggggccagccatgtagacttgccttctctgaccctaagttcttgtagaggggccacttgtcagaaaaatcatcccaagagccattgtgacaaccatccctgcccacctggccttgtcattcccctcagagtagggcatgctctttgggaaagggttatggtgcctggtgtcagactctggagtccatgtatgaccagaaccctgcttatccctcctacagattaataggcccaccgaaccccagctacagagaggagttgaagttttcgattcccagtgtccacttggataatggtgacgggggagggggggctctcctcctctagagagctacagttcccaaagtggtggctaacaccaggagtaggtacgttttctgcagagccagcagcccaggacagctgatcaggctagcttcgcctttgttagctatgccactcccactgccaccaccattgtgggagctccccgttggggttctgctttgctgctcctttcccaggaatcttctgggaccagaatgggatgagtccacttgggccaagaatcctggcttacctgaagctaggatactttcataaggaggtaaatatagactgggcttccctgaagcagtgggatctttaggccagaacagccctactggctaaggggtaagagagatgggaaggagaagatccaggtatcctctgtcctgcctcctccatagtcccatgtccagtggacttcatcaccagtgagccaatacccacgagcccttaaagggtcacagcacatctgagtgagagcagaaaggcaaaatggaggggagcaatgaggcccaaaggcacagagggagactgagctgacaaactgggagggagagccctctggggctagtaggaaggaacctaccaatggtcactaaatcccaactcccattggctgcctttctgttccaacagcccttccccaggagcgggccttggatacaactgtcctttcactccccctccctttccccgccctgtggagtggtctctgtttgtgagagctgttaacctggctctgccctgcatgaacccctcccctcaccagagtcagcagtgtcccctgctagagggtgaatggcctccctctccctcgggtcgtggggcagagtacatgtgtgccaagagggggccccatgggccacgtggctgtttgcagttcatgagaagcagctgagataaaaagctgttttcccagtgggcaaggggccagagggggctgaggggggcgtgggagtcaaggccaggctgtagggctttgtgcaaccctggcctccccctcctacgtgtttgtacctgcaggagcggggggttgtgcagctacagagcagtccccacacgaggctgtcagctctcctagctttctatattttcccttgatgcctgaaagtcccaagtatcgtccttcaccattatgaggtgccatcatccaactgcctaactatgacagaatgtggtctgagatttgggtaggcaaagccctagccaagggactgccaacctatacaagatcagggcaggggggcagtgctagagatatgtgggccaaaacttgacaggcatagaaagagccaagataattagattaagcgtttacatgatgctcaagtcaagggtacatgctcatgaaggggtccggggaactggtgaactctcctggaaaagggacttcagaccttatgccccccacctacctagatatggcctcagggtacctttgttgtgtaaccaaaagggtgtggggctggaagaagacccccccatctctatccacctgacctcactaggcatggaagggtagtcctccaagagagaagtcctccaagatctcttacccagctggtagtgctcccaactcatctcactgaggctccttgtggaagcctaggtgggccctagaaagagactagcaagcagggatttaggtacccctatgaaacagggagtctgtgtgcccctttcatacaggcctgtgagtcccataacacatgccttatctatatctgatgcctcaactctatggccagtgactttctggtgtcttaagaagggtgcatgtgtgcatgttcacatgtgcctgatgggatctgtgacagcttccaaaccctaatctgggtacaccaatgaatagctcagaaatggactgccttgaatatgcagcatgctggtggctcgtgttgttaacaagtaggtgttccttatgatgaaacttgaggtccccacttccagagagaaaaaaccatcctccttttactagggtggcactttcaaaatggcagcagagtctacagaacccagactcccatagcactcagtgggtgcaggcaaggctcttattcatggaggtgggaatgggtgtgaggactcttagcctcccctggagccagggaaggaggctaaacagtggcaggaggtcaccattgttctttaagggcagtgtccccattccatgcaggaaagttgcagaaaataggaaaggggtaaacagggtgcctctgggaaaagttccagaaaaagagactgtgtcagaaaggtcgcatgcttcccaccagccctaaccttcagttgatgagccctgacagtcaccagtccatagaacatgagccatgtttcctggttttatttttctttagctccagaagccctcaccttcctactccactagcacagatgtgttcttatttgcttattttgattttgtgagacaatctcatgtagccttcaaaactcactaggtagctgaagataaccttgaactcctattcgtcctgcttctacctcccaagtgctaggcatgtcctccatatcttgtttgcgtagaaccaaggattgaattcaagacttggtgcctgctaggcaagcattctatcaactgagtcatatcctgatcctatttttaaactttaaaacttagtgtccaggcaagatcaggcagctcccatagtacaacatgacctagttaacaactgttgttacgtatgtagcccatgcaggcaaagccacttggtgtggcctggctgctctgtacctcttggctttgagacttccattccagatggggcatctccattcacaaagatttccataagtttacctggggtgccatgggagagtgcactagctagggacaccacagaaactctgtagatgagaacttagggtatggcagccttctgtgccagtaagagggtgttctggatgttggattcccaccaccagaacatagaggcaaggcaaattggaatactggacacagtggataggcctctaataaaagggacttaagagataagtctggcataccagctccaccatgtacctcactgagttttccctctcctctacagaagaggaaactgtctataggtccaaccatcctctgacatctgacactggtacaggtaaccagtggtccctaagcttcatagggcaaccaaaagatagttcctaggaccagctatggagcattagaaaaaaagaggaggaactttctagaaggtaaaatggtcccactgctcggatcagcagaaacccagcccacagtccctccctagtcaggaaatgtaaacaggaatgtaaagggtaaagttctagggcactgaccgcagaactcaaacaggacaaagacccgacccctggacaaacagtgggtcacggtgcaaacttaggcagggcaggagtgcccctcagcatcgtgagtgtagccctacattgctgtccttgactccgtggcctctgtgggagaggcgaccgggagcttctgagaccagggagaacatgccaagtctactaaccttactgtggagaggagtcccgctttccctagtacatgaaaccttcctggggaaccatggtttcaaggtgctctcttccagccagcttctcacgttctaacgccaagcccccaattccagacctctctttccagcttcaggaaacacgcatggtcctacttctacttctggggccctgtgataatgaggggacagtagaaaagagagtttcctccattcctgtcctgttgaacccaggacaggaacaggcaaaggaactgttccattactacactctgctgtcagtcaaggaagtccccagaaaggagatacagatttgcctcagagacactgaaactggagaagacaagggaatatagagcggcgggtgtaatgctagtccggcttccagatctttctaacaactaccttcaaagctcccaggcctcaggcctcaggggcactctcctcgaatatacttccaaactcttgttcacacactttcacaagtacctctggcacattctgggtgctctatactgggaagagaaaaaacccaaccaaacaaacaaacaaacaaaaaaccagccgtgttgtaagatggctgtgaccatcatggtccagacccacaatgggatgagaaggatgggctagcttctgcttaagagaagacaatcacagtgccctggaagaaaactcagatggctggaaggacccatagtctaggtattgccatacctagaaagcctcagggttcaggtaggccttaaatgggggttgtaaagctctgcacactcaagttcagaagaaaagggatatttgcaggtctcagagcctcagcgatgcaggaagggactgccgtatccaggagtgagtagggagggggtttgggctcctttgtcactccgagaaactctacacagtgcttcttttggaatcaagaccctctggaccttgagctgtctctatgaatgacttaggagcaaaagtccacctccaggaaccctggccaggcaaaagcaggcctttcttctggt

SEQ ID NO: 2059 - DNA, 2270 bp, Mus musculus
ggtggggggtgggggtggggggtatcggggaaactggggaagatgggagagctggaggagagtcgtggggtccgaggagcacctcggcatctggagtctggcaggaatgttgaaggactgaggggctagctcaggcagagcaaaggcatcgcaaaggctggaaaacatcggagtgaagctgaagggcctgagctagggttggagaggaatggggagccagacattcatcccggttacttttggttacaggacgtggcggctggtcggataaaggggagctgctgggaagggttcgaccccagacctgggcagtgaaggtatagctggcagcagtgggcaggtgaggaccgccgtctgctgggcaggtgagtctccttcttctctcttggcctcgctccactgaccttctaaacgaaggtttagagagggggcctggtgagaagaagcggctggcctcgcagcagaatggcacatagaaaggcaggatagttagcaaaggagacatcgtctcggggggagccgagacagaaggaggctgggggaccattggcgaccccaggtggaaagagctcttagagagaagaaagaagaggtgcagggttgccagtaaagactgaggccgctgcctccagggaggtgataggagtccttggagacagtggcagagaccatgggatccagcaagaacagaagcattctaggctggggtcaaacagggcaagatggggtcacaagacacagatgggtccccagccgccacaacatcccacccaccgtaattcacttagaagaaggttcaagagtggctctggcaaagtcccaagtttgccagagcctcaataactggagaatggaaaagaagggcagtgcagggtgtcaccagaaggggagtgggggctgcaggtatcggactccagagggattttacagcaaggaggctgcagtgggtccagcctgcagacacaccattcccatgaggcactgcggcccagggactggtgcggaaagggcccacagtgcacttggtacactgtatgccctaaccgctcagtccctgggtctggcatgacagacagaacatttccaggggagtcaagggcacaggatgaagccagacgaggcgaggcaggcggggcagaatgaatgagtttctagggagggaggttgggtgcaggtagagcgagtagctggggtggtgagccagggaggcactggcctccagagtccgtggccaaggagggccttgcgggcggcgacggagcagtgatcggtgtctcgaagagctcggactggagactaggccaggtctccagcagaggtggatgtgcctgccagtcactgaaggcgaggatgacaggtgtggtcaatgtgacagaaagacatgacatggtccggtgtgatggagaggacagaagggcagtcatccagccttcttgaacaccatgggctggcgccttgtcgtagaagccgtctgttctttcacttttcccaaagagctaacacttctctgctgctctctggatcctcctccccctaccttgaaccctcaagatgaaagaaatggtgctacccagctcatgtctgggcctttgaatccggggacttctttaagtccgtctcgttctgaatcaagaagatgctgcaatcagaaccactacactacctgcctcaggaatctgctccaaggtgaagctgaaagaacagatggtgtcaacattttgaaagagcagactcatagcacccacccacccctgagaatccatcttcatggccaactctgcctgacccgggagaccaccacccacatcatcctggagccaagcctctaccccgggatgacttcatcatctccctcctgtctttttcttcttcctcctttcctgtaattctgtttctttccttttgttccttccttgcttgagagactcaaagcacccgtgactctgtttccccatttacccccttttgaatttgcactaagtcgattgcactggtttggagtcccggagatagctttgagtctctccgtatgaatgtatacagcgagtgtgtaaacctctttggcaatgctgccccagtacccacctgtcgtccatctccgtctgagggcaactgggtgtggccgtgtgcttgaggcctcgccttcccctcgcctagtctggaagcagttccatcataaagtgttcaacatgccctacttcatcctttgcccctcctcaccagggcctcaccagaggtcctgggtccatcaataaatacagttacagtca

SEQ ID NO: 2060 - protein, 145 aa, Mus musculus
MGWRLVVEAVCSFTFPKELTLLCCSLDPPPPTLNPQDERNGATQLMSGPLNPGTSLSPSRSESRRCCNQNHYTTCLRNLLQGEAERTDGVNILKEQTHSTHPPLRIHLHGQLCLTRETTTHIIPSLYPGMTSSSPSCLFLLPPFL

SEQ ID NO: 2061 - DNA, 22667 bp, Homo sapiens
ttttgtgatccctgagatgaagtggctctgtcaggattcaatcagagaagcaccacctcctcacggtcaaagggcaggggctttgttggaagggatcggaccttctgccaagatggagctccaggctgtctgtgagacgctactgcccggctctggggctgggcctgaagccagcaggacaggtggtcaggaaagaagatgggcaagaagtgggaaggggcaagggccacctggacttcacgaggccacacgtgaacccacgtggacagtccagtgccctacatctgtctcttaccactttatgctgcactgaataatgttccctggaaattcatgtccacccaggacctgtgagtgtccccggaaattcatgtccacccaggacctgtgagtgtccccggaaattcatgtccacccaggacctgtgagtggggtcttctgtggacaagggcttttgtgggtgcaaccaaataaagacaaagtcacactgaattgaggcggggggaagcatccattcaatgagtgtcgtccttgtaacaagagggaaatttgcacacagagacagacacacagtggaggaggccgtgtgaagacagaggcagagactggagcaacgcagccacacaccacaggacacctggagcccccagaagccagaaggggcaaggaggggccacgctagggccttgcgaaagagggcggccctgccctcccctgggtggtgaacctctgggctccagagctgtgagagagtccattcctatggctaaagccacccagtctgtgatcactgtcacagcagccccaggaatcaaacccctccaatcccaaaacacaggggacatccggaggagcaagcacccctcaccagggggccacagacacccatggcccaggacccagaggagctgcaggcttagggcccagggccagcaggctgagccagggacggtgacaccaggcatgcgcagcagcagcacccaggcagcaccccagcagatgccaatgtggtggccgcttccacccactggtcacgttgcagccgggtgagtctgccagggctgccgcaacaaaccgccatggaccgggaggcttaaatgagggaaatatatcctctcccagtcctggaggctggagtccaagatcagggctgctgcagagctgggtcctccaaggcctctctccttggcttatagatcctgccttctccacatgtcctcacggggtcatccctccgtgtgtgtctgtgtcctcctctcctcttcctataaggacacagtcctatgagactgtgctcacccctgctcacatcaggagaacggtcctgtgtctcctctcgggacctcatcttcatgcctcccccttggttaccccacggtcaggactcagccaccagcgtgagcccacacaccggctctggagtggtgggcacaggtgagagggaggtacagctgccacagccaggaaaccccaggacgatcctgaatgggcccagagctggcttttctctgtcacggagagagacatgagagggtcatgagtgtgaagatcgccagctcccagggtcagggcccagcctccttccatctcactgctctggactcctcagttcctcatggagtctgtttagtgcctctccagaaaagacaagttgaagccctgaccaccagcatctcagagcacgaactcatttggaaatagggtcattatagacgcaatcgatcaggtcagactgcagtagggcaggccctgaatcaaacatcatggtgtcctcacaggtagaggagaggcacgagagagcaacgctgcgtgaaggcgcaggatgagagcatcctggaagatgggcacggctggggtgacaggtctgggagcctgggaacactgggaaagtcggccagcactggagcctcccttagagctcgaagaaggagccagccctgaccaccccgactctgaccttctagcatcgaaacagggagagacgcattccacgtggttgttccaatcagcccagtttctggggcttccttatggcagcctcagggaactggcaaagcccaagtgggctatcccattacttatatctgggtaggtcccagccacaggggagagagaagagaaagcccctctatctaatgacacgctgtactcatgtcccacccgcatgatgtgccgtacccgtgtccctatccaggtgacgtgccgtacccgtgtcccacccgggtgacgtgccgtacccgtgtcccacccgggtgacgtgccgtacccgtgtcccacccgggtgacgtgccgtacccgtgtccctatccaggtgacgtgccgtacccgtgtcccacccaggtgatgtgctatgcccatgtcccacccaggtgacacgctatacctgtgtccctatccaggtgacacgctgtgccatgtccctatccgggtgacactgtgccatatccctatccaggtgacacacagtgctcatgtgtctatctagatgacagcaccgtgcccacatctttatcccggtgacagcactgtgcccacgtcctgtcttggtgacatcactgtggttatatacctgtccatgtgacatcactgtgcccacatctgcctccaggtgacagcgctgtgcccacatccccacccaagtgctctgggcaccttggctggggctctggccactttcatgttggtgccaccctgtgtgtggatcatagcacccaggcactcaccattaccgtggccagcacagaccagacccgaccccagtagtcctcaaaactaggtcccctgctgggtgcggtggctcacgcctgtaatcccagcactttgggaggctgaggcgggcggatcacaagatgaggagatcgagaccaacctggctaacacggtgaaaccccatctctactaaaaatacaaaaaattagccgggtgaggtggtgggcgcctgtagtcccacctacttgggaggctgaggcaggagaatggtgtgaacccgggaggcggagcctgcagtgagccgagatcatgccactgcactccagcctaggggacagagcgagactcaaaaaacaaaaaaacaaacaaaaaaaaactaggtcccctgtgctgtgctgctgtaccccagcagtcgcttcactggcaagactactcttagcaggtgcgcctggaagcagaaactcggcagctcccggtctgtcctatacacatgcaaatgccccattagaaagcaaatagcccgaggtgtttgcctgctcccaggcaaaatctcccaaatcttcctccgggaatcagtgaacagaagagatgtccatcacccccaggagagtagtgtctgaacccgtctaaccgcccaacaggttctccctgccgccggtctggacagagctgctttatcacaacaggtgacttgcaataaagtttaattcacacagagtcggccgtgcaggagaccagagttttattattactcaaatcagtctcccaggaaatttggggatcaaagtttttaaggatcatttggtgggtagggggcgagtcaatagggagtgctgattggttgggtcagagatgaaatcatggagagtcaaagccatctttttctgctgagtcagttcctgggtgggggccacaagactagatgagccagtttatcaatctggggggtgccagctgatccacccagtacagggtctgcgaaatatctcaaccactgatcttaggttctgcaacagtgatgtaatcctaggagcaatttgaggaggttaaaaatctttcagcctccagatgtgtgactccatgactcctaaaccataatttctaatctgtggctaatttgttagtcctgaaagtctagtccccaggcaggaagagggtctgtcctgggaaagggctgttattgtctttgtttcaaagataaactataaactaagttcttcccaaagttagtccagcctgcacccagaaatgaataagaaggcaagacagagttggttacgtcagatctctttcattgtcataattttctgttatatatttttttttttttgagacagagtttcgctcttatcatccaggctggagtccaatggctcgatcttggctcactgcaacctccacctccggagttccagtgattctcctgcctcagcctcccaagtagctgggattacaggcgcccaccaccatgcccagctaatttttgtatttttagtagagatgggatttcgtcaggttggccaggttggtcttgaactcctgacctcaggtgatccacccacctcggcctcccaaactgctgggattacaggcatgagccaccaccgccggccgattttctgtaataatttttgcagaggcggtttcaccaggagaaccaagcattaatgcgctgtggctgatgtgtagtagagcggcatttcccaatgggagaaccctggggctgtctaggagcccatgcatggctgggagcctaatcccagggacaccaccgatgacagctcccatagcacgtaggacagtggatacttggaggcaaagagaaatctctgttctgcagtggtcatgacttggaccccaaagaacttgagcccaaggtccagagggagaccctcccaacagggcctccagcaggaacagggatcgtgggagcctgccaagcacagcgcacaggtatttctggaggcttcccattcagtcttggatgccagcctcaccgagggcggcccatcttgctgacctcaccaagggaggcccgtctcactgccctgatggcgcagaatcggctgtacgtgtggaatcagaagtggccgcgcggcggcagtgcaggctcacacatcacagcccgagcacgcctggctggggttcacccacagaaacgtcccaggtctcccaggccaggtgccgcattggttcccgagggttgtcagagatagacactcatgcgactaacatcgggctatgtgtttgattcaccccagggtgcattgttgaaggttggggagattggaggagatgcttgggggacaatgaggtgtcccagttccttggatgatagggatctcggcctaagcgtgagacccctcctacagggtctctggcaggcacagagcctgggggctcttgcatagcacatgtgtatttctggaggcttccccttcggtctcaccgccccgatggtgcagaatcggttgtagttgtggaatcggaagtggccgcgcggcggcagtgcaggctcccacatcacagctcaagcccgccccagctgaggttcacccgcggaaacgtcccgggtcacgcaagctaggtgccgcaaggttcacgggggtagtgagggatagaacactcatgggagccacattgggctacgtgtctgattcaccccagggtgcactattgagggttggggagatgagatactttggtgacaatgaggtgtccccattctttggatgatggggatctcggcctcagcgtgaggcccctcccacagggtctctggcaggcacagaaactgggggctcttgcgtagcacatgggtatttgtggacgcttccccttctgtctcaccacccggatggcacagaatcggttgtaagtgtggactcaaaagtggccgcgcggcggcagtgcaggctcacacatcacagcccaagccctccctggatggggttcgcccgcggaaacgtcctgggtcacccaagccaggtgccgcagggttctcggaggtcttctgggaataggacgctcatgggagccacaccacgtcttcgtatcgggccatatccacggccgcgtggccccaggtcacactctgagggcttcagtgtcatggcctgggactcaagtcacgcctacccgcgtgatgagcacagcaaattccgccaaaagcttatactttccacatccatcccagagcacagatccgactaaggacagcccccaaatcccgagcctttttctgaactgacaattgcctccccagtgaacactctgagcttgtcaatcttaagtggccagacattaacattcccattcagtgcaggtttgagatgctaatttaggagcttgagatgctaaagagctgggagtgccactgctgctttattctggggtctaggatccttgtgttggctgagataatctgctaatgtgggtgcagcagacatcccgcggtttgtggaatcgataaaggatggggatcaatggtgtttgtgcactgtgcggtctgtgcccaattgcctgccttgtgctgtggaatctgtacacctggccaacatgtgcttgtgtgagcctgacagtgcattttccagagcctcacctcggctctgccctggaggctctgtgctgctggaatcagactcaaggacctcatcagaggaccatggccccgtatcacctgggtcaggcactgaagctgggacaggagagcagagacttccaaaatgagggatccctgtgttctgaggtgatcatgactgggacccaaggactcaagcgcatgctccagagggaatcgtttcccacaaggcctttggcaggaacagggatcctgggagcctgccaagcagagcgcacagtgttcctggagtctcgctgcccagatgccacggaatcagttgaaggtatggaaacacaggtggccacgtggtagcagggcaggctcaggcgtcatagcccgagcccggctacctgtggtttgcctgcagaaacatcccgggtcaacaggccaggcaccgcattggttcgcgagggtcatcgggggtaggacccttgtacgagccacatcgggctacgtgcctgattcaccccagggtgcactgttgaaggttggggagatgagaggagatacttgggggacagtgaagtgtccccattctttggatgatggggatctcggcctcagcgtgagacccctcccacagggtctctggcaggctcaagagcccaggggctcttgcatagcacatgaatatttctggaggcttccccttcagtctcaccacccggatggtgcagaattggttgtagctgtggaatcggaagtggccgcgtggcggcagtgcaggctcacacatcacagcccgagcccgccccagctggggttcgcccgcggaaacgtcccgggtcccgcaagccaggcgccgcagggttcacgggggtcatcagggataggacattcatgggagccacatcgggctatgtgtctgattcaccccagggtgcactattgagggttgggaagatgagaggagatacttgggggacaatgaagtgtccccattctttggatgatggggatcttggcctcagggtgagatccttcttgcagggtctctggcaggcacagagcccgggggctcttgcatagcacatgtgtatttctggaggcttccccttcagtctcaccgcccggatggcacggaattggttgtagttgtggaatcggaggtggctgcgcggcggcagtgcaggctcacacatcacagcccgagcccgccccagctggggttcgcccgtggaaacatcccaggtcatccaagccgggcgccacagggttcacaggggtcgtgaggtataggacactcatgggagccatatcgggctacgtgtctgattcaccccagggtgcactgttgaaggttggggagatgggaggagatactaggggaacaatgaggtgtcccagttccatggatgatggggatctcggccctagtgtgaaacccttctcgcagggtctctggcaggcacagagcccgggggctcttgcatagcacatgggtatttctggaggcttctccttcggtctcaccgcctggatggcacggaattggttgtagttgtggaatcggaagtggccgcgcggcggcagtgcaggctcacacatcacagcccgagcccgccccaactggggttcgcccgtggaaacgtcccgggtcacccaagccacgcgtcgcagggttcacgggggtcatctgggaataggacactcataggagccgcaccagatcttcaggtcgggcattatccacagccccgtggccccgggtcacactccgagggcttcagtgtcatggcctgggactcaagtcacgcctacttatgtgatgatcacagtgtgttccaccaaaatcttacattttccacatctatcccagagcacagctccgactccgtctaaggacagcccccaaatccccagccttttactgaactgacaattgcctccccagtgaacactctgatctcctcagccctaagtggccagacattaacattctcattcaatgcaggtttgaggtgctaattcaggagcttaagatgctaaagagctgggagcgccactgctgctttattctctggtccaggatccttgtgttgctggagataatccattatcgtgggtgcagcagacaccctgcggcttgtggactcggtacggggtggggatcctgatggggttaggatgttcgatggctcgggtgtgctccacgctcagggatcatcacgtccggccggcggtagttggcacgtggagaggtgaatttgcccacaggtgttccccgtgcctgcgcattgctggcagcacgaccggatcctgtgctagcccctcccacaatgcctggagcaggagcgaggggcctggggagccgccttgcctggagcatttgtatttccggagtatttcctgagtctccccttgggtcttgggtgctgtccccagtgagcccatctcccagcgatggcacagaatcggttgtggctgtggagacggaaatggccgagaggcggcagtggtgactcacatcacagtctgaaggtgacccaaggctggactccacttttagcaaaatgtgggggtctgccttggtctcctaacttgggggtccactcatggaaaagcctgagaattttcatgccatggaaattcccccatgtcgtggggttcacgcacgacaaagcccggcggtcagtgctcagcaggcaagcactcagccctttccggtggggccatgggaacagagggtttgccgaaggcgcggccagcccttccacatcccagagggcctgctgggtgattggacccgtgaactctgggtcccttggccctggtgctccccttcacggctttgacactcgagacttgaggtgaaccccagggactgcagggccccaacaaccctcaccaaaggccaaggtggtgaccgacggacccacagcggggtggctgggggagtcgaaactcgccagtctccactccactcccaaccgtggtgccccacgcgggcctgggagagtctgtgaggccgcccaccgcttgtcagtagagtgcgcccgcgagccgtaagcacagcccggcaacatgcggtcttcagacaggaaagtggccgcgaatgggaccggggtgcccagcggctgtggggactctgtcctgcggaaaccgcggtgacgagcacaagctcggtcaactggatgggaatcggcctggggggctggcaccgcgcccaccagggggtttgcggcacttccctctgcccctcagcaccccacccctactctccaggaacgtgagttctgagccgtgatggtggcaggaaggggccctctgtgccatccgagtccccagggacccgcagctggcccccagccatgtgcaaagtatgtgcagggcgctggcaggcagggagcagcaggcatggtgtcccctgaggggagacagtggtctgggagggagaagtcctggaccctgagggaggtgatggggcaatgctcagccctgtctccggatgccaaaggaggggtgcggggaggccgtctttggagaattccaggatgggtgctgggtgagagagacgtgtgctggaactgtccagggcggaggtgggccctgcgggggccctcgggagggccctgctctgattggccggcagggcaggggcgggaattctgggcggggccaccccagttagaaaaagcccgggctaggaccgaggagcagggtgagggagggggtgggatgggtggggggtaacgggggaaactggggaagtggggaaccgaggggcaaccaggggaagatggggtgctggaggagagcttgtgggagccaaggagcaccttggacatctggagtctggcaggagtgatgacgggtggaggggctagctcgaggcagggctggtggggcctgaggccagtgaggagtgtggagtaggcgcccaggcatcgtgcagacagggcgacatcagctggggacgatgggcctgagctagggctggaaagaagggggagccaggcattcatcccggtcacttttggttacaggacgtggcagctggttggacgaggggagctggtgggcagggtttgatcccagggcctgggcaacggaggtgtagctggcagcagcgggcaggtgaggaccccatctgccgggcaggtgagtcccttccctccccaggcctcgcttccccagccttctgaaagaaggaggtttaggggatcgagggctggcggggagaagcagacaccctcccagcagaggggcaggatgggggcaggagagttagcaaaggtgacatcttctcggggggagccgagactgcgcaaggctggggggttatgggcccgttccaggcagaaagagcaagagggcagggagggagcacaggggtggccagcgtagggtccagcacgtggggtggtaccccaggcctgggtcagacagggacatggcaggggacacaggacagaggggtccccagctgccacctcacccaccgcaattcatttagtagcaggcacaggggcagctccggcacggctttctcaggcctatgccggagcctcgagggctggagagcgggaagacaggcagtgctcggggagttgcagcaggacgtcaccaggagggcgaagcggccacgggaggggggccccgggacattgcgcagcaaggaggctgcaggggctcggcctgcgggcgccggtcccacgaggcactgcggcccagggtctggtgcggagagggcccacagtggacttggtgacgctgtatgccctcaccgctcagcccctggggctggcttggcagacagtacagcatccaggggagtcaagggcatggggcgagaccagactaggcgaggcgggcggggcggagtgaatgagctctcaggagggaggatggtgcaggcaggggtgaggagcgcagcgggcggcgagcgggaggcactggcctccagagcccgtggccaaggcgggcctcgcgggcggcgacggagccgggatcggtgcctcagcgttcgggctggagacgagggtgagtttttccccctctgccaccctcagcccccacccgcccctccccacacaaccaacacgttctccccacacgactctctcgttctccccacagccaggtctccagctggggtggacgtgcccaccagctgccgaaggccaagacgccaggtccggtggacgtgacaagcaggacatgacatggtccggtgtgacggcgaggacagaggaggcgcgtccggccttcctggtgagcgtgtctgccctccctgcgtcaggacgcggccctgcccagaccgccccgccgggccaccatctcactgccccgacctctgtcttctacagaacaccttaggctggtggggctgcggcaagaagcgggtctgtttctttacttcctccacggagtcggcacactatggctgccctctgggctcccagaacccacaacatgaaaggtgaggggcttcctgccacacttggggtggggggcacgcgagaggagctgagtgggacctcactccttccccatccacagaaatggtgctacccagctcaagcctgggcctttgaatccggacacaaaaccctctagcttggaaatgaatatgctgcactttacaaccactgcactacctgactcaggaatcggctctggaaggtgagcaccagcgctccttccggaagcctccaggcccccgagcaccctgcccccatcccacccacgtgtcgctatctctaggtgaagctagaggaaccagacctcatcagcccaacatcaaagacaccatcggaacagcagcgcccgcagcacccaccccgcaccggcgactccatcttcatggccaccccctgcggcggacggttgaccaccagccaccacatcatcccagagctgagctcctccagcgggatgacgccgtccccaccacctccctcttcttctttttcatccttctgtctctttgtttctgagctttcctgtctttccttttttctgagagattcaaagcctccacgactctgtttcccccgtcccttctgaatttaatttgcactaagtcatttgcactggttggagttgtggagacggccttgagtctcagtacgagtgtgcgtgagtgtgagccaccttggcaagtgcctgtgcagggcccggccgccctccatctgggccgggtgactgggcgccggctgtgtgcccgaggcctcaccctgccctcgcctagtctggaagctccgaccgacatcacggagcagccttcaagcattccattacgccccatctcgctctgtgcccctccccaccagggcttcagcaggagccctggactcatcatcaataaacactgttacagcaatttgtctcgaggactctggaatccgggctgtgggcatgatgtgggggaggccagccttgggcagaggggggctggggggcatggggaggagtacatgaaaagggggatgggggttccagggtgggggattctgggatgggtgcagcgcagcacacaccaggggtggggtgagcacagggtgtgtggacctcaggggtgcagggcaggcggtcagcatgcagtgatggcagtggaggggctgtgggaccaggggcttcacagactgggcgggggctgggcttgcggagggggcctgcgctctgaggcaggggtcggggaccaccaaaccatccccgagcgagtgcctcctgtcgccccaaagtcccatcagaatgacgccttggtgctggccccagacccctgaagcccgggctaggtgactggggtagagctggccatggccgctctgggaggcccacaaggtgctctgggcgaccccaccccgacaggggcacgaaccccgcgccagtcccgttcctgctccccttttgctgtgggtgggagccggggccacgccggagggacggccccgcacaaggagccagggggttgtgggggagccggtgggcttctcagtgggcaggtggccttggggcagaggtcctaaggaggccaggggaccaggaggagggaggaagaagttgagggtggccacagggaggaggtgaggaggagcgggagggcccagggtgaggggctcccgggctccctccccggggtcttgctgctggagctccaagaaccccggtatgcaggggttcgctccccaggtgccaaggcagcccactcatgggttcggggtcagcttccccgcagaggccagtggccggcagctccctcagccaggcctcccagctcctggcccctcgctgtgcaggcgctgggaacacaaggggcagcccctggaaataagggtggggtcccggcctccccattccttcccccctcccccctgccttccacccccattcccagtgcacagagctgtcaggaaaattcctccccgactgacaaagaacagacaggaaggcggttagggacgcccctcccctaccggcccagccgcccttggggtcttggtgtccagggcggaagagcagggtggttccccacgtcccttgggtctggcctcccctctgcaccctctcttgccccctccccatccagctgtgggccctggggactgtcagagaccgaggggtttccagggacacacttgtgtgctaaaacctgggcgggtggtcaccccccaggatgcatgtagacatccggtgagggagtctcttgaagtctctgggatggtgcccctgggactggctgccatctcatggaggaggtcagaggtcgctggggccagcccagggtgaggccgcattcatcttcctgaccctacaggccaatttgacttacccaagtgggttttggccggcaggatgaagtaacccatccattacatgtcaagagttaggtctataaacggcctttattataaacatccaactctgcaggaggtttacaaagcagggctcaggagataaaagccggcttccccaggtggcggctgcagggtgcggcaggcagccccaggggtgcccagggtggcggggcaggggaaccgtagggagggggagaggggcacccagaaaacctctcctggggaacatggaagactctgcccacttcaaatccctgcctggggaaggacacatgggaatggggccgggggaaaaggcgggccacctcgggccttcgtcacctgtgtcagctcctagggattgtctcctcctggtcacttggagagaacaggcgtgctggacacgtccacatctctgggcccggggtgtatgaatgacacgcttgctctggagtttccacctgggagctgtatggggacagggctgttcctcctcacacccgctggggaagggacacaggcctcttggtggcccccaccatctcccagcactgcccatggctgtgcccacgctggctgccccctgagagcaggacgtgtactcaggggcagcgcctacctctgggcagcccaggtttctctgctccctgcagcggaacgggcttcctagggcagttcctggggtggtgtccctagggcagcccctgagtgctggagggggtctgggccacaggccctgaaacagggaggtggtgggggcagcgttcagggggctgaacctcagggtgaggcgggcaggcggggagccacaggcccgggggccccgcagcaggtgctcagcctcggagcctcctgccgcaccccggggcgggggctgggagcccgcccgagcccctagctctgagcgacctgccaggttggaatgtgtgtttatctttggcccaacccgatttcctgctttttagaaaaggggcttagagagggttgttagacaggctccaggcaccccaacacccaaaggcactttgaaaacgcccctgcactgacttcagtgcggagaagcaaacgggctggaatttcactcccaaaccccaacatgggggtggcggggccggggtgagggttgtggctgcctgcaaaggtgccaggaaatctggggagggaggaacttccaccgttcagggagaccctgagggtgccctggcttctggccacgtcccagaccctgttaggcaccgaggtcttcacacccagaccctccacccacccaagtttctgcggcacgtttaggttgagtgaagaccaagtcatccagttagagaagaggacttgaggcgcgtgctgctgctgtggccacgctggaccctcggtgcacgcatctcctggcgagtcccctgtggctctgtgggccgtacacacccggggcacgcgacctcagctaccttgtcaccgaggacgtgcatccacagctgtgcgtctgtgcctgggagcggggtctccacttggtgggtctctgcatgctgaccagttaacccgcctttccgggctgtggagggcgtgggtcctgtccggcccggagatgctccgcggggtgtgtgtgtgatcgtggccctgtagcggggtggtgttccctggagggtggacccctgagcctggctgtgtgtggctcgtgtctcagcatgaattccgtgacccaggagcacgttttcaggcagggattaggggcagctgggtgtgggaggcaggcacttggtataccaccgaatggagacagaaaatcccaactctacgaaggaagtgaagtcccttcaacagggacaaagcgatgttttgggtctgactacaatgcaccctgggaagtctcaaagaaaacagtcggggactcaaggagggcagccccctctccccgaccccgagctcccaggaagataaatgatttcctcctctctagagatgggggtgggatctgagcactcagagccaagggcgcagtgggtccgggcgggggccctcctcggccctcccaacatgggggccaggaggtcagcccctcaacctggaccccggctgggtctcagggaatggtctcccccagtggcccagcttgcttgtgttttcagatgggtgtgcacgggtgtgtgtgtgtgtgtgtgtgtgtgtgtgtgtgtgtgtgtgatgcctgacaagccccagagagccaaagacctgagtggagatcttgtgacttctcaaaagggggattggaaggttcgagaaggagctgtggtcagccttgctctcccttaaggctgtggtaaccacactaggcatagcataggcctgcgccccgtccctccttccctcctccgcgcctctcctttctctttctcccccctctaccccgctccctggcctgctcctggtgacaccgttggcccccttccagggctgagggaagccagcgggggccccttcctggaagcccacctgcaggccggcttgctgggaaggggctgctctcgcagaggctcccgcccgccctgcagccgtttcctggaagcagtcgctgtgggtattctgttccttgtcagcactgtgcttgcaaagaaagcagacactgtgctccttgtccttagggagccccgctccatcacccaacacctggctggacacaggcgggaggccgggtccgcggggagcggcgcggggctggggccggaccagtaaacacacacgggcgccaggcactgcaggctcctcctcctcctcctgcccagcgcctctgctcacaggcacgtgccaagcccctaggccaggaggcccagcagtgggtgcagagcaagctcctgggaagggggtgcagggcggacccccggggagaagggctggcagggctgtgggggacgctgaccgtgggccccacgttgcagaaaactggctgcctggctggaagatgggggagatgccaagcctctgaggcagcacgagcagggtgcatggaggccggggcgcggggaggctgcactgcagcatgcaccccaaagcccagagggagtggagaccaggccctggaatcgagaagtagaaaggcggcttggaggcctcggaaccggctgacctccaacagagtggggccggccctggaggcaaagaggtgcccggggtccggccctgcctgggggagctatgtgtcatgggcagccacaggatatgtagccagctctgagcatatggacccagggcagggctgcaaggcagggcaggggagacagacgggggagcaaggagcagagagggggcctcaggctctcccaggaggaacattctcccgacaggaggaagagacggcccaggggtgactgtggggagccatggtggcagctggggtcgtggcagatgggagagaggctggcgaggtgaaggtgcaggggtcagggctctggggcccacatgcctgtgggagcgggcaggcccagggctctccgccactccccactcccgcttggctcataggctgggcccaagggtggggtgggatgagcaggagatggggcccagggggcaagcagggccccaaagacatttagaaaaaccggtttatgcaggcagcattcagagcaggcggcgtgcgtggcgggggccctgggagcacagagaggcacacgtagggcccccgaggggctccccattggccggcagtgacatcacccctgtgtcaacagtgatgtctgcagctccggccagccagggtttatggagcgagacccagcctggcctgggccctcactccccaggcccacacactagcccactgttcagggtccggggtggcggcatggcctgggggtcctggcaccgctgctcctctgcccaccctaacttcccggcatggcggctgccccctctgagcgtccccaaccagtaagtgtggggccagcaggcctgccgtcctcctcctcttccctctagagagaaacgtggaggtcctggggctgggggcgctcatagtcctgtgacacaggtgcatggggtcaggggtcccagaatggcccctgggaaggacctcagctgggccggcggctctaggcttcaggggtctgtctgcacaggggctagcccctcccagacctctgtgaagccagtacgggcctcccctccctgccccgtgctctgtccggtgcttcctggactgcactgcgggccactggtgagagggtggacagggaagggccgccgtggtgcctgttcctgcccacctggctgtgtggtcccctccaagtagggacaacccttctgagggcttgggggcaccctggggttgccagggcctcccagagccctgtgagcccctggggggtctggcctgatgcccccctccacgtccagggccggctgtggcccagaaccccagcttcccagcaggccggtgtgcggtggtgacccaggagaggcctcgcctccactgaggggccaccgacctctgccaggccacagagacccccaaggagtctgaaggctggagacccggggctgggaccaggtgggactttcccacggagccgcccccaggcccagctggggacacgtcccccttctctccagacacaccctgcctgccaccacgacacaccggcctgttgggggtctcttttaagtgcttgccactctgaggtgactgtccctttccaaagaggtttctggggcccaggtgggatgcgtcggcctgagcaggaggatctgggccgccaggggctggggactgtctcctggggaaggaagcgcctgggagcgtgtgtgctgacccaggaccatccagggaggcccgtctgtggggcaagcgggaagggagcggctggagaggcttggccgcccccgccctgcctcccattccttagctccatgcctgtcaacctctgtcacccagtgagtgatgtccaggggccctggaaaggtcacagcatgtttgagcggggtgagagagaggggaaaggcgggggcggggaaaagtacgtggaggaagctctaggcccaaggaaggagaaagggttctgggagggagggagccactggggccgccgggagggtccctgcctgctgctgccacccagaaccctcgcctcttagctagcccccgcagccccagcctttctggcctgtgcccctctcccccatccccagctgtcctgtgcaaccaggccttggacccaaaccctcctgccccctcctctccctcctcaccctcccaatgcagtggtctccagcctggctctgccctgccgcaggtcccctcccctcattccaggcctagagcctccagtcccggtggcccccagcccgagggtgaacggcctcaccctgggtcgtgggacagagggcacgttcatcaagagtggctcccaagggacacgtggctgtttgcagttcacaggaagcattcgagataaggagcttgttttcccagtgggcacggagccagcaggggggctgtggggcagcccagggtcaaggccaggctgtggggctgcagctgccttgggccccactcccaggcctttgcgggaggtgggaggcgggaggcggcagctgcacagtggccccaggcgaggctctcagccccagtcgctctccgggtgggcagcccaagagggtctggctgagcctcccacatctgggactccatcacccaacaacttaattaaggctgaatttcacgtgtcctgtgacttgggtagacaaagcccctgtccaaaggggcagccagcctaaggcagtggggacggcgtgggtggcgggcgacgggggagatggacaacaggaccgagggtgtgcgggcgatgggggagatggacaacaggaccgagggtgtgcgggcgatgggggagatggacaacaggaccgagggtgtgcgggacacgcatgtcactcatgcacgccaatggggggcgtgggaggctggggagcagacagactgggctgggctgggcgggaaggacgggcagatgggatcccaaggacatggaatttcggaccttctgtccccgccctctctgctgagcctaggaacctctgagcagcaggaaggccttgggtctagagcctagaaatggacccccacgtccacctgcccagcctagacccccagcattgaagggtggtcagacttcctgtgagaggaagccactaagcgggatggacaccatcgcccactccacccggccctgcccagccctgcccagtccagcccagtccagcccagccctgcccttcccagccctgcccagcccagctcatccctgccctacccagcccagccctgtcctgccctgcccagcccagcccagcccagccctgccctgccctgccctgcccttcccagccctgaccttcccagccctgcccagcccagctcatccctgccctacccagctcagccctgccctgccctgcccagccctgcccagcccagccctgccctgccctgcccagctcagccctgcccaccccagcccagcccagcccagcatgccttctctggctggagagcacaggcttgaccttagaaagaggctggcaacgagggctgaggccaccaggccactgggtgctcacgggtcagacaagcccagagcctgctcccctgccacgggtcggggctgtcaccgccagcatgctgtggatgtgcatggcctcagggctgctggctccaggctgcccccgccctggctcccgaggccacccctcttatgccatgaaccctgtgccacacccacctctgagctgtccccgctcctgccgcctgcaccccctgagcagccccctgtgtgtttcatgggagtcttagcaaggaaggggagctcttcaatcttgccagtcagggtgctgtctgctgagtaagtgtccccgtgctgtgccccaatgtccccatcctttggcaaacagccatcagcctgtggatcctgcactcccatgcggtgggagagggagacctgggctcacctgagcctccccacaagccagggagaggggctgcccaatggcgggaggcccccatggatcccaaacggcagttgcccgcactcctacccaggaactttgtctgtgatgaacagtaaggaataaggaagcgggtgagaaagaaggaaggaaaggcggtggggggcatggcggggggcggggagggtgtttggaaagttccagaaaagagtcacttcaccagaaaggccacaagctccccgtgcccccagcccctgctcggctccgaggtgaaggacttggagcgtcgacgctggcgtggggaccagctgttctccttgagtttgtttccttcagttccttccgggcctcaccctcctcttcctgccacacacacacttttttcctttttaaattgttttatttggggccaggtgtggtggctcacacctgtaatctcagtattttagaaggccaaggtgggcagattgcttgagtccaggagttggagaccagcctgggcaacatagtgagaccccatctctaccaaatatcagccaggtgcggcggcgcgcacctgtattcccagctatgtgggagactgaggtgagaggatcacgtgagcccaggaggttgaggctgcagcaagccatgatcataccactgcactccagcctgggcaagagagtgacaccctgtctcaaaaaaaaaaaaaagtagaaaaatttattttaaaaaattgttttaacatttgagtgctgcaactgtccaaggaggagcagacggcccgtgtcagacagcctgaagcctgactgtctgcgatcaacggccccgtggccagctgtgtgcagcagtttggcctggcctgatgcctctgtccttggcaccagctcacagcccgtgcccataacagacctggggcaccgaaggaagggcagatccagcccccacctgccctgggtctgaagatctcccaggaggctccatggggtgccttgagtgggaggggctggccgatagccttgaggaattggcacggacatgcagagaggggcatgtcccaaactcggggcgctgtggcctccagctgccaggaggtagatgtgttctgacttctgggttcccaccaccagaactgcaggggatatgaagcaagctggacttggggagacatctctgctcgagtgcacgttggcctgatgacgactgctcttgggttcacgggttccaggctctgcccgggagcctcatgcaaactggtcccgttctacagacgaggaaactgaggcacagagtgattacggctgtccctgagctcctgcagccagtaaggtgatacaccaggatgtgttcccaggttgtccgctgggctcagtaacacagtctcaactgccctgtgacactgcgtgtctgtgcttgtggggaaggtgaccagaggccccctttcctccacgcggtgagcctaccagcaaggagacagtcctcaggtgtgaggatgagcctcgtagtaggcacagagaaacaggaggaaccttctggaaggtgaagcctcccacggctgggactcttggagaagggcggatctctgtccactcctgcccactccc

SEQ ID NO: 2062 - DNA, 1627 bp, Homo sapiens
gtgaggagtgtggagtaggcgcccaggcatcgtgcagacagggcgacatcagctggggacgatgggcctgagctagggctggaaagaagggggagccaggcattcatcccggtcacttttgctgccacctcacccaccgcaattcatttagtagcaggcacaggggcagctccggcacggctttctcaggcctatgccggagcctcgagggctggagagcgggaagacaggcagtgctcggggagttgcagcaggacgtcaccaggagggcgaagcggccacgggaggggggccccgggacattgcgcagcaaggaggctgcaggggctcggcctgcgggcgccggtcccacgaggcactgcggcccagggtctggtgcggagagggcccacagtggacttggtgacgctgtatgccctcaccgctcagcccctggggctggcttggcagacagtacagcatccaggggagtcaagggcatggggcgagaccagactaggcgaggcgggcggggcggagtgaatgagctctcaggagggaggatggtgcaggcaggggtgaggagcgcagcgggcggcgagcgggaggcactggcctccagagcccgtggccaaggcgggcctcgcgggcggcgacggagccgggatcggtgcctcagcgttcgggctggagacgaggccaggtctccagctggggtggacgtgcccaccagctgccgaaggccaagacgccaggtccggtggacgtgacaagcaggacatgacatggtccggtgtgacggcgaggacagaggaggcgcgtccggccttcctgaacaccttaggctggtggggctgcggcaagaagcgggtctgtttctttacttcctccacggagtcggcacactatggctgccctctgggctcccagaacccacaacatgaaagaaatggtgctacccagctcaagcctgggcctttgaatccgcactacctgactcaggaatcggctctggaaggtgaagctagaggaaccagacctcatcagcccaacatcaaagacaccatcggaacagcagcgcccgcagcacccaccccgcaccggcgactccatcttcatggccaccccctgcggcggacggttgaccaccagccaccacatcatcccagagctgagctcctccagcgggatgacgccgtccccaccacctccctcttcttctttttcatccttctgtctctttgtttctgagctttcctgtctttccttttttctgagagattcaaagcctccacgactctgtttcccccgtcccttctgaatttaatttgcactaagtcatttgcactggttggagttgtggagacggccttgagtctcagtacgagtgtgcgtgagtgtgagccaccttggcaagtgcctgtgcagggcccggccgccctccatctgggccgggtgactgggcgccggctgtgtgcccgaggcctcaccctgccctcgcctagtctggaagctccgaccgacatcacggagcagccttcaagcattccattacgccccatctcgctctgtgcccctccccaccagggcttcagcaggagccctggactcatcatcaataaacactgttacagcaatttgtctcgag

SEQ ID NO: 2063 - protein, 219 aa, Homo sapiens
ARAGKKGEPGIHPGHFCCHLTNSFSSRHRGSSGTAFSGLCRSLEGWRAGRQAVLGELQQDVTRRAKRPREGGPGTLRSKEAAGARPAGAGPTRHCGPGSGAERAHSGLGDAVCPHRSAPGAGLADSTASRGVKGMGRDQTRRGGRGGVNELSGGRMVQAGVRSAAGGEREASRRQGGPRGRRRSRDRCLSVRAGDEARSPAGVDVPTSCRRPRRQVRWT

SEQ ID NO: 2064 - DNA, 1679 bp, Homo sapiens
gtgaggagtgtggagtaggcgcccaggcatcgtgcagacagggcgacatcagctggggacgatgggcctgagctagggctggaaagaagggggagccaggcattcatcccggtcacttttgctgccacctcacccaccgcaattcatttagtagcaggcacaggggcagctccggcacggctttctcaggcctatgccggagcctcgagggctggagagcgggaagacaggcagtgctcggggagttgcagcaggacgtcaccaggagggcgaagcggccacgggaggggggccccgggacattgcgcagcaaggaggctgcaggggctcggcctgcgggcgccggtcccacgaggcactgcggcccagggtctggtgcggagagggcccacagtggacttggtgacgctgtatgccctcaccgctcagcccctggggctggcttggcagacagtacagcatccaggggagtcaagggcatggggcgagaccagactaggcgaggcgggcggggcggagtgaatgagctctcaggagggaggatggtgcaggcaggggtgaggagcgcagcgggcggcgagcgggaggcactggcctccagagcccgtggccaaggcgggcctcgcgggcggcgacggagccgggatcggtgcctcagcgttcgggctggagacgaggccaggtctccagctggggtggacgtgcccaccagctgccgaaggccaagacgccaggtccggtggacgtgacaagcaggacatgacatggtccggtgtgacggcgaggacagaggaggcgcgtccggccttcctgaacaccttaggctggtggggctgcggcaagaagcgggtctgtttctttacttcctccacggagtcggcacactatggctgccctctgggctcccagaacccacaacatgaaagaaatggtgctacccagctcaagcctgggcctttgaatccggacacaaaaccctctagcttggaaatgaatatgctgcactttacaaccactgcactacctgactcaggaatcggctctggaaggtgaagctagaggaaccagacctcatcagcccaacatcaaagacaccatcggaacagcagcgcccgcagcacccaccccgcaccggcgactccatcttcatggccaccccctgcggcggacggttgaccaccagccaccacatcatcccagagctgagctcctccagcgggatgacgccgtccccaccacctccctcttcttctttttcatccttctgtctctttgtttctgagctttcctgtctttccttttttctgagagattcaaagcctccacgactctgtttcccccgtcccttctgaatttaatttgcactaagtcatttgcactggttggagttgtggagacggccttgagtctcagtacgagtgtgcgtgagtgtgagccaccttggcaagtgcctgtgcagggcccggccgccctccatctgggccgggtgactgggcgccggctgtgtgcccgaggcctcaccctgccctcgcctagtctggaagctccgaccgacatcacggagcagccttcaagcattccattacgccccatctcgctctgtgcccctccccaccagggcttcagcaggagccctggactcatcatcaataaacactgttacagcaatttgtctcgag

SEQ ID NO: 2065 - protein, 219 aa, Homo sapiens; identical to SEQ ID NO: 2063

SEQ ID NO: 2066 - DNA, 2315 bp, Homo sapiens
gggggtgggatgggtggggggtaacgggggaaactggggaagtggggaaccgaggggcaaccaggggaagatggggtgctggaggagagcttgtgggagccaaggagcaccttggacatctggagtctggcaggagtgatgacgggtggaggggctagctcgaggcagggctggtggggcctgaggccagtgaggagtgtggagtaggcgcccaggcatcgtgcagacagggcgacatcagctggggacgatgggcctgagctagggctggaaagaagggggagccaggcattcatcccggtcacttttggttacaggacgtggcagctggttggacgaggggagctggtgggcagggtttgatcccagggcctgggcaacggaggtgtagctggcagcagcgggcaggtgaggaccccatctgccgggcaggtgagtcccttccctccccaggcctcgcttccccagccttctgaaagaaggaggtttaggggatcgagggctggcggggagaagcagacaccctcccagcagaggggcaggatgggggcaggagagttagcaaaggtgacatcttctcggggggagccgagactgcgcaaggctggggggttatgggcccgttccaggcagaaagagcaagagggcagggagggagcacaggggtggccagcgtagggtccagcacgtggggtggtaccccaggcctgggtcagacagggacatggcaggggacacaggacagaggggtccccagctgccacctcacccaccgcaattcatttagtagcaggcacaggggcagctccggcacggctttctcaggcctatgccggagcctcgagggctggagagcgggaagacaggcagtgctcggggagttgcagcaggacgtcaccaggagggcgaagcggccacgggaggggggccccgggacattgcgcagcaaggaggctgcaggggctcggcctgcgggcgccggtcccacgaggcactgcggcccagggtctggtgcggagagggcccacagtggacttggtgacgctgtatgccctcaccgctcagcccctggggctggcttggcagacagtacagcatccaggggagtcaagggcatggggcgagaccagactaggcgaggcgggcggggcggagtgaatgagctctcaggagggaggatggtgcaggcaggggtgaggagcgcagcgggcggcgagcgggaggcactggcctccagagcccgtggccaaggcgggcctcgcgggcggcgacggagccgggatcggtgcctcagcgttcgggctggagacgaggccaggtctccagctggggtggacgtgcccaccagctgccgaaggccaagacgccaggtccggtggacgtgacaagcaggacatgacatggtccggtgtgacggcgaggacagaggaggcgcgtccggccttcctgaacaccttaggctggtggggctgcggcaagaagcgggtctgtttctttacttcctccacggagtcggcacactatggctgccctctgggctcccagaacccacaacatgaaagaaatggtgctacccagctcaagcctgggcctttgaatccggacacaaaaccctctagcttggaaatgaatatgctgcactttacaaccactgcactacctgactcaggaatcggctctggaaggtgaagctagaggaaccagacctcatcagcccaacatcaaagacaccatcggaacagcagcgcccgcagcacccaccccgcaccggcgactccatcttcatggccaccccctgcggcggacggttgaccaccagccaccacatcatcccagagctgagctcctccagcgggatgacgccgtccccaccacctccctcttcttctttttcatccttctgtctctttgtttctgagctttcctgtctttccttttttctgagagattcaaagcctccacgactctgtttcccccgtcccttctgaatttaatttgcactaagtcatttgcactggttggagttgtggagacggccttgagtctcagtacgagtgtgcgtgagtgtgagccaccttggcaagtgcctgtgcagggcccggccgccctccatctgggccgggtgactgggcgccggctgtgtgcccgaggcctcaccctgccctcgcctagtctggaagctccgaccgacatcacggagcagccttcaagcattccattacgccccatctcgctctgtgcccctccccaccagggcttcagcaggagccctggactcatcatcaataaacactgttacagcaatttgtctcgag

SEQ ID NO: 2067 - protein, 248 aa, Homo sapiens
MGPFQAERRQGGSTGVASVGSSTWGGTPGLGQTGTWQGTQDRGVPSCHLTNSFSSRHRGSSGTAFSGLCRSLEGWRAGRQAVLGELQQDVTRRAKRPREGGPGTLRSKEAAGARPAGAGPTRHCGPGSGAERAHSGLGDAVCPHRSAPGAGLADSTASRGVKGMGRDQTRRGGRGGVNELSGGRMVQAGVRSAAGGEREASRRQGGPRGRRRSRDRCLSVRAGDEARSPAGVDVPTSCRRPRRQVRWT

SEQ ID NO: 2068 - DNA, 2030 bp, Homo sapiens
gcttgtgggagccaaggagcaccttggacatctggagtctggcaggagtgatgacgggtggaggggctagctcgaggcagggctggtggggcctgagggggctggaaagaagggggagccaggcattcatcccggtcacttttggttacaggacgtggcagctggttggacgaggggagctggtgggcagggtttgatcccagggcctgggcaacggaggtgtagctggcagcagcgggcaggtgaggaccccatctgccgggcaggtgagtcccttccctccccaggcctcgcttccccagccttctgaaagaaggaggtttaggggatcgagggctggcggggagaagcagacaccctcccagcagaggggcaggatgggggcaggagagttagcaaaggtgacatcttctcggggggagccgagactgcgcaaggctggggggttatgggcccgttccaggcagaaagagcaagagggcagggagggagcacaggggtggccagcgtagggtccagcacgtggggtggtaccccaggcctgggtcagacagggacatggcaggggacacaggacagaggggtccccagctgccacctcacccaccgcaattcatttagtagcaggcacaggggcagctccggcacggctttctcaggcctatgccggagcctcgagggctggagagcgggaagacaggcagtgctcggggagttgcagcaggacgtcaccaggagggcgaagcggccacgggaggggggccccgggacattgcgcagcaaggaggctgcaggggctcggcctgcgggcgccggtcccacgaggcactgcggcccagggtctggtgcggagagggcccacagtggacttggtgacgctgtatgccctcaccgctcagcccctggggctggcttggcagacagtacagcatccaggggagtcaagggcatggggcgagaccagactaggcgaggcgggcggggcggagtgaatgagctctcaggagggaggatggtgcaggcaggggtgaggagcgcagcgggcggcgagcgggaggcactggcctccagagcccgtggccaaggcgggcctcgcgggcggcgacggagccgggatcggtgcctcagcgttcgggctggagacgaggccaggtctccagctggggtggacgtgcccaccagctgccgaaggccaagacgccaggtccggtggacgtgacaagcaggacatgacatggtccggtgtgacggcgaggacagaggaggcgcgtccggccttcctgaacaccttaggctggtggggctgcggcaagaagcgggtctgtttctttacttcctccacggagtcggcacactatggctgccctctgggctcccagaacccacaacatgaaagaaatggtgctacccagctcaagcctgggcctttgaatccggacacaaaaccctctagcttggaaatgaatatgctgcactttacaaccactgcactacctgactcaggaatcggctctggaaggtgaagctagaggaaccagacctcatcagcccaacatcaaagacaccatcggaacagcagcgcccgcaggccaccccctgcggcggacggttgaccaccagccaccacatcatcccagagctgagctcctccagcgggatgacgccgtccccaccacctccctcttcttctttttcatccttctgtctctttgtttctgagctttcctgtctttccttttttgtggagacggccttgagtctcagtacgagtgtgcgtgagtgtgagccaccttggcaagtgcctgtgcagggcccggccgccctccatctgggccgggtgactgggcgccggctgtgtgcccgaggcctcaccctgccctcgcctagtctggaagctccgaccgacatcacggagcagccttcaagcattccattacgccccatctcgctctgtgcccctccccaccagggcttcagcaggagccctggactcatcatcaataaacactgttacagcaatttgtctcgag

SEQ ID NO: 2069 - protein, 248 aa, Homo sapiens; identical to SEQ ID NO: 2067

SEQ ID NO: 2070 - DNA, 1547 bp, Homo sapiens
aacgggggaaactggggaagtggggaaccgaggggcaaccaggggaagatggggtgctggaggagagcttgtgggagccaaggagcaccttggacatctggagtctggcaggattgcagcaggacgtcaccaggagggcgaagcggccacgggaggggggccccgggacattgcgcagcaaggaggctgcaggggctcggcctgcgggcgccggtcccacgaggcactgcggcccagggtctggtgcggagagggcccacagtggacttggtgacgctgtatgccctcaccgctcagcccctggggctggcttggcagacagtacagcatccaggggagtcaagggcatggggcgagaccagactaggcgaggcgggcggggcggagtgaatgagctctcaggagggaggatggtgcaggcaggggtgaggagcgcagcgggcggcgagcgggaggcactggcctccagagcccgtggccaaggcgggcctcgcgggcggcgacggagccgggatcggtgcctcagcgttcgggctggagacgaggccaggtctccagctggggtggacgtgcccaccagctgccgaaggccaagacgccaggtccggtggacgtgacaagcaggacatgacatggtccggtgtgacggcgaggacagaggaggcgcgtccggccttcctgaacaccttaggctggtggggctgcggcaagaagcgggtctgtttctttacttcctccacggagtcggcacactatggctgccctctgggctcccagaacccacaacatgaaagaaatggtgctacccagctcaagcctgggcctttgaatccggacacaaaaccctctagcttggaaatgaatatgctgcactttacaaccactgcactacctgactcaggaatcggctctggaaggtgaagctagaggaaccagacctcatcagcccaacatcaaagacaccatcggaacagcagcgcccgcagcacccaccccgcaccggcgactccatcttcatggccaccccctgcggcggacggttgaccaccagccaccacatcatcccagagctgagctcctccagcgggatgacgccgtccccaccacctccctcttcttctttttcatccttctgtctctttgtttctgagctttcctgtctttccttttttctgagagattcaaagcctccacgactctgtttcccccgtcccttctgaatttaatttgcactaagtcatttgcactggttggagttgtggagacggccttgagtctcagtacgagtgtgcgtgagtgtgagccaccttggcaagtgcctgtgcagggcccggccgccctccatctgggccgggtgactgggcgccggctgtgtgcccgaggcctcaccctgccctcgcctagtctggaagctccgaccgacatcacggagcagccttcaagcattccattacgccccatctcgctctgtgcccctccccaccagggcttcagcaggagccctggactcatcatcaataaacactgttacagcaatttgtctcgag

SEQ ID NO: 2071 - protein, 200 aa, Homo sapiens
RGKLGKWGTEGQPGEDGVLEESLWEPRSTLDIWSLAGLQQDVTRRAKRPREGGPGTLRSKEAAGARPAGAGPTRHCGPGSGAERAHSGLGDAVCPHRSAPGAGLADSTASRGVKGMGRDQTRRGGRGGVNELSGGRMVQAGVRSAAGGEREASRRQGGPRGRRRSRDRCLSVRAGDEARSPAGVDVPTSCRRPRRQVRWT

SEQ ID NO: 2072 - DNA, 2026 bp, Homo sapiens
gcttgtgggagccaaggagcaccttggacatctggagtctggcaggagtgatgacgggtggaggggctagctcgaggcagggctggtggggcctgagggggctggaaagaagggggagccaggcattcatcccggtcacttttggttacaggacgtggcagctggttggacgaggggagctggtgggcagggtttgatcccagggcctgggcaacggaggtgtagctggcagcagcgggcaggtgaggaccccatctgccgggcaggtgagtcccttccctccccaggcctcgcttccccagccttctgaaagaaggaggtttaggggatcgagggctggcggggagaagcagacaccctcccagcagaggggcaggatgggggcaggagagttagcaaaggtgacatcttctcggggggagccgagactgcgcaaggctggggggttatgggcccgttccaggcagaaagagcaagagggcagggagggagcacaggggtggccagcgtagggtccagcacgtggggtggtaccccaggcctgggtcagacagggacatggcaggggacacaggacagaggggtccccagctgccacctcacccaccgcaattcatttagtagcaggcacaggggcagctccggcacggctttctcaggcctatgccggagcctcgagggctggagagcgggaagacaggcagtgctcggggagttgcagcaggacgtcaccaggagggcgaagcggccacgggaggggggccccgggacattgcgcagcaaggaggctgcaggggctcggcctgcgggcgccggtcccacgaggcactgcggcccagggtctggtgcggagagggcccacagtggacttggtgacgctgtatgccctcaccgctcagcccctggggctggcttggcagacagtacagcatccaggggagtcaagggcatggggcgagaccagactaggcgaggcgggcggggcggagtgaatgagctctcaggagggaggatggtgcaggcaggggtgaggagcgcagcgggcggcgagcgggaggcactggcctccagagcccgtggccaaggcgggcctcgcgggcggcgacggagccgggatcggtgcctcagcgttcgggctggagacgaggccaggtctccagctggggtggacgtgcccaccagctgccgaaggccaagacgccaggtccggtggacgtgacaagcaggacatgacatggtccggtgtgacggcgaggacagaggaggcgcgtccggccttcctgaacaccttaggctggtggggctgcggcaagaagcgggtctgtttctttacttcctccacggagtcggcacactatggctgccctctgggctcccagaacccacaacatgaaaggtgaagctagaggaaccagacctcatcagcccaacatcaaagacaccatcggaacagcagcgcccgcagcacccaccccgcaccggcgactccatcttcatggccaccccctgcggcggacggttgaccaccagccaccacatcatcccagagctgagctcctccagcgggatgacgccgtccccaccacctccctcttcttctttttcatccttctgtctctttgtttctgagctttcctgtctttccttttttctgagagattcaaagcctccacgactctgtttcccccgtcccttctgaatttaatttgcactaagtcatttgcactggttggagttgtggagacggccttgagtctcagtacgagtgtgcgtgagtgtgagccaccttggcaagtgcctgtgcagggcccggccgccctccatctgggccgggtgactgggcgccggctgtgtgcccgaggcctcaccctgccctcgcctagtctggaagctccgaccgacatcacggagcagccttcaagcattccattacgccccatctcgctctgtgcccctccccaccagggcttcagcaggagccctggactcatcatcaataaacactgttacagcaatttgtctcgag

SEQ ID NO: 2073 - protein, 248 aa, Homo sapiens; identical to SEQ ID NO: 2067

SEQ ID NO: 2074 - DNA, 79123 bp, Mus musculus
  misc_feature (1)...(79123): n = A, C, G or T/U
ctgcccaaagtcctcctaggagtgcagaccataatctggagcacatacaatcttgggaactcaaggttgcctctctctgtgctgcgccacggttagccattcctttatggacacagagataagtcagatgcggtcgttaactcccctccccctcccccataccttgccatcttctgtcttcaatgatttctctgccctcttgctattgattcactgagaaccatgtagtctgcctatgcagacgttcttacctgtgcctgaatctctgatgtcagaaggatgacaccagccctgtatcatctctggaaacccaatcagaggatgagggtacacctggctgggtatctgattccagtgccctcagaactgagccttaggtgtcagcataaatctagtttcctggtgctgaaatttgctaaaagaaagagttccgttggcctgggctcaattctccaatcacataccacatttaatttgaatacagtttcatctggagccattgtgcaattatgatgaaattcgaagaaaacttccaagtccctagcaattcatctgagttttcttgagaatcagaatttgcctgagattttagggttttttcttttttctttttttttttcttttaatgtgtatgccacaattagggaatgaactctgggtctcctatcctaggtaagtaccctacaagggagttatatctccagacaaacagaagggaggcttgtgtgagggtagttatatattggcaagcattttaaatttgaggacacagctatttatatgttcttcttgtcttgaccacaaagcaactatgagacctttaatgtgctttcatagtaaggattactttaaaaaattctcatttcccctctaaccataaaagaatacctgtggggctggagataaggctcagcagtaaagagcacttaccgctctggcaggggacccaagtgccacccccccccaccccctgccactcaccttaaagctcacaccctctctaactccagttctaggagatgccctgtgtcttcaggcctcctatggcacgccatgcgcatggtgcacttacatacacacacataaaatataaataaacatttaaaaatcgtacagaaagcaatttatgcttattaaggaaaacttagaaaaccacccaaataaagattaaaaaaccaaaaaacaaaacaaaacaaaacaaaaaacccggtcattaaagccatcgcctagataattgatgttaacatttttaggtgattccttgcaaaatgaactttattaaacacctatttctgcctgttcccaaaggcttagaggaaagcggacacccgagcaagtgagaagagttgctgatttacacagttagcactctgcagtttcaacatcttgttatctagagcaggttgacctggaacccacggagatccgtctgcctctgcctctctctgcctctgcctcctgagaatgggattaaaggtgtgtggctcgagtcctgtgtaccttgcgctgcgttaggctgtttcctgttgctataaatggatacaccagtcagagcaatcaatgaggagaggtttgttcctggttcttatggctgacgatggcctttttgttcggctccgggcggggcacccagagccaaggggtctcagtgtaagacacagactttttgactcacgaaattgcctgtgtccactggtccagaatggatccctcagcccagtcatctcttttgtttaacattacaaagtccatcatttttatgtttatttattgattggggggaggggagggtgcatggtgtatatatggaaatctgagaataccttgtgggaactggatcggtctttccaccctgggttctggggcttaaccctgggttgtcagctcagtggttagtgccggagccaccttgctgcccaagtgccctagtcaactcctaaaggttcatttggttccacctcttacacaccacaattagaattaaaatcttctatgagtttttcatggcctagaagagttgtttcctcttaaaatgatgtaatgataaatattactgtatttaaataccccttttgatttttttttttcttgctgtctgtgttgtgctgagagtccttggggtcagtcacctgccttgttgatgttcaggtgtccccaggaataagtggtcccacgctgattctcactgatggtgtgggctgtggtctccacacggatttactaataagctcccttcctcgcgtgatcgcagaactgagtgtgtgaagcagaactgagtctgaaaagccaagtctaagacagtgctgaaacatggtcatgaggctgaggttaagggagctacttggttctcctggtgaaagagatggccgtcggctcctcccagaacctctgcctgggtcacaggacttgggatcttggcggcagactgcaggcaccaagctgactgagaggccctctgcaggcaggaatccactggaatggctgacttatttctggaaacaggatgacactcagttttaagttttgagtagagtcaaacttaacagggtagctatgttttccaaactttattagtaagaaataattccggagcatgtgtgcacctatgcgtacatgtgggtgtgtatacgtacacacatcctgtttatattttacatttgatatcatgcataaacttccaggagttcacaaaagttttatcttcctccatctgactttacccctgttccttagtacagtctccctgtgttataaacagaaatttccgatgtttctgccacttcccttttttttttttttttgttctactctggagactctgagaatttgaactaagagccagtgctggacttgggctgggatggctgacctgtgattcagagctgatggctcagatcatgacaggttgtgtgagtctgagattcaaatccacattcttaccagacaggatctcagcatggaggggaagtggacacagccccgcccctaccaagaagacatttgcaactgatcccggctagcaaggggaaaatcagttttctccaaagtcggtccggtatctccaccacactccagggcaggactggttgggcaacacaaaacagacttcatggtgtgggtgtgagtgtgtatacccgcaccctcgtgtcgtgtgctttttggttaatgctttttgcttgcttttgctttttatctgagggatggagagggagaaagaacaaaggcaacactgggtgggtggggatgtgagaatttcgaggagttggggaggggaagagtgtgatcaaagcagattctatgaaaacaattgaaaaaaaccaaatatataaaagtaattgagcctgcttgcaagttcctcttcatgagactgtgaacataatgtgtgcactactgtaaaatgagacactaagcatgtaccccaaagagtgaaatttctttcaaaaaaattggaagaaaagctatatacttccacctgttaaatgagattaacaatccattatctaagtgtttgcaaacagttgactctttgtagaaaaacttcagggtgaagtacaaagattgttttgttttgttttgtttttcctagacaggctttctctgtgtatttagccctggctgttctggaactcaccctgtagcccaggttggccttggaatgagatctgcctgcctctgcttcccaaatgctggcatttggtataaaggtatgtgccaccatgcccagctcacaacgcaaagattttaatgcaagacacaacactggcttttatttgttttgtacagcctggaggatagaacacagggcctgaagcatgctgggtaagtgctttgctgctaagctgcacctgtagcccctgacatcctcagcacttagtgtgtaccctaaaaacatgagctcactgctgcccattaatgatataagaaagacacgactgttctgcagagacacagagaaggaatgtaaccagtcccttgattgtcccattagttaatgatagacagggagtcaaacccttgtcgcttgacgctggagtcctatcactaaatgatcaccagctatgagattgtttcctgtttctttctgattgtgtccttcctggttcagggtccttcagtggctcaagaagaccaaagcagtgactgcagaaaccttggcctcagcactggggaaccctgcagctccccatcttcctgctgtttccattaaactctccttgcgtctgggtgacggtttgaaaatggctaactagatgggattggggtcactatggaaacaaacgtctggtctgggcctacctgtctatgagaaactttttagactgggttagtttgaggtgaaaagaccaagtctaaatatgggtagcaccaccccatgggctgcagtcccaggctgagcaggaaagagagcgtgaatggagagtaagcattcacccctcttggccgtgacaatgcgtgcagggtgactgtcctgtcaaagggactgaactgcttgtgagccgacccctcctccttgcttctttgatctcctttccttgggctttttctcacaacaaccaaaaaaggtaactaacgtgctcccatgcttccacagaactggtcagctgtgctccccaccagggcttgtacattctttatgtgtgtgtgtgtgggtattgcactaatgtgtgtgtgtgtgtgtgtgtgtgcacatgcgcacacaggcaggaacacataagcatttgtgtggaagccacaggctgatgtcaatcatcttcctcaattgctttgcactttgtttttcccttaaaggaaatcttactgaatatggggtttactgatccagctagatgctatggccagcaagcattagggatcctcctgtctctgaattcccagctctggaattacaggcagaaatccatgtttccaactgttgtgtccagttttacaaacctgggtccttgccttgcaagcactttaccagctaagctgtcaccttggctagcatttaatcatttttggtcccaaatcctcttttcatgtttacacatgtcatctttcaaggtctcttcaagatcctgtctccttagcatctggagctgaagctgcccaggctcctccaaacctctcccctactgtgtgcctttgtctgttatgctaacctgtcacacctcaatggggcggcccccaggattgcgacctgattttccatctcatagaactgttaaatcacactaaaacttatctgttattttaaaaaattgtttgtgtattactcctttgcctgcctatatgtctgtgtgaggctgttggatcccttaggactgaagttatacacagttctcagataccatgtgggtgcttgggattgaacccaggtcctctggaagagcagccagtgcttttaaccactaggccatctctccagtcctaaaatttacccaggacctgggtagccaccgtgaccgaacataaacacagcacttgagaagtatagacaggggattcccagggtaagcttgtttacttagactagctgaatcagcaaattcaggattaattcaggattagagagctattcaagcaacttctggtctccacacacaagcactttagagagtgtgtgcagacacatacacatttatgtacatgtgtgccaatacacagatgaacacacacacacaaccctaaacactgcagaatatatgtcttaaaagctaaatctaccattaaggcccctctgcttgcccaaaagggaccatgattaagaattcgaaagaaatcatccatatttctatttttatattatatatatggctttgtaatggtttttattctagtaggattgcttctttccttccttcttccctccctttcttcctccctctcttcctttatttctctgaaccctgggcattcctggtgttttgtttgcatgttctgggcctttgaaagaattctcctgagccagctatattcttccttggtgggggcatagagtaaggacatatgcatgtgccagtgttgacctgtctaaccccggaaatgatcccatttctcccatgggagaatgcttctgtgaatattcgcagacatgtttgaatatgcaaattatctttgtatttatgtagccatgacttctttaggacatccccttcaacatcttgtagatgaagtggaaatataatgagcagaacggaggtgaggggtcttgcactctgtcctgagctctttgtgaggcctgttacatgtcagtgtagtttagggaaaggaggccagacaccgacttaagtgttaagctctatacctgggcttcatcttcgtattgttaatagtcatctcaacaaaaattggaaataattgttcctgaactcagtgtcattgtaagacttaaattaggttatgtaattatatatatatgtatatgtatgtatatcatttatcagtaaatgcctggaaaagaaaatagaatgtatttggaaaggaaaatgataattggtttagaaacctagcagaataatagtagtttgagtaatcctagaattggatggtgcagtactctttggcactctgtcattaaaacaagctcattagctgggcggtggtggcgcacacctttaatcccagcacttgggaggcagaagcaggaggatttctgagttcgaggtcagcctggtctacaaagtgagttccaggacagccagggctatacagagaaaccctgtcttgaaatccagccccccccccccccaaaaaaaaaaacccaaccaaacaaaaccaagtaaaatggcctagaaaaatggccaccgactcctggagactcctggaggtatactacttggccccaaagcagtttatctctgggcaaaactcactgttgtgaagtggaccgagcgaattgactttggcctcatcaagtggccccagctgcagctcaatagcttgataacaggaacctctgagggcagagactaacacggttccctggagggaacactggcttaccactccatgtcattggcctctctaggtcaccagccattagcttcgaaaatagaaagtgcagaacaaaacagctgcgttagacagagggctccttagatgcttaggttctgactagatatctccagtcttcaggggacgattctctactggaagaatctaggagtagttaagccctatattctggagcgaattgagaccactaactagccgcaaaatcttcatcagattttggaacttatgttgctctgatccggggaggtgcccgaaacagtctttggcgtccttatctctacaggtgagactcatatcgttggtttagtgcagtgggacaaagcagatgaataaagtcaagataaggaaaatatttcaaaatgaatttatcaagagatgctaaaggctggagaagctagatacaaatgccgctgtcctttgatttccattgtgtgaaatgtcccaaatatgtagactgggtggagagcaaattagtgattacttaaggctgaaagaaaagagagaggatggaaattgtctggaactatacagtggccacagatgaacagtacgttggatgttaccacgggtgcacattaaattggttaaaatggtgtcatgtctggtatatgtattttttgagacagacagatagacagacaagttgagttgaagccctgctctgaggtgtttgttagaggacgtgaaggggttatctgagaagccggggaaaccaggatgctagaaggggtttccgtgcagaaattatcgtctactcccggaggcagcagtaaggaggctctcggtgaagtatgagccttcctcagctccgggtcttgctctcccccagggagtaaagctgacctcaactgtgctgaggctcactcaaagctaccagtcggtgagattcactacctgtcacagaggctcttctggctcttcaggatattgaaggcggatttctctgcggcccagaagggtacacacaggttcctaccttgtctttgttggaaactgaggcctttggcttctctgcctgccaggcagccaatacagtagtgctcagaaaatatttgtgggtctgtgactgggtgagtcaggcaggcctcacaggagccgttttatgggttttaataggaaccataccgtgaaatccgaagcaccacggcactgctgcttagcgatcaccccagcgggagttttgggcagcactcattcagcaaatttaacctgagctgatggtttagagcagcctccattttacggtaaaaatgaccatctcgttaaaaaaaaaaaaaaaaaaaagtacatagcacctttgtgtaggaaggaaaccccgcaagaattgactcgcttgacccagatatagaaactgaggcactgagcggggtcacgggtcaccagctgcctaaggaatgggagccggttaggagaaatgctacttgaagccccaatgcagggcaagggacctcctcaaacgtacaaaattgacgttgatgtttatttcaagggaaatggctcccctctccccacctcgttttcttttccttcctcattcagagcataatgttctaaagcaaacgtctttttttcacacctgagcgaactgggcggctcattttcgctttggctatcaaaatagaagaggaagcgcctgcggtttcatcaggggagctttcggggcgtgtgctgccgggcgtcccgccttcctgccggctcacctggctgcagccctcagcccccaggctgccaggctgcctttgcctcgcaccgtacttcccacccgcgaagccaggcctagtcctgcagagcttccgggggcgactttttcactacacactccgagtaccttggacccacacggctgacatcagcatcctcctccccgcccccagcccccaaagccgcatctctcggtgctcggtccctgggctgacaattttaccgtaaaattgagtccactttgtctgcctggcgttacttatatttaaatgtcaatgtctccacgagggaggcctgcgttagaccggacagacctgccctctactgactggggacccagaacaagttacctaatgtcttggagtctcggtttcctcatcggccccagcaccggattgatacctacgggttgctgtgtgactgaagggcgagggcgctggagttctgtctggtcaccctaggctgaacctatcgaatccagcttctctttcccacttctctccgtgctccaagaagggccaggcaagctgggtcagggcgttggcgaccctcttagctccggggggtgcactttagaccgcagggggcgatgcgttcctctctccacccctaaactcccaacgccccctcgccctccgggcagccgcggtttgggccggctgcacagtgcgcagaagtaggctcgggacgtgacggtcgagcaccccatcgcggacacctgctgcagccgggttacatcccaccaacctcctcccccccgccatcccccgctgctgtcccctcgaggtctccgcacccctctcctcccccctggaggcccgaggagcattgtactcacatccggggctgggttttgctttaatgtgaaacgaaattaacccggaaaaaaagagtcgagagacggccttggaggacagctgaggataagggagaagtgtgccgcaggacaggcgggaagcgaagccccgaggcgcagagctctgggacccgatgcgacccttgctgcgcagagcgcggtgagtcgggcagagaggcgcaagggtccgggcgcggagggcagagaggggagcagggcggctgggtttgcttggtggcgccagtccgggtggtggannnnnnnnnnnnnnnnnnnnnnnnnnnnnnnnnnnnnnnnnnnnnnnnnnnnnnnnctcccaggaaagccccaaatgcagcccctcctccagtgcactggcgcctcctgggtgaccaaggtcgccaccgccaggggtcgggctgtggggtggggcgtgtgggggcggtgtcctgtggagctgcagattctcacgtttgcagcggcgaaacttctccgaggttcaagcacaggggtggtagcccctcaaggactgcccgggcagcgggtaggggaggagcgcagagaacgtcccaggcaagtccctcaggcacgagttgggtgttggagcctcttccttctccttctcactcctttttaacttggcgcgggcctagaatgctaccctggggagactcctcctttcgtctgctcccgccatgggcttctgggattcctggcaatggaggtgacttggtggaaaacgtaggtcggttccaggttaggtaaccctttcgaggggaagcctcaaaaggctgtcccctttaacgtccgcgcttccctgttctgctcagccatggagacttaaaatttaaaaggaaaagaaaagaagaaaggagagatggggccaggtcgtgtgggaagggaaaaaaagtatcagggcatgaccagggcacccttgtacaccttctgccctgggcagccctgccccgagtctttcacctttaaggcttccttccttcgtgaacatcttccgtttgtactccttctgtccctgattggactcaattaagagtttttcagaggcgcataaacactagaggaggagcaggggagaacgaaccagttgcggctcctgggagcattttggtttgcagtagaggctgaagttccaaaattgtgctagtgttcttaatgtctttgattagctgtcccccatcccccactctttctttgttgcctcccactcctccacccccccacccccctccaggaggagtataacgcttccagcaacagctaagcagaagacacaggaagggtagaagttttatcttcaacttggttgcatctagtgacttgttaataataatgataataacttggtaataagaacgtactgagttagcagtgggccagcagctcaccgggtctttagggagttgtcagactagtgaaggaccctggctgtgcagagcatcaaactggagtccctggtgtttggagaagccagaggaggatttctgaagcataatcagtggccttggcagagtttagctttccctgggtgctgcctgaggcagggttctaagaagagtagagtttgttgagcaaatgaatgaaagctatcactgagaagaaacagaagaaaggtggggcctcaggttgtgtcaggcaacgtttctctagctattgtctttagactgatgagtcctttggctgtatctgcagatgtctttttacagattactggtacccttagtggagttttagctggcttacatgggagtcttacctacctcttaactggcgaatttctacccgggatcaatttgggaactgcctgtcctttggtggagagatggcacacccttctcttcccttacattagtgcttgctgcttctcccttgtgtgaaaggaagtagggcctgcaacctccctcatgtcatcccagtgacgtgaagagagctcagatctcttgggattggggtttttattgagggacacaatccatcctggacacacacagggtttggttgttggctgctgctgaagcaactctgcagatgtgggaaagggacagcagaatgtatctccagatagagagcttgccttgcaaagccccccctcacctgaccccccctaccctccagccccagagggggtgagggagggagacaagtgttagctggcccaccaaaccccaggagagcagcagtcctgcacttgctcccaggtgtgtgctacaacactagacgaccaaggagcaggaacacggccatgtgtgcatcccgctgatacttcctcgagtcgatacaggtgcacatctgggcgatgtccctgtggccggctagatggctcagattgaactggatgtagactgctgacgctttttgggtctcagaaagcaaggaggctttctttattctgtcccctccagggggccttggttgctaggagtttgggctgggcacagcgctccccttgtgagatctctcctccatgaacagtttgggcagtcttactttcactttcttgtctgtcttggtttaagcgggataggactcagcaatctaatctgctaggctttggaaaggaaggaagcagaacaaacattattgcagtgtgacaggctgtggggagagaaaaacccctgccctgcccagcagaagccagtaaccaagagaaaggattggctagactgggaagatgggcaccatcctttgggggattgtatctggaagacctttgatccaaatcttggctcccagaatctcaaaacacatgctttcccatcgaacacacaggtttaaacagcccctttgcctccccattccttggcccggggtttactggttagcagttaagaatttccaacacattatttatttaagtcgtcagagtgattgtctctgttgcaaatgaggaaacaagttcaggagagcccagcggtttgtccatgtttgaacccaggttctcttcactctaaaccctttaaagcttcctgtgctatggggatgggtgatggaggtcggctgattcttttttggtggtcatggatctctctctctctctctctctctctctctctctctctctctctctctctctgcaaaagtttgaaactacaaatattgatccttgccacctgcttatctaagcctcgccacacccagcctttcttccttccctaaatctagagacagggtttgaacagacagacacacgtaggccatagtgtacactttgcaggagggcaggcgagagaggggaaacacgtaactatgggtgccttccttctcatgtgcagtcccggaggaagatccccccaaccccccacctctacccctcccacccccaccctgcctgcagtgagcctgttgcttagtgtcttctgagtaggggggctttcaggttctgagctctgtggagctcagcttctccaggctatttatatcccagatgtggccgcctgcctgcctgcctgcctgcctgcctgccttctcgctcaaggacctttctgggaaggtgatctgatgagcctttatttcttgcctgcggcccctccaactgtgttttctcccaatgtagatgagaggagaggtccagaaggtttcagatatctcattggtgttgtcttcttttgtcttccttccaatcaatgttcttgtcctttaaatttttctccctggctctgtatcttcctcctcccccaaaatcctgggatccagaggaggtcaggctgtctgagggtcaaactggcagccctctttctgaacctccccattcctgaagatgtttgcattcctcacccaggcttccgctggggacacaggacccggggtcggtacattcccttctcttcagggttactcctcctccagccacagtttggaatttgctctagtgaccaatgcaaaatgtgaggacactgtggctggattctggaaactctcgggctctgtctaccctgtggccgggctaagggattacctccagagtggctgtgctgtgtgctcttgttttcccagggccattagcatttatttttgaggctttaccgatctgtgggcacactgtatatgaaggcggcatgatcgtgactgctgctcttacctccacacccaggtcctgtctgagacctctgatgtcatttcctgtacactttctccttatgagtttaacagatccaggtcagagtcttcactactgccactggggctgtctctccagatcttctgctcttggaggacaaaaggggaggcaaatccagaaccaccatctaagctcttactagttataattctagaaagttcctgtcttattaacatggactaatgtgagagaaatctctaaatatgaacaaaaaaaagaatcttaaaaaatgcattttcttactgaaacattttaaatacgtttacatgtgtgtgtatgtgtgtttgtgtgtgtgtgtgcatgcccaagtgtgtgtgtgtgtgtgtgnnnnnnnnnnnnnnnnnnnntgtgtgtgtgtgtgtggaataggggcatgtccacattggcaagtattctacagataagctactctctggcccaaaccataattttgttgttgttgttgagaattttattcatgcatctgtgttttgttttgatcaaatccattcccttccctttaattcctccccctcttccccaacttcatcacacaccctcaccccacccccaccaactgaattcacttcatgccgcctgcatgcccatgaatgtagagagccctttactggagcatgggttagcctttcagttatggctactcccataggattcatgccacagttatagtagtgggcatatcttaccaggtcagccattgttgtagcgagtagggttcacactgagtaagactgtcggatacttttcttttctagcatcagtagaaccttctggaaagttagccagtaaggatgaagcttccagcttgatttgtccacattctatgactcaggtccatagtcctttttagcaataggtttgaaccatcaagttctggagtcaacaaagagcatcagccatggcttgtaatgtctacagggacctcattgaccaacaactccaaagtgataacttacacctgatgtgtgtgtatgtatgtacgtgtgtgtgtgtgtgtgtgtgtgtatgtgtgtatatatataaatattgctatactatggtgtctgagaggcattatctctgttatagggaagttccttttaaactgtgtgtgtgtgtggggggtgcatacttgtgtattttaggaaacttctttagtcctggccagctgcctcttgcatcatctaataactctatagctttgtttctttcgagacaatgtctcatgtagcccaggctggcctcagactcaatatacagtagaggatgacttggaatttttcatcttcctgcctccacctcctgagtgctgggattacaaatgtgctccttcatgcctggttcctgtggtgtagggttgcatggtaggcaagcactcagccaactgagggacatctctagctctctgtaaaattttatttagaatgttggattgtctgtccaccttttctttggcttgttcagctgaatatttgattaaagatttttagattggtttatttatgtatatgaatggttttgctttcgtgcctgtgggattccctggaactcaggttttacgtgctaatgggcggtcatgtatctaagttagggtttctgttgttgtgaagagacaccatgaccatggcaactcttttttttttttttggttttcaagacagggtttctctggctctggctgtcttggaactcactttgtagaccaggctggcctcaaactcagaaatctgcctgcctctgcctcccaagtgctgggattaaaggcgtgagccactatgcccggcccatggcaactcttatatgggaaaccatttaattgaggctggcctgcagtttcagaggttcagttcagaactgaacatagtgggacatggtgctgtgcaggcagacatggtgctggagaaggagctgagatcttgatctctaggaagcaggagtctgtgagccacaccggccatagcttgagcatatgagacctcaaaacctgtcccgacagtgacacactttttccaacaagaccacacctaatagtgctacttcctatgggccaagcattcaaacagaggagtccatggggccattcctattcaaaccaccataccacgtcagtgctggtaaccaagtcctctgaaagagggacacgtgttcttaaccaccgagcaagctttccagccccagtttatttgattttaaagttaatttgtcagccaggttggccccaatctcttgcatcagtcctcagtttccctagtagctaagactgcaggtgcactcatcatatctgggcagtttttatttgattatagttggttttttgtttttgttttttgtttttggcaaggtctcatgtagcccaggctggcctcaaacttactatgtagctgaggatgactttggtcttccagcgtctgcctccaagttctgggatgatacacaagccccattatgtctgatcatttactttgttatatcattattgtaatgtgtgtgtgtgcatgctcccttatgtagatgcatgtatgtgagtgcctatatggaggtaagaggacaatctcaagcattagcatccttcaggcatcttccatccttccgttttgtgtttgagactgggtctctcgatgcctagaacttcgcagagtaagccaggctagctggtcagtgcatgtgtgggatcccccatctccacttcatccaggttgtgattacaagtgagcagctccatactccaattttttttcttttcttttcttctgagacagggtttctctgtgtagccctggctgtcctggaactcactttgtagaccaggctgacctcgaactcagaaatctgcctgtctctgcttcctaagtgctgggattaaaggtgtgcgccaccactgcccggccacacccaaatttttatctggttctcggaatactaacaacaggccaccagaagaacagccatttttccttgttaaaactttggaaagagctggggagatttttatgtggatcttgaacttataagtatgcaacacttgtgagacaagcactgttaaccactaagccattccctcaactttacccgtttatcaactccacttccatatttcatatctgtgtatgttgactgtgtgttacatgtgtgtgggtcatgggtgtgtgttgcatgtgtatttactggatgtgtgtgtgtgtatgtgtgtgttgcacgggtatgtgtgtagaccagaggtcaacctgaatgttgttccttggatgccatacatctcagatttttgttatgttgttgattcatttttattcattttcatgtagcccaggctggcctcaagctgtgagtgaacatgtgtgtgttcatttttatgttttgttacttgcatgtttgtctgggtgccagaagttcacaatgggtttcttccctattgttctctactttattttattttattttattttattttattttatttttattatgagctctggagcctggagctcgctaagctggctgaccagcaagtcccaatatatgcttgtctgtccccaaccctggggcttgggttgcagatgtgaacttccacacaagctgtacatcagtgctggggtccaaatcatacttacatagcaagtgctttacccactgagccatctccccagctctacccactgagccatcatctccccagctccaccttctgttttgagactgggtctcttatagggacctgcagctcactaacttggtaggttggctgggcagggagctggggcatgcctgcacctcttcaccactgctgggactagaggcgtacaccaccacaacccgtattttaaggttagaagattgagctcatctgctcacatcataaggactgtgctgtccatgccgttgccccagcccgctcccaatttaacaaggaaaacccatcgtgcttatggtggcttttggatgttttttgctgtgagtcaagcccagtttggcctggacctcagagcaatcctcctgtctcagttgcccaagtgctgggagtgcagtcatgactcaccacacctgactccctaggggctcgtacgaggcttcccagttcctctcttcagaacagtggtcaggtatggatcaagatattataacaaaggcatagtccttagtgtttgcttagacccaaggacgtggacgctcctaagatgactacagaataaaccagctggggaataatgagcctctaagagtccttggcagtaggaaacaagaaacccaactttaagggtggagggagcgtacccttacagccggtgtctggctttgggtgactaagatactgatttattagactggagtccatgaagcgcggaaaagcttcaggagaggtgtgcttagctgacgttgtgtttctgcactacaggggctggagaggctcaaatcctgctgctgggattacccggctttctcctctaaataaagtaatgcatatctattatagaacatgtagacaactgtatacaagactgtatacacgcacgtgcacgcgcacacacacacacacacacacacacacacacacacacacgtgcatgtgtacggacacacacgtgcacacacacatgagtgcacacatacacacacacttgtacacacacctgcccgtgtgcccacactcacacatataggtagacatatgtgtgcacgcacacgtgcacacacacaaacatgcacacatgcacacacacacagcaccccagaagaaattacttgaaggcagtgtatttttttttaacagttgttcaatatctttaatatacttgagtgtctccgaattgaattatttattacttgatcatctggctgtttggattgttttcaactattttgttacaagtttaaatgcagttttcatctttctgcttctgtctgtttatttggatagaatcctaaaactagaaatactgggtcaaagagcaggaacatttttagctgtcttgttccatactgccaaaatgcttttcagaaaggtcccaggtgtataaaaatcctaggacctcccaccccgccccacccaagagagtgatatctgttttgagctcaaccttcctggtgcctctgtctaccctccagggtgtggtctactttcttaaggctctgatgcatctgtctctattaggatgcaggcctattaaagtttaaaatttctgggttagcctacctagtggttgaagaaatatttttgggtaggagcctctggagacctctcataacagggtgaaatgggcggcctaggactatcacaagtgtgtctcactgcctagcaagtcctggtcaggaattccagttgaatggccagttagcctacttcattctgcttgttagtcagcaacccagggaactcactctctctaatttttacttaaaacattattaaattaattaattaactgattaattaattaattaattaattattaaattcagggtctacatgaataaactacatagcccagactggccttggactcacagagatctgcctggttctatctcccaacttctaggattagaggcatgtgccatttttcatgctagtgtgaactatataccctatttccatttattgcaatgctaagaacttaaattctaccgaacatctagatcagcatggaattccctgcttagggaggcctctttgctgctctttaggctgagacaggtgggtcggtggtggttgagggattgggggtgggggtgggagtgagtgtggattggtcaaaggtttaaaatgcataaaataagaaaccaatctgagcgttcaccctcaccagtcgccatacatttcaaagtaggaacagttgtcaagtagtgagaacttcagtgcatggaagagtacagccagatatggtggtataggcccacggccacgcaagcctttcatcccaacagaggcagggcaatctctgagagttaataacaacatgcttttcatagtgagtttcagcccagccaagtctacacagtgagaatctcacttaaaaaaaaagtctaataatggtaacaagaattggttatcagttgcaacaaagatgtttagagagtgagtttataataggtttcaataatgctaaataatcacatagcctgtgttctaatcacattacccttaaaaaataatctatttgcttttactgtgtatatattaaaatgtgtcttgcccgcatgtaagtatgcaccacatggcgactgggatctggatagttgggagctgccatgttgatgttggaaagtaagaacagcgagcattcttaagcatggaccattttctattccccatattattatctttaacgtgtccttttttccatgtcaaaaaatggagaaaaaaaatatatggaaatatatacatatatatatataatataaaacagaaataaagttttggtattatttataatagaaatctggctctagattcacttgcttagtacttgaaaaatgattaggtaaaccatactgtaatccatacattaatgtacagaaatcattaaaaatagtattgatgagcaagcgggatagttataacaatgtttccatgtttgagtgtccagccgccgccggctccctcccacagttttggtgagctgtgtgactcagctgccttaggcatccggggacctcctccccctcggcccccccccccccatcaccacagtttattctgcatgttgtgtacagagctctgcttccgatctttccttctggtgcacggaagtcccacccagtggatccaatccatacgcatgggcagtccctcagcagaaggcgcgttctggagaaagaagccttccccagcctctagcttgagggagaagcagaactggtaaatcctgcaggctgaaaaggggaactttgaaagccagcattcttggacactacactgcccagcttgccttaagccagttggctttgttcaccctggcagcggagtgtgttctcttggacgttacactgatagcagggcatggtggctcgggcatgtaatcctagctcttgggaggctgaggcaggaggatcatcaagagttagagaccagcctgggctgtattagctgagccagggctgtacagtgagactctgtttcagataaaagctgggagagatttcactggcatagccagagccctgtggcctctggggtttcttcttccagagctatgtgggcgtctgtgggtgggtgtctctcctgtcctcacccaaaggttctgtacctttccatgctcggtggcttgtctttcaacttcagatccctgctccttgaacaggccacatgtattcccaggcattcacagcctctcgggccttcttctacccatgacccagcgtgtgctgggccgactcctgaaagcgtctcctaacacttggcttttttatttctcagaacttaaacttgctccactttgagactggcgctggggaacacttcaagagtaggtgacatcactttgtgcagggtgcccctcctccaccctccatggcccccacttctgctacacagttagcttccttttcaaaacctcctcttcctactttggatccctttctcacctcctcttccgcttccttttttgctatggtgggctgttcttagctgtttgtctgtctactttattcttctcatctctgcattccttatgagtggtcatgagatctccagatgtccgcagcttctgtccctctttggaattggccagcacatgtctgaactggaatatctctgtggtgtgtgtgtgtgtgtgtgtgtggtgtgtgtgtggtgtgtgtgtggtgtgtgtgtgtggtgtgtgtgtgtgtgtggtgtgtgtgtgtgtggtgtgtgtgtggtgtgtgtggtgtgtgtgtggtgtgtgtgtggtgtgtgtggtgtgtgtgtgtgtgtgtgtggtgtgtgtggtgtgtgtgtgtggtgtgtgtgtggtgtgtgtggtgtgtgtgtggtgtgtatgtggtgtgtgtgtggtgtgtgtgtggtgtgtatgtggtgtgtgtgtggtgtgtgtgtgtgtgtgtgtgtatgtatgtatgtatgtggctcttgtttcttggtgcactgcaggctcattggaatgttagtgaacaccccaccccatcagccatcacttttggagcaagcctggcctgaaaatgtgttccctgctacctgggtctttgtccccactgggcttggaaggctggggtagtagtttctcagaatctgtgttgggtcatagggcaccttcatcagccacctcaaacttttgcttggctgcagagcttctgtggctggggccatggtaagtcctgttctgctgaagtgagtcagagctcagtggttggatgttatctggctttggaagtctgaaggtgatataaccctttgcagtcctgtggggcttctaacctacttcctcatggcccatcagtccagaccagtgtcttagctatttctctcctctgagggctctggggctctccccctttcctgtaggctcttagagtacatgctggaaagatgaagtagccaggacctgtggctattctcaaatctccagaggccctgttctggagtgagggaaggtcctccgggtttaggacttgcgatggctactttctgttccttcccagcgtggaactgagatgagtcaagccaggtgaggcttagccagggataaagcttgcttcatcctcttcctcactagcccccttccctctcccacacaggatgctatgagcagagcccaggattatgcactatgctgatctgcaaactcctttggtagctgtaggcatttggtagctgtaggagtagacttgggttgtcatggccaagtaccacagcctgagaacttgaacagtggaaaatttattttcttacagtctggaggccagaagaacaagatcagggatgtgtcaggcctttctccttcactagaagatgggttcttcaggaacctatcacagtagcgtttaatcctcgggtactccagcttctttatgtctgaattcttgggtgtgttttattgttgttgttgttgtttttgtttgttttgttttgtttgggagggatcttccgggagagtgtctccatgtgtgaagtgagttactatcacttcctgaggctttgtaaagagtagtaactagtaaccaggaagtggttcttgtatgcctccaacttaactcacagcaaaaaaaaaaaaatcctgtaaggggtggtaccataattagtcccacttcacagtcatggaaaccgcggtgtagaaagattaagaagtaattagtgatggcacaggataccaactaagttgagcctcttgatacacgagcacatactagtgcataacgaagctaatatcccctaggtcactatgctcagcacacagtagggcctcaggaaaattagccgagtggattctaatgggtttcaatgactgtttagagttggtatacgtttccagggtccagtggggtagacatttggtgtccatggaagaaagctggtggcaaggagcctagcatgtcacagagatgagtcaaaccagggacaggtgaggctcctccaggccctcagacagggcctgctttcccctccttctcacccagtctctccctcctatggtgcagggtgatgtgaacagagcccaggaatgccttatgtggatcggcagaaccgaatctgtgggtttctggatattgaagacaatgagaacagtggcaaattcctccggagatactttatcctggatacccaggccaactgcctcctctggtacatggacaatccccaggtgagaagccagaggggaaggggacagggcgactgccctaccctctgtcacagctgggaggggagcggggcttgggtttctctcaagggacctctgtaagaagtaagagaccttccgacacacaccagcatgcacacatgtacatctgtgaggagaacttactccaaagctggcgggggtgggggtggaggtagcggtgggtgggggagggtgctcagtaatgtgtgagtttaacaggtacaagaatcttgatttaatccagagtagggtgtgttccattgggggaaagaagagagagggagaggagagctgaggagcagatctgggggagacggagtctcttagctctagatctgtttttcttgtacacaggaatttaatacttggggaaagtcgggcagagtcttccggacctgactcgcttcctctcacctcctcggggctgtggcctaatgactgctcctgctcttccagtctggggcccctccctagcagagaatgtgatctgcttccctgacctggacaatattggacttctctggtctcctgaatcaggaagtcagggagtttttcggttggcaatgaatgaccttctaggtcacctggtatagcttcctcatgctgcagaggcgtcctggacgttgcaatctacccctaggcaaagagaagtgactgcctattatcttctggagaccaggcacaaagatgaggaaccaagttctctgtctctctgtctctctgtctctctgtctctctctctcccctccctctactctttttttttttttttttttttttttttttgagacagggattctttatgtagccctggctgttttggaacacacaatgtagaccaggctggcctcaaactcacagagatctatctgccttcctctgcccccagagccttaggatcaaagctgtgtgccactatgcctctcctgtcctgttttactgctatgccttggcagaggtggggtttttggtgactggtaatgattagtctttgggaacttggaactttctctttttccaccgagagctgtcacgttcctcctttcagctggtccacagcagtttcatgggaagcgaggctgtgaagaacggtatgcacctgaaccgcatagtgacagaacgtggctgtacatggataggcatgaatgttgggggaggggcttgggtctgttcaaaggctgaagggaatagccttggtgttagggattggatatgtgctttaagatgtgagctggagggttgacaagatgggtcagtgggtgaaagtgctcattgttaagcctatgacccgagttaaatcctcagggtccacatggtggaaggagagaagcaacactggtctctgaatgccacatgctttgtacttgtttgtaagcccccccccccccatgttcgtccaccacatgaatgcaaacaaaaccaatgtttttaaaaaagacatgctgtgggctggagagatagctcagtggttaagagcactgactgctcttccaaaggtcctgagttcaattcccagtaactacatggtggctcacaaaccatctacaatgggatctgatgcttctggtgtgtctaaagacagcgacagtgtactcatgtaaataaaataaatctcttattaaaaaaaaaaaaagacatgatataggaaaagccatgtgacccccctggtcattacccgcatgctagcctgttgtgggtctttgctgcttatgttttgggtttgagagctgaatgaaaatactatagacgcagaaaacatgtaaagggggtcatgtgctgtgtactgcctgctccaggaagaatgggaccctccaaacaaccatgctcacatctcatcccatgtctccaataaggcagctgtcgacttgcacttaacgctgaacatctggactcgatcgaccctttgtagagagaggctgctgtgtcctctggttgcctcctaccaccctcaagtcttgctctgccttctggcttgcttgtcactctcctgaggactttcatcctgatttactgactttatgctgttccctgtgtttgtgctgtcctgaaccaagactcactttcttgggggagccctgccctgctgctggcaagttctgatttgtacctctcaaccaacctgccttttgtttacatatatgtatgtgtgtgtcgtgcatgtatatgtgtgtgtgtgtgtgtgtgtgtgtgtgtgtgtgtgtgtgtgtgtgtgtgtggtagaggggtgggggaagacgtatgaatttgaggccagacttcgatgccgcttttccttgattgctctctaccttgtatactggggtagagtctctcccttaaacccagggctcagtcattttgctagactaactagtctacctgccttcgagaacccctgttttggcctccagggtacttgcttacaggcagccagtacgcatgcccggcatttacacaggtcctgggaatctgaactttggtcctcaggtttgggtggcaagtgctgtacccactgaactacatacccaactggaccctttgctcatactctgagccacagagagtcttgctctcaatcaagaggtgtcaaccatgatgtcctcatcttgggtcttgaatattgccagctcttaggattccctcattgtaacccaccttctgacttgattgtctcatagacctggaacctggatttaccagcaatacattgcatgcctactttcctggctcttgggactgcccctgcactagtgtccaccctgcccagggcagccttctttcctttctgctggagggctctttggttgtcattcttcctggaagcaggagagcacaaccagatgggtcttgctatgacagtgatggatggctcagaacacctcttcagttcctgtgttagttattggtcatgttgatggccaagcaatctttccagatttgggtgaagtgtggttaccatgccatgtccaactctctgggcttttgtctcactctagaggaaaggggtgggcatggaaggtgtcttgtcctcattctggaagcaaggaaggtggtgtgtgtgtgtgtgtgcgcgcatgtgtgacatgcccagtgttataagcctgttagtctgactcccgtacccctgcctttgctactcacaataagccggctatcttgaggtggctttgcgaggaagaaaagcctgtaaatgaagtttctggttaagcaagagaaggggaggatacagttgggaggtggcagagctcacatgctcgagatgagcgacatgtctggggttggatgaacatgtactccatgcatcagtgaatgaataggagactgagagggaggggcagtgaatgaagctgcctgagaactgccttagagagggaggggcttgatgttgctctcctgggagtaggaacagaattcaaacccaggataagctacagcctggggctccctggggatgttggcctgttcttgtggagagccacaagaacaagggcacagtttgagggccctgtaatatcactcagcctcgacaatctggccatgggatgcaatgactttcttttatagggaaagggggattcttgacgtggtattagaatgatttagctagcattaatgaagttttcagaacccaggagtctgatcacctcccgtttgaatgcctgcatatcttgtcttgatgagcctgtctcaactctacccctgtttcctccattgctgttgccattgacctcagtctctgtttcctgagggctcactggacaccaggcatcctgtgaggtgctttgtgcatctcagtaaagcccctgcctaatcgtgagcccttgggactgaaattccttaattcagtgttgagcaggctggaaatgtggctgcggtaaagctgaagtccttgatattcttcacttctgtcttctctctctccttctgagagtttactggctcctggagatgggtggggaaggtgaatcaacaatgtctctgcttctaggaagtttcaagttgaggaaatagaaatgacatgcacaacccctcaaagccgtagtaatgttaagccatcaggacaagacatcgcaccgttcattgctggtgccagtgcctagataccagggttttggttggagaagacgctgtagttttccatttctattgcttcttgaggaagagagaacactaggaggtggagtctcatatggaaacttctcaggtctgatagacaggagagcaaggctgcaatcttggcccatcttctcaggtgactggtgttttaagcaagtcctttctattctgaagcttagtgatgttacctaacacgtatgtgctgaactaacacatgtatgtctaatgtgttagatgccgaagtatagagacaccatagtaagcaagacagactcccctccatctcctgtgagtagggagatggatgatcacatagaattggggagagatggttgagagccatatcttcatgggagaagtagtactagattgtcatcttttaattttcttaagccttttttggaggcagtatcttatactatgtaacccaggctagacttgaattgacaaatctcttacttccatttcctgagttttgggatgacgggcatatgccgccatacccaactgtgggcagattgtggaggctgggtgatattagaggaatcattactatacattattcaggtttgaggaacatttatttttgacatctttttatgtacaaagtcttatttagctgttgtgccactttgacctattcagagttgaagaggaatgggagatagccattatggggacataggagtgcatgtgaggttacctagctaaaggattgctttcggttaggggcccccagaagaagtgcttatgatgagcaaccaggtacccagacaaagatttgtagacaattcttctttaaagagatgcttcctcgggacttcctagaagtgatgggggcagccctggctgagaaaggaggaagttcctcagggctgagtacttaggtgggagtcagaagggaaggctcagcctggccttgagggagctcttgctgagttaggctttagggttgtctggctcgtatatgtctgtactgactaccggtgaccacagctctgcaaatacagtcagaatggcttctaggaacccatggccagtcccctaagcatagtgaagggaaacacaggagactggccacagcatctgatggggggacctgaggaagagggatctgaacacaagagggcctagctgcagctttgaacggcagtgttttgcatcaatgcgaggtaaggagttaaggtttcaatcacagatattggtggcggtaaactaaggatagaatccaataggtaaaacagttgctaagtggaaagtaccaatgttattgattagacaactgaattggctaatttgtttaaaaatccagtatgctggcaatatcaagcaagcaaaccaataattcttttgttattgcagtaatcatctttagcatctttaagaagttagggtatttataaatgcataatagcatactgtcaactctaggtacagaataacaatatagaacttacaggataacaactctctctaaaatccagtcatcttgcaaacaaacaatagtgtttttttttgttttttgtttgttttgttttgtttgcttaatgttttcagtgctaggggttgaaccctggctctcgtgcctgttaggcaagtgttcttccactgaacaccttgtagttgttttgagacaagatcttgctaaattgcccaggcaggactgaatttgtgtttctcttgccttaggctcctgagttgagctgctggattataggcaagcaccagtgtatcaccacgcttggccaatggtttttgaaacactgcccaaatttccttcaagtcatgatacttgcagaggtgtgtgtgtgtgtgtgtgtgtgtgtgtgtatgtgtgtgtaaatgtgtgagtgcatgtgtgctatatgttgtgtatgtgtgtaaatgtgtgagtgtgtgtgttatatgttttgtgtgtgtgtgtgtgtgtgtgtgtgtgtgtgtgtgtgtgtgtgtgtgttagtagtgctggaaattaaaccagtacttggcagatgttgggtaaataccataccactgagctacactcgggccttgacagttttccttttaactgagtgttggtccctatcacgatggagcagatagaacacttatgggactgctctactctgtagtgacctgtggatgcagacctgggttttggttgctcagccacactggtgttcagcactgccagcatccacacacagggttaattgcaagttcacattgtatggctctgaataagtgtaaaccaaagcatggacacgatgtgacatttgatggtggctttcgtcaagattcctcagtagagtgtaatttttcttcttgtccaaaaaaattttttttcaatacacttcttttacacaagccaacatgtgaattatggatcattataatatcctaaaagatctcatctctcctagcaaatgtgcgagcccaatgaaagacatttgctttgtttaaaaaccaaccaaccaaccaaccaaccaaccaaccaaccaaccaaccaaagactgaaaataggtcttttcattggccatgcaaagaacacagtgttcacagtaggatggatactgggctcatctcaatggaaaggctacagagtgaggggaagagtgtattaatatgtaccttataacaacgttatgatatataaatatgtaccttataatgttatgatatataatggcattgttgccacaaagacttagtgaaaacagttaagagcgatgtttttacatcagaaacttcctttggaaaagtttgggctctatcagtactttaatggcttctgcatcgttggctccagcccgggcaaatgccaagaaccaggaagtaacttcattgaaaatgggcaatgccttcacctggtgcaaacttagtgtagaaaagaggagacagtagcaacatctctgccctctgtccctgtcccccagctacagcctcttagcaggcagcaacaggacagctctccccagtgtctacttaccaagcccacacatggacaggcatcttgtaaccttcaactctttctcaattggtttgggaaagtcttctttttaatagtcttaaattttttttttcttaaatcttagtttgtgtttttttttttttaaagatagatggactttctgtggttgataactgactatatatgtgccttagttactttcttattgctataacacaatggctaaggcaatttagggaagcaagagtttattgcagctcaaggttccagagggctagagttcatgaccattatggtcaggattatggtggcaggcaggcagacatgatactggaggaatttctgaaagcataaatgttgagccaacaactatgatggagagaaggagggaggggatggagagagagagagataggagagagagaataagaatgaatgaacatgaactgggcctggggtgagcttttgaaacctcaaggcccacccccagcaatgcacctcctccaacaaggccacacctcctaatccttcccaaacagttctactgactcgggaccaagcatttaaatatatgggtctatggggtcatccccgttgaaaccactacactgcactccttggctctcatgggcttatagccacatcatagtaaaatgcttttagttcagcttcaaaagtccccagtctttcagtctcaagattgtttaaagtccaaagtctcttcggagactcaaggcaatttcatgactctaaccccctgtaaaatcaaaaagctaattacttccttctaacatacattggtacagagtatactttaccattccaaaaatagaggaacacgaaaataggaaatgctggactaaaacaagatttaaaaacccagcaggggcaagtgtaaatcctatagttctatgtctgataatcaaagggcttagctgacttcttccctttcagctttgggcaccataacacacttctctctgttgggctggttccactccctggctgtaggtctccctggtggacatcccatgtctctggcagacctcctgtggctctggtaatctccaagaacttgaagtctctgactcagcccaggcttcacttttgtagctgtgtgtggcatgatgaatgatgggaatcaaggagggacagggctcctggctgggtgagggagaaggatagacctgggggctgactgtaggagtgacatagactcaccaaaagtgtcacgcctgcttttgcatagcagtattcacgggtgggcctcttcatagtctagggttataaaatcatacgcttttgtggttctgggagcttgaacccagtgttttgcacatgttaggcaggtactctatcccgagtttcttctctagtttgctagaaagttatattaataaccccaaaaaattgtaatgggatgatgaatcataaatttatatatttttgaagccagccgggcgtggtggcacacgcctttaatcccagcacttgggaggcagaggcaggtgaatttctgagtttgaggccagcctggtctacagagtgagttccaggacagccagggctacacagagaaaccnnnnnnnnnnnnnnnnnnnnaaaaaaaaaacccagaagccattagcatttaaaaagcatttatatattatgtatgtgtgcacatgacaatgcccatgttattgtgtgcccgtggaggccagaaagcagttgtgggagttggctcttcctttcccccatgtggggtcaagggatgaaactcaggttgccaaacttagccaaaaaacctcaaacgtttaaagtatatgctcatgcctcatttacatttcaaatcaaacaaacaatatgtagaattatacgtctccatatataattcaaattgataagcacaggattatagctaagagatggtgatcttggggagccagagggcgttattctcttataaaggaggagccatggcgatatagaggttttggtatgctaatttacagcagacaaatttaagaaagaaatgtggtaacaaagaccttgttaaatgggtcagtggtggcgcacacctttaatcccagcactccggaggcagaggcaggcagatctctgagtttgaggccagcctgatctccagagtgagttccaggataaccaggactgttaaagagaaacactgtctcaaaaacaaacagacaaaaacaaagaccctgtcaagtgtgaggagccggtgacctcctgacacaggcagtgagcgtctagcatggagctcggtagtactgagtgtgctccagtgagcctgacttaagtttctcttctgttaaatacagaaatattgttacgtagtatgttcaaggatggcttgaaacttctgtaatgttttggggccaggaaagtaagaggtgcttaataagtattagttaactgcaagcagcacgttatctgccagctcttccccggatggctggtgagtgtttctgaacttactttatttagtttctttgtgctaatgaaattctttggtgtgccaggagttataagctgggagagctgtccctgttaggagacagtaggggcaaaactcttaaactccagcatccctgtgcgcagtttgccaactcttaaaagatggttaaaagagactgaaagtcacaataggtcgatgcagtgttccttcagctcagcttttaacaggatacattgtagttattttctcttggtttaaaacccacacatttccccctcagggataatttgtgcaactagttgtatttttaaaaaacaatacattttgtgtgcttgtaagaaaacgtttcatatctggttgactggagaaaagttaaggagtcactgacaagagatgtggaagatgggaggggtgcgggcgagaagaggaaggggaaatgacattgagttttaggcaacgtccgaggaagctgggttaaaggaagggatgaaggagtttaagagccattgaggttaccgatagcctcagactcacctatttctaggcatctatgaagttcaagctggcaatcagttttgagagaggggtgcaagggatatggaaaccaacaggctttacacagaagagcccccatcctgtgtaagaaggcgctagcacatgcagccaggactagactccccggagtgttaagccaaccctgcgtcctatgatattgactgcccaccagggcatggttaaaaatacataattggaaccagagaatgggaaaagcagctatgggcatcatgtgggccaacaagtttttaacaggaagtgaatctacggggtggaggtaaaggactgcccagggtagctggtgcctgggagagctggtttatatttagccactctctcattccaggagggctgtggaacgcaggtctgggcagcttactcttttgccatcctgccacaggtgcctctttgtgagcctggatggtcttggctttggcgttgaaaggccaggagcagccatgtgggctcatgctctgggcatgagattgctacctggattctcttttcttctactggcaggcagcagcagttactgatgcctgctgggctcctcgctgttggctgggcatccttcttcctcccttcccacccctcaacctctgctcttttggagcttggcaccccacagccagttggactagttcctgccctgcccagcttgggcaagtctctaaggccctacttagtgtaactttgtttctattcttgtatttacctttcattgataatcaactcgtagataattgtctcagggtgtgtgtgtgtgggggggggggtggctggcatgaaggaaagtaccacaaagcatctggcaatctggaagggctgggtttaaaatctggcctgacttgccatctgtataaccttgggctagttgcctcgcctgctggatctttggcttctgtatctgagaaatgggactgtggaggtaaggtggcattgtgaagcatgtatggtgcttctctcagtcttacctgtctctgcctagtttcccatgctgtgctctgccaagtactaggttgttgctgggatgacaagctctgttctccctgggcttcctgcagaaaccaatcaggggatcatggtagccaaagagctgtcagtgttgctgatagggtcaacatcctgctgatcgatgaatcttcagttggatcttctggccatttctatgctctctgctactcttgctaggaagtgggaaatggagtgaagttctctacttcagcatggagggctgctgtttctgcagaaggacttaaggtggagacaccggctttgtgggcagctcagttctttcttggtcacgggagagaataaaccaaagtcttttgagatccttactggctgaagagaccttgagtaaaatgctaggtgttggtcgggtctttttaaagtcccctgttagtgcacagataactgtcctgttccagaaaattcacttgtctaagaaacgtataggctgcttttccttatggacctcacgaagggttgccagctacctgctgttgttctggggtttcctttcccacccaaccctctccccagcctctaccttgaggactgctgcttctgtgctcctgtttcctctctaaggactgcatcggattggattgtcatactgtaccccatgatgtaagatgactatgtgtcaattaaaaaaacttccctcagtggttaatattcactgccttctagaagtgtaagtccctcattccaaagtgtgagagtggctgtacacctcagtattaaattctgtgctgggcactcatgaaggaactagcttcaatccctagcaccctaataactagtcaataaggtactatccttcctgtgtgggggccaaatctgctcagtgctatgaaggcatcctgccttggccttgcctcttgaatgctgggactattagaacctgctgtggtggcttgaataggtttggcccccattgatttatttatatgtttgaatgcttgaccatacataggaagataggaagtagccctattaggaggtgtggccttgctggaggtgtggccttgttggaggaggtgtggccttgctggaggtgtggccttgctggaggaggtgtggccttgctggaggcatcactttgtaggtgggcttagaggtgggcttcgagggctttcgggctccacccagtgtagaatctactctcctcttgactgcctgtgaaagacagtctcattctgctgcctttggatcacgatgtagaactctcagcttctcctccagaatcatgtctacctggacgctgccgtgcttcccactatgatgataaaggactgaatgaacctgtaagccagttccaattaaatgttgtcctttataagagttgctttggtcatgggatctcttcacagctctaaacccctaactagcgtcatgagatgccaagcttatagtgagtgtagtaagaatagacttgattcttagggaaatatacagtaagtaacacagcatccagggctagatcatgtcccctttctcagctgttcttaaacttaggtctatttagggaatcactgggagtgttttgaaatgtgtgtcttctaacccatcccatttgatttagactacccattttgaggatgaagcgtgagccagaacttttctaagtgagtcttccaggggtttgagtctgttccaacatccaggatctgtctgtgaggtgagagacaggagcttgtagctggctggagtcagcaaaggcctcagcagagtcctgagtttatccgtccatctctggacacaatgctgtggctcctccctccacgcctggcatttgatgttctctgggtgctgattcctgggttccttgcgccggcacctggctgctcagacatttttgtgcaaccttgtttgatgaggaaacgtctgcctgggactgtctgcgtgccactgtgacaatcaatgggttcttgccaatggtagggaggtgttgccattaaacttgtagatccaataattggagcagagtctaactctctagttggagagtctaactttggatgaagccttgggattcttagggatgtttctcccagtgttatgcctttccccccttggatgggtaggaggtggtgggcaaacagcttttcagacgttcgccatgttttcctggcctcctgggatggagagagcatttatccgtgcctcagagcagaaagggcggagtaggcatgagatttccccaccctcatccccagggtcactcggcaggcagcactgtcactgcgagtgggaggaggctttctcggctacagcagagggctgacgtccttgaaatctgatctacccctgtcattacttgtggtttagagtccaagttgctcccccactccacttcactcataattcgagatggggctccagaggcttctgagatgtggtttggggtgagggagagtagttatttaagagcagccctggaccctggtgtttgcatcttgtaattagctcggttgagaagccagtggctgttctacaccatgctcaccctatttccatggaattctccccgccatcatctggcacagtttatcggctgcattttataggaaaggtcttgtgatgtgggaagtattaaaaaatgaacacaccaacttttttggggtgggggagaggccatgctctcaagctcttgctccgcctcccttttccctgtccaatcacagacctcctctatattaatgtaattggacagggaaaatcttgggacagtcttgactgcagtcagtggtgtcaatactacagtgaaatcgcagtctctcaggcttttgcaatgagagtggactgctcctagaagacctggaagcctttagctccacatgcccggcatctccaggccacagaaacactatggagacaaaggcttgtctctgctccccagccgtgctgcatctgcccagagttgttcatggcccctcaggctcttgctccttactctcagagagtggtggctccgtgtggctttgctttggggaatgacagaactgatctttcttaacacaatagggatttccttcaatgaatttttagaagtcatgataaaatttaggcagtgcataaataatgccaatctgcatgctcgtatacatttacttttgcagaacttagggtaaccgtgagggtcccatgcatacagaacttggggtgatcatgagggtcccatgcatgctcagaaaatattccaccactgaatcgcactctcagcctctcaaaggtgctttctcagcttcatatttcatgtataaattatggcaatggagtcttttttttaaggtctgttgctgagattcagggcgctttttaaatggctgtgttagccctgtttccttataaacaggaagctggacaaactgaatttattttggagatataaattaaatttgggtaacaggctagagtgttctccccaaatctaagacatttattttttttaaatttcttttaataaaaaaaattattttaggtatatggtattttgcctgcatgtacctgcatgtatctgtgtaccgtgtgcacctggtgcctgtgaaattatagaatggcatcagagcccctggaactggagttacagacagttgtgagccaccatgtaggcactaggagtcaaactgggccctctataagagcagcaagtgctcttaacccctgggccatctctccagctaagagatttcttaagggagtcttctagaatggtagaccacttctctgttaatccttaggtaaatttaccaacttttcttatccaagattttgttcttttcattgcttagagatggccccgtatagtgggggcttccactgttctcctggaggatcatggtgtgagttttggagctgcaggctcaggttgtggaagcaggttctcaatggactcccaggataatagattcccagggctcgagagatggctcagtggttaagagcactgactgctcttccaaaggtcctgagttaaattcccagcaaccatagggtggctcacaactttctgtaatgggatctgatgccctcttctggtgtgtctgaagacagctacagtgtattcatatacataaaataaactaggaaaggggataacatttgaaatgtaaatgaagaaaatatctaataaaaaaataaaaataaataaaaagaatagtttttaaaaaaaaatctgaaagtctgagatgatgtcaaatctgcaattttccgaatgtggatgtgatgacaagaagaaaattctatgcctggcttcagccgcatatgaagcagaggatggccttgtcagacatcaatgggaggaaaggcccttggtcctgtgaaggctcgattccctagtgtaggggaatgccaggacagggaagcgggagtgggtgggttggtgagcaggaggagggatgagggcatagggggttttcggaggggaaaccagcaaaggggataacatttgaaatgtaaataaagaaaatatctagtaaaaaaaaatggaaaaagaaagaaagaaagagagagagaaagaaagaaagaaaggaaggaaggaaggaaggaagaaagaaagaaagaaagaaagaaagaaagaaagaaagaaagaaagaaagaaagaaagaaagaaagaaaattctatgcctagccccttgaggtgtgttacagtcagaacaggaggggacaaaaatcattgtctaaagttaccgtccgtcctccggcaatctgtacatgaagcacaaatggaattctgtgtttagactcgggtccaatcctcaggacttctcatttttttaatgtaaaatgtttaagagcttggttgtaatgacatgcatctgccatcacatcacccaggaaaaggaactctcactagcagaaaaggaaaagaaaaaacaaacccctgaaatctcaagcactttggtttaaataagggcatcccagatcacagcaggggaccctgggggtcagttaaatggtggtgcatacccatccaacccctgtcctagagtaactcatcggaagaaggtgagggctactgttagtgtcactatgttcccctagatttatcactggtgtcttgtacatagcagggtgacttgcctgagactacaatggcacaggttagaccagaacactgaccctatctcttacagctgtttgggggcctcacacagtgcacatcttaagaaaaaatctttgtctttcagaacctggccgttggggcaggagctgtcggatctctgcagctgacctacatctcgaaggtaatgttggtttggcacgccgggaagccatgctctcagagcaggtttaatgtctaagcatgaggaagctctacatcctggaggtgtgagcctttgggagcagtcacagccgtgaccctccgtgtctctgtttctcaggctgctgctgtttggtggtggtagtggtggttagcagtggagagggtggcccacagcctcttactctttggatccgccggatagtcgtcactccagacctgtgggcacatttgagatactctcgacagagaaaagggttactttgggtcactgtgtttgagatcttagttgtgattttggggcagcacattatgtcagaagcagtggtgggcagcttcttgcctcatggctaggaggcaaattatagagggactggatacctataatctcttctaagggtatcactaatcacttaaggacttcccacgtagccccacctcctaagagttccagctgttaaccactggcctttgggaagcatgtcacatctgaaataaagtaccatgtaggatgtgacctctttttttttttttccttccttccttccttccttccttccttccttccttccttccttccttccttccttctttcctttctttctttctttctttctttctttctttcttccttccttccttccttccttccttccttcctttctttctttctttctttctttctttctttctttctttctttctttctttcttgtgattggaacaaaaggacaatgaccctgatccagtaaaggattctctcgaaacgtacagttatgagcagcagctcagaaatgcctcaggtcccctgggattttaccagttctccagacagaagctttgaggatggagggctgaaaacaccaccccccagtaggccctaagatatggccaggaccacacccaacatctgggtacctcctggggagcatggtaggtccctggcagtctgtgccctcacctagcattcatgtaggggcaagagcagctcttagtcttctctgagacctgggggagtagggccagtcaacaatgctcacaaaaaactgctgaattcggctgcttttagcagtccctccccagggcagcctctgctgctgctgacccatgatgcagccctgatttaaaaaaaaataaatgaataactaaataacgggaaaaagtggccaggggatttagctcctcttcagaaagcaggagggaagccaggtggcacccagccagattcaaagccgcagaagtcctgtcccccatgcctgtcctcatgagggctgctgctttcttccctggctcctcccacccaagggactttgaggacctagaggctaggggttgagctaagtggctcccatctggtaacagatttaagatctgagaagagctcctactgacgatgggggtcaagagaggtgctgagaggagtggccatcttcggctggacgggccggctcatcccatgcctgccagctgcagctggacctcagcaccgagggagagaagatgctgggcagtggttgagctgattagaggggagataatggcctcaggggaaggatgctgctggttaaagcgcacagctgcaggcaatttgtgcatgccctttgataagaaatgtgggggcctccccaggccagggcagcccagcccagcttctgcccaccccccacccccccaaggggccctttcttctcatctgctgagagctcattaggtcatttctccagaaggagaattggggggaggnnnnnnnnnnnnnnnnnnnnnnnnnnnnnnnnnnnnnnnnnnnnnnnnnnnnnnnnnnnnnnnnnnnnnnnnnnnnnnnnnnnnnnnnnnnnnnnnnnnnnnnnnnnnnnnnnnnnnnnnnnnnnnnnnnnnnnnnnnnnnnnnnnnnnnnnnnnnnnnnnnnnnnnnnnnnnnnnnnnnnnnnnnnnnnnnnnnnnnnnnnnnnnnnnnnnnnnnnnnnnnnnnnnnnnnnnnnnnnnnnnnnnnnnnnnnnnnnnnnnnnnnnnnnnnnnnnnnnnnnnnnnnnnnnnnnnnnnnnnnnnnnnnnnnnnnnnnnnnnnnnnnnnnnnnnnnnnnnnnnnnnnnnnnnnnnnnnnnnnnnnnnnnnnnnnnnnnnnnnnnnnnnnnnnnnnnnnnnnnnnnnnnnnnnnnnnnnnnnnnnnnnnnnnnnnnnnnnnnnnnnnnnnnnnnnnnnnnnnnnngtgtggggggggtgctgtccctccagagggccgacccaaagatggaagtatctgtctccaggacataatgacaacagaagcagtctggttgggcaaactaggaaataactgaacctggcccatggtgttatcttttcattgtccttctgtcccatcccagaggtcttcacacagccagcccccagccctactggatctattttttgagggcttctgatagataacaggtcctccaaaaatactggctattaactatttgtgtgttgtgggctgggtgtggacgggtagagagagagattccaaaacagtgattctcaacctgtgggtcgggaccccttgaggtgttgagcgaccctttcacaggggtcacctaagaccataggcaaacacagagatttccactatggttcataactgtagcaaaattacaattaggaaatagcaagaaaataattctatggttgggtagcatgaggaactgtatttgagggccacagttggacagaacacagggtccccaatgaaggtgatagagaaagtacccaaggagctgaaggggtctgcagccccataggaggaacaacaatatgaaccaaccagtacccccagagctccctgggactaaaccaccaaccaaagaaaacacatggtggtgggactcatggccctagctgcatatgtagcagaggatagcctagtcagtcatcaatgggaggagaggcccttggtcctgtgaaggttctgtgccccagtataggggaatgccaggttaaggaagtgggagtgggtggattggtgagcagggggaggggagaggggataggagatttttagagaggaaactaggaaaggggataacatttgaaatgtaaataaagaaaatttcaaataaaaaaagcaaaggaaaggaaaggaaagaagagaagagaagagaagagaagagaagagaagagaagagaagagaaaagaaaagaagaggccacggtgttaggaaggctgagagctactactgctctggagagcccactgaagggcactgataaatttccagataaatatgcttacgtatgtaccaacttgaaaggcctctgatgattgtgtgggtggctttcttactttgttgcgggacagtctcctctgacactggggcatgcttttgagttctccaagaccttcctctgcttttgtcccgggtgctgagaggcctcacttccggccaacggcagacagggtgtggctggccctcacggtgtcccgacgcttgggtgacgcttaggttgctactgcgtctgataatcgaaagctcctgagactgtccagctgccaggtggctcttctgcgtcactcgtggggggccccaagggtattcttttcttcaccccgacactctctcgatgttggcgtgctcacaggacctgccagccgaccactgttgggcagtgactcaattgtgtctgccttgtggtatgagaatgtttgtgcctgggtgccctcgcttgagtcagactgttggatgtcctcacccacctgtggccacactgcttcctgtagggcctgtgctcttcctgtgtttgaagatggttgtagcctgacactgtcaccaacgggtggaaggtagatgcggggggggggcaggggggggctgtccaagcctctgggggcaggctgtcagggacaggccaaagtcagagttctgcaacagcccttctctgtggacgtagccacaggtggacaaattaatttttcgtgcctgctgccctgtgtctgtgagaaggacatttaccttctcacgttggtgttactaagggagaaactggtctatggaggttcttaaccctggtctacagctaatcaggacagaacagggatcaatctcattagtttggcaatgaattactttgcccaacaacacttccatgctaagccatgaggctggggcacactgtaaatgcacatgcatgtggaccctccgactataaagtgcatatacgaatatgaacaagcagaaagccgtgtatggcctttggaagctctggttctcacaataactgcatgggtagcattttcccaggctgactaatcagtgcagtgagcatgatcatttgtaatccacgtggggtcaaagggtcagccagtggcactctgttcagccggtgataaataggagtctccccaggaaagggcgatgctacagacaaggtagagaggatcttagggaccaagcttctcaactccatcaaaattgccagctggatgagaaggaagctgggaggtgggtgggttcctagggccagaaaacagcaggtctgtgacactcagggttaatgcaggaacccagccaagcacagcacagcacagcacagcccaacccaacccaacacagcacaacccagcccagcccagcatactatagcatagcatagcatagcatagcatagcatagcatagcatagcatagcatagcatagcatagcccagcccagcccagcccagcccagcccagcccagcccagcacagcacagcccagcacagcccagcacagccaagcatagcatagcccagcacagcacagcccagcatagcccagcacagcacagcacagcctagcccagcacagcccagcccagcacagcccagcacagcccagcccagcccagcccagcccagcccagtccagcccagcacagcccagcatagcccagcccagcccagcacagcacagcacagcacagcacagcccagcatagcccagcccagcccagcccagcccagcccagcccagcccagcccagcccagcacagcccagcacagcccagcccagcacagcccagcccagcccagcacagcacagcacagcacagcccagcacagcccagcgcagcccagcccagcccagcccagcgcagcccagcccagcccagcccagcccagcccagcccagcacagcacagcacagcactgcccagcccagcccagcccagcccagcccagcccagcccagcccagcccagcccagcccagcccagcccagcacagcccagcacagcacagcacagcacagcacagcacagcacagcacagcacagcccagcatagcccagcacagcccagcacagcccagcacagcccagtccagtatagcccagcccagcccagcccagcacagtacagcacagctcgggcagaggactggaggttgcctggaaacatagatgccgaggttcacagccaggaaatgagtagctgcagaccagcaactggcttggattgtaccccaggaaaacaaggtggttcagggccaggactggcagtctcctaaatgctacctgtgaagcatggaggcatgactactgccagttgtctgtctgagctcttctcatgtttttcagaagtttcttaggccacctggcctccacctcgcttcagagtttctttgtcaatacagtgggataaacatacatacacacacacacacacacacacacacacacacacacacacacacacacctacatagtttctgtctcttcttcccttggtgatagtctggacaaccttgggattctgctagtaggaagtcatcagcagatgtagtccttcatccttcagaaacaggggtaatgtgacatcttgggttttaaatacttgtcactgaggttgatgtaatgttatttacattttaattattaacattgaaaatgccatgcgtgttttttttaagttttattttaaattatttattattagtagtattattgtagtgtgtggtgtgtgatttatcgtgtgggtgtgtgatttgttttaagatggggtgggcccatgtaacccaggctagccagaaacttgctgtgtagcctaaagtcaaggtccttttgtgtcagcctcccaagtgctgggattacagatgaatgctgccttgcctgacaccatagtccctccttcatgagtagattctacatggcagtgcagccaggtctcttgcttgcattgatatattcgatgctgctgttaactccataggaatgtgactgtgattcctttcttgacagaacatctaatggagatcacacacctaatgatttgagactgattccaaaacaaacctctactatttatccgtttgatattttgtaggtatcaccccagttcctggttgagtatttggggcaatgttatttggctaaggaatcaaggcaggtatctaggaagattttaggggcaagagcaagagcgtagagaccagtgtgccaatcatggttagatcttggcaactgtgagcctcaaagaagctcacttcaagacttgaatccctgcttctactttcaagtcccagagtccagagaggtgaataaggagacctgggaaagctaggaaggggactgagaggccagtgtcctgggcaggatgctgactgtatgtggatgggttccgtgctaggtgctgcatctctaggcaaccctagtaagtgggatgggtggagtgttccagcatggctggaccagcatccatttggtggataatcaccagatctttgtaggctgtgatgggagtatgaatctgagtgatgtagtctcctatgcagaccctcagcaaaacccatacaagggacaggattgtaaaaactaggtaaagtacaccagtggtcccgtctacacaggcccgtctacacaggcttttgaatatacccaggtgagctcactcatctgccagctgctctctgggctgctggagagttgcctctgttcatgggcaacataaatagaccttcagataagagcgcctgctgtttccttctgctttgattagaatttgtacgccctgagcaccttcagttgggagactgttctgggaaaggagttagctctcgagagcatagtagaagcctgctggattgaacgggactctgctagatcttgtggctcagagaaaatcttgtctggaccccagtggcttttagagtgttcttgcagagacaaaagttagtacaggcaccaggataccagttatgtggatgatagaagttctgccacagaagggtatagcgagtatctaagacagcggttctcaacctgagggctgtgacccctttgggagtcgaatgaccccttttacaggggtcactcaacaccatccagcatgtcagacttttacattataattcataacagtatgaattacagttatgaagtagcaacaaaataaattggttgtcaccacaacaggaggaactgtccgttaaagggttgttgtgttaggaagggtgagaagccctgctctaaggaataggactgaccataccagtttctttcttttcttttcttttcttttcttttcttttcttttcttttcttttcttttcttttcttttcttttcttttcttttcctttcctttcctttcctttcctttcctttcctttcctttcctttcctttcctttcctttcttttcttttcttttctttttttttttgagacaggtttctctgtgtaaccctgactgacctggaactcactttgtagaccaggctggcctcgaactcagaaatcctcctgcctctgcctcccgagtgctgggattaaaggcgtgtgccaccgctgtccagcccgtgccagtttcttaagggatggaggcaagacactcaattgtcagtcttcaaatatacatagatttgatatgctctttttatgtatgaaatattttcaaggtaaacgttttccacactgatgaaagcacactcatgtctctctttgtctttatttgatataggtgagcatagctaccccaaagcagaaacctaaaacaccattctgcttcggtaagtactgagccacagtggcttttcgccatagacctgtgctaactccatttccgtggaagacagccctgtgatcccatgggaactgtatcctgtatgcatgagtagtttagataatagggatgttctgggtgccgagtaatacccctgtgaagatttttaataacttgcgaccaggcacacaggggccagcagcattttagccaggttggcttctgccggccatctgcctcctgaccttcttccttttcctccttccccttcttctctcccctcatccccaacgctgtcaaagctgccctggaactttgctcctgctgcacccagactccaatgtgctgagattgtgagccaagctgtatttctgtttaaggtggacagaaagcatctgatagaagtctctgggagccttcactttagaactgagcagtggtgtactcaggacatgatgaggtccgagaaaaggggggaaaaggcagggaagcattaaaatgaaggaaggcatatgtagggtctcaagattgccagatgagttgtagttgggggctgggggctagtggcaaaggcgcagagccactccaccaatgcctcaagcctgttttcagttggtctctgaaaccacttggcgactgtatcactaagtagccctcgctctgagcaaatgctgaggcctttctgtgtccagggaggctctgagcaggagcttcagggaggcagagtcacttcctgctttgtcactgcatgccctcagcacataagatgactgctggcacatagtgggtcctcaagaaagagttgtttatatgaatgaaaacagcgagttctttgtcacctcggcaagggcttcttgacttcactctcaggccagagggatgaagtgacttctttctcccaacttcaggttgactcttctttttcctgttccttccaaatattattgctaagtttagaagtcactcttaaattttgtggtcagctcacttaaagatatattagtgataatgatgaaagtcaatcaatcaatcaatcaatcaatcagaggtaagctgattaagcttgtgtggtgttggaaaagggattgctaacaattaagggaatgcccagagggaggagcaggttgaaagtgaggccaaggcgacgggtctcagcaagtgttgttccatttcccaggcacagacaagaccagatcatactggtagaagcaagccctatagggtcccgactaagtgtcttactggtggcatatgagtagcttcattgtcaccaatagagcattgaagccactgttaatgccagcgtcattctggtagctgataaatgtgttgcaggggtctgctgcttctgagcatgcatgtgacttaacaccctaggcgggttcttgatcttctaaatggcctcatgggtcttgtcacctcagacaccctaacttcctggtctcttgtgatctccaaatcctgacccggtaccttctttctccttccctgttacctttatagttatcaatgccctgtctcagagatattttcttcaagccaatgaccagaaagatctgaaggactgggtagaagccttgaaccaagccagcaagatcactgtatgtataccctctgttctctctggtagggaaagtggggtgtcccggctcttgacctcagtagggaaggggcagagctcagagggcagcagggccttgcctcagagcctgtgaagacccatctctatctaacctcctcttgtccactggcggacaactaccagtgaacttgagagtttgagtctgaacggagttcaagaggaagtttgtggagtctcttttgtgcttcctgggagggcttctgtcagtcccatcctgggtgattgtgggacactgctgactcattgtgtggggttggaaaagggattgctaacaagaagcagaggaactggggaagcgcacgagaaggaactcaggtctgtttctttctagtttgggggatattcttcttagttgcgcctggaaaaacgtcttctaagagctttgcaaacttggaaactcgtccacggattgtgttaaggactcaggttatcctggacatgactaatgaaggatcgatttcctattccctaggaatatttttacaagaaacaaagaagagttaaaagggaaggaaaaaaaaaatgtgttagcttcccagcactgtgataacctgctcaaaacaatcaagttataagaaggaaaggttaactacagatcatggcatttgttttttgtggttcatggggtttatccctgttgtttcgggcctgtgatgaggcaggatattaaggtgggacatgcggtgttgaagcagagaacaaaacaaggaggcactggggtcccactatccccacagagggcttatgcccagtaacccaacttttcccactcctcctcatctctgggaagttcctctgcttcccaatagtgccccatgctggggaccaggcatcgaacatggggaatgtttggtaaacggctttagggggaagaggaggacaatagtagaaagaaactcagcaagacaggcagagtctggtctaccacagttgctgaaaacttagaaattctgtgttgtacagtcagaagtgcttgtcttctcgtgactttgaattgaaatgcccattgccgggacaaattattcttccagaaaccttaaggttccaatggatgttggtagatggaatctctgtctactcagcatctgtatcgttgggctcaagcagggttagctgtagctgtttaagcaatgtgacagctgtttactgttctggtcaacctgcacagagaaagcatgaggcaaggctggcagaagacaggtttcgctgtgtgctgtctctgggatgttggtatgacatcccacaggaaattagcgagggtggcctgaggaggtagtgatagcattttaaggagtaaaggacacaacgttgatgatctgtgtttacctcatatgtaaaattgagacaatcgtgcccctgagctaagaggacgcagtggagagctgaacactacactctccttggcactggttgggttatgttgtgcattgctacacatcaggacactgtaggagaggagaagggtgaatttctgggttgatttgaaaaggtggtggcagagtacatacatacatatatacatacacatacatatacattctgccatgccctgttcatttttctgacttcttgttttgctgagaattttttgttcagtcttaactactagcatatatatgaatgtcaagaggacagggctcctgcctctttgtattctaactagggttagctcatcctatagttatgcagtaagtttgttctgtgtgtatgttatgtatttgtatgtgtgtgttatgtttatgtgtgcatgtatatgtgtgatatacatatgtgtgtatgtgtttgtgtgtgtaagcatgtgtgtatatatgtgtgtgtgtgtataggtgtatgcatgtgtatctgtgtttatgtgtgtatatctatatgtgtgtatacatgtgtatatgtgcttgtgtgttgtatgtgtgtatctctgtgtacagatgtgtacatgtatatatctatatgcgtatatatgtgtctgtgtgtgttatatgtatgtatatgtatactgtatgtgtatatgcacatatctttgtgtgtgtatgtatgtctacatttgtgtgcatgtatgtatatagtatatgtatctatatatgtgtatctatatatgtgtgtgtgtgcatggtgtgtttgtatatgtgtgtgtatctatgtgtatatgtacatatacgtatatgtgcttgtgtgtgttatgtgtatgtgtgcataatttaaaggaagtatgcgtgtttgtttgtctctgtgttagtaaattagctttccatttctccccacatcctgtttgtggttctgccctcttcctaagttttctatctcttgctgaccatatcacctttcttcctaggtacccaaagctgggacagtacccttggccacagaagttctcaaaaacttaacagctcctcccaccctagagaagaagccgcaggtggcctacaagactgagatcatcgggggtgtggtggtacaaacgcctatcagccaggtgctgttgcttgggagtgccgggggtggagggaggcagtgaaggcctatgcattgtgcccaaggacctgcacaaagcattaggatgggggagctagtgaagaaggtgaccaggatgatatagtgcaagatggatgtgttcagtgccaatgtagaagttggggacatgacatcaagacatcttgaggatgtgtggcctctgggcttttgcttaagacccaggcaatgcacactcataaatcacaaagacaacggggctgagggaggcagtgagactagacacaagtctgcagtcccatttgggtacttgtgactcctttagttctaagtagtctttccttcctcttctgagtctctctagccagcatcatactttggggaaacactagagcatcggctaactgggggcaaagtcagctcttagttcttcgactgacattatatcaaaaagaccagaggtgtggtgagaaggctggaaggatcccacagaggaatgactggggtactaacagtgttgctgtttctactgtttccttgtagaacggtggggatgggcaggaagggtgcgagccagggactcacgccttcctgcgaaggtctcagagctacatccccacgtcaggctgccgcccttccactgggcctcccctcattaagagtggctactgtgtgaagcaagggaatgtggtgagtccagcacaggggctacaactggggttctattcctgctggggatccagtgggcatggatgtagcagaggagaaagagaggaagaactgtacccctctatgttgactgccattgggttatatggtaattacttatggtaatatgttaactagccattagtcccccagaaagcttgcctgtagtggtaaaaagccttactgccttcaaactgatgcagtttgcacactgatggtcagatttccctcctatttcccaactcttgcttcgaagatgatgagctgatagttgtcttagtcagtgtttttatagcttcaatgaaacaccatgaccaaaagcaacttgtggaagaaagggtttatttggcttacacttccacatcatggtccatcaccactgaagggagtcaggacaggaagtcaagcagggcaggatcctggagcaggagctgatgcagggccatggagggtgctgcttaccgacttgctccttcatagcttgctcagcctgctttctttctttctttttttttcaagctaatggatgcaaaacttattttgtttgattgtcataaaaatcatacttttatgttaaccttgtttgtgaaaaatcctattatactatttacaaaggaaaaactatagattttatgtttatcattatttatactttaatcaattatttatttattcttttttaaaaattttattttattagatattttctttatttacatttcaaatgctaccccgaaagttccctataccctccccccgccctgcttccctacccacccactcccactccttggtcctggcgttcccctgtactggggcatataaagcttgcaagacctaggggcctctcttcctgctttcttatagaactcaggatcatcagctcagggatagcaccgcccacaatggcctgggctctcctccctaaattactaattaagaaaatgccttacaggcttgtctgtagccccatcttatgaaggcattttctcaactgaggttccctctgctccgatggctttggcttgtgtccagttgacagagagctagcccacacagtagtatctcgtggcggcagcagagaaggaccctcgggtgctcttcacgtgttaggtgcttgatccctggaaagatgggggctcagatggaggcctgggactttccattgttccagttctttgtccctgctgacgatgggagcctggcttccatggtgctgggtccctgggcattttctatgacaatgccagtcctgactctggagtcctgtccctgtccttgacggtttggttccttatttgtcatttcagcggaagagttggaaacgacgcttctttgccctcgatgactttaccatctgctacttcaagtgtgagcaggtaggtaggtcgtaggttcgggtccctcctgagaggtctgagtaacagcgaggcgtgcatgagtggaagccaggtccatacagacttccaagccacttcttgtcttatctctgtccaacctgtgtctctttatgatgcgattatacaaggacctggactgctgccagcgtctgtgcactgagctgttgtgtgtgtgtgtgtgggggggggggcacagagcagctgctgtatagattgcttctctgtaataattattttgaaaccaagttggttttaggcaatactctgagagaggggtgttggtggactggcgtgggtcaccgggccatgtacctagcttcatttgcccatcttctgtctttcctatcaggacagagagcctctgcgtaccataccgctcaaggatgttctcaagactcacgagtgtctggtcaagtctgggtaattgcctcttcttattcatcttgaggagagccttggtttgtcatcttggaattttcattggttaccctttttgaggctctgttgaagagccttccctatagagcagtggttctcagtctggggggaatcacagtccctttgggggggtatcaaatgaccgtttcatagaggttgcctaagcccatcagagaaacacagatatttacattatgattcataagagtagcaaaattacagttacaaagtaacagtgaaaataattttatggttgcagtcactgtagcatgtattgaagggtcacagcattaggaaggtacaggaccactgacttaatgcctcataactgctcagagttaaggtcacactggacaaagtaccctcttcccatttgcctactcttactcccatgatgcctgtgtgctgactcagacagcagagaatggcgcttaggtgcctctcaggcagtagagtcaggagtcaggtcctgggtgacagaaatgaaggaggcctgacccttcccctggcttcacaccctaccctaggctgaatttctcaggcctttcctcccttgttcttgatgtgcccattaacataggggtgactcacagcctccctgttgctaccacttgaagggcagaacaagtatttttaatttgttcctctttccgctaggaaagacaccttctgagagccctgcgtaagatgatccaggagttgacaggagaatgtcccatccccgttcctaaattcagatgcttgtggaagtgaatcttaatagagtcccagcatatctttttgggcatgtgtttatagtctgtccagactgcgtgtttgtatctcttcttgctgtaggtcataagggggtctatcaatagtagggcatcctgttctccagagaaagcatagcacagccctacataaacacacatgctatgtgatccagtgaagcagggcagagatgctgtactaagagtttcaaatggcagttggggggtggggtgggcagaagactggggaagcccctagggataatttgtattttgtgaaagtagccatagatagacattgtcccgagtgtggctctagagggcagaactcagcatgagagatcatgagagatgcccaattgctcctgaccctggagggcccatgtagataggaggctacttggacatccgaaggcagcttggagtgggaggataatgttcagcctgagagtcttcttgaaaactccccttacctctaacttgacctgcgtcccactgaacttgagtcgggaggtgaagtccgtgggggaaggttgtggctttgtggcctcagctctgttgggtggtgtagcctctctgggacctttggggggaattcaggacggttgtaagtaatgaaagctgtgcattagatgacattgaaaacagcatgcacctggggcagtggatggaaaggggacaggactccctccttggttgactttacctcttcagtggactctgggacttacctgcgctcgcatgaataatctagaaggttaaaacattgagcactatgttagctggtttcctattgctcttcaagacaccatgaccaaaaggtgaactgggaaggagaggacttttttgacctacccttccatgtcactgtttattattgaaggacgtcaggacaggagctcaaacaggccaggaatctggaggcaggagttgaagcagaggccatggagggctgcggcttactggtttattcatcatggcttgctcaacctgctttcttatagaactgaggaccacttgcccaggggtggcctcaaccacaatgggttggactctcctccataaatcactaattaagaaaatgccctacaggcctgcctacagcccaatcttatggaggcattttctcaattgaggattcctcctctcagatggctttagctcgtgtcaagttgacagaaaactattcagcacaagcctggaacagagctgtccctactcagacgctgagcaagtagaagtaatagttggtaggatgtatttcgagtgatctgtgtggttcgagctgcttccgatggccttacggatctgcttagtcagcatcttttttgtctctgtgtaccctaccttggcttaagtcatgtccctcctttgctcggagggcatgtcactctgttttcattctctgacatttctgcctgggactagcccttccttggcacaagactcttggttggcatggaatgccgtctgacctgcatctggtctagcctcctcaggtgctttcttctggtggtaattgggcctcgactccttagtccctgtaatgactggatgcacacagctggccttggccatagaagacacattcagtgtgtttggaattatgtcagcaccacctgctccttgccctgcaggagccaggaattcgttactaaaacccacacccaagattaaagcttgtttttctttttctttcttttcttttcttcccttcctttttgacactgtaatgattacaacatcttctcttcctcctcctcctcttcttcctcttcctcctcctcctcctcttcttctctctcattctctctttgaagcttattatttttatttgtttgtttgctgttaggcacattatcactaagctacatcctagctccagaagcagatttttttttaaatgaaggaaactaattttaaatttattttacattaacatacagaggaataggtttcattacaccagtttcacacataccttatttttgctgccccttgttccccactctttgtccacagttatccccgttctgcacccccccatcccttcacagttccctctcttaaaacttttttgggtcagttatttgcttattgatttatcattaatacatgtggatgcatgtgcacatgtgtgggtgtggaggccagaagacaacttgtgggagttggttctttccctctgccatgtcagacgaggtggcagttagacaggccctttacccgctgagccaccttgccagccctcacagtcccctttctagtttcacagccttctattcccccctcacatgtatgtttactcacggataaaaattggcatgcgagagaaaacacattagccttttcccagctcaattatgttgcttatgctaacaatttccaggctggagagatggctcagaggttaagagcactgactgcttttccaaaggtcctcagttcaattcccagcaaccacatggtggctcacaaccatctgtcatgggatctgatgccttcttctggtatgtctgaagacagctacagtgtacttacatataataaataaatctttaaaaaaagataatgattcccagtttcttttatttttacacaaactccatgatttttttctttttccttttcttttctttttaaaaaaagatttattaatttattttatgtatgtgagtacactgtagctgtacagatggttgtgagccttcatgtggttgttgggaattgaattttttaggacctctgctcacttcagtcaaccctgctcactcgggtcagccctgctcgctccggtcaactccactccctcagtccttgcttgatccggcccaaagactgatttatttactatacataagtacactgtagctgtcttcagatgcactagaagaaggcatcagatcccatgacagatggttgtgagccaccatgtggtggctgggatttgaactcaggacctttggaagagcaatcagtgctcttacccgctgagcaatcttgccagtcctcttttttcttttcttttaaaagttatttttttttaaatatctatgtgtatgtagactatctgtgtaagtgtgttccacatatgtgctgatacctgtggagtcagaagagagtgtcagaggccctggaactggagttacaggaggttgtgacccttctgatatgggtgctgggaattgaactcaggtcctctgggagagcaggaagtactcttaaacgctaagccaacacctttatttttctttacgactaaacaaattctattgcatctcacttatctgctgatgggcctcaaggttgatccttttccttgctattttgagtagtgccagtaattgcctggggtgtgcaagcatcaccctggtaggatgtagagtcctttgggcatatgtcaggagtagtatagatggctcatatgatagttttatttttagtttcttgaggaaccttcggactgatttccatagtggcggcactaatttacactcctccccttagtgagtaagggttcctctttccctagccagcatttgttatctttctgctgtggtgtgggtcattctgactggcgtgagatgaaatctcaaaataatttgaatttgcatttctctgatggctaaggatgtgaccagtttcctgggaagcacttcttaaattcagcttctgattctcagtttctgattctcttctcagctccttgtcccctgggccagggcagcagggcagagagcaggaactccgagctgtgggcggagcagctgctggggggcaggacagggtggagtagggaaagtcactgctgggggcgggnnnnnnnnnnnnnnnnnnnnccggggggagatatggtgctggcttccttagaaaaggaacatttggactcaatgggttctgatctccagtacctcggacagacatagcatttacagccgctgagcctcgggctgccttatccacaggaaggagaaagtcttgagttgcattagtgggtgaccgtgaaaactgtaggaaataacgtggaaaaaaaagttctcacaatgcttagtgtaatggtatctctctctctccttgcctagtgatctcttaatgagggacaacctgtttgaaatcataaccacctccaggacgttctacgtacaggtaaatgtccacccccagaccagcgtttcctctctgtgaatgtgagtggatgcctccgctccctccagcacccagtgtcccatctcattctaaggagggtgttggttagatgcttccctaccctgggatactacaagcaggtctatccgctgtgcgggaggtgcgggaggatgccagcctctgtagcagctgcactgggctgcagagctccaactaagcagagaaaaggagaactggtggatggtttcacttctgctctggagggtatttataagtcccgcctatgtatggacattactgtgtgcagacaagacagaagcatagagggccctttgccggcacaggtgcacaggcagcctgcacagagaaagccattgtttggcctctgacagttcccttaccaggaccttccccccacccccagatctggagctctcccaatccctatgaggtcacagcagctagcaaggcagatttccaagcagcgcaaagacagctagagccaagtcctccgcctgggctgcctagaagaccacagagccagtacagggagaggctgatgtgagattctgagccttaaaattcgcagctttcccgcgtggggttttaggaacatccatctcccttttttctctttcccctactgaattcctcccacaaaatgatggggcctctcttccatttttttttttaagtaacaggtctgtgtcttcactgttttctactttatgccagcagccttgctgatagccttgggcatcctcgagccattttcattgagagaagcatattgtctaggaagagatggcagagaggaggctggatcatggggagagggtcaccttgctcttaaatctaaaatccagttttctccagtgcttcttccatttagatgcaaggtctagcttgtgctttcgaggaagtttctagttctttttttttttttaaagacttatttatttattatatgtaagtacactgtagttgtcttcagacacctgtaatgaggcatcaggtctcattacagatggttgtgagtcaccatgtggttgctgggatttgaactcaggaccttcagaagagcagtcagtgctcttaacctctgagccatctctccagccccagaagtttctagttcttgccgttgatatttgtagggtatagtcaagggtctaggcatggcctgaggttgggtacatggagttagacagaactgatcttgaagctaagtgtcttagttagggttttactgctgtgaacagacaccatgaccaaggcaagtcttataaaaaaacaacatttaattggggctggcttacaggttcagaggttcagtccattatcatcaaggtgggagcatgacagcatccaggcaggcatggagcaggcagagctgagagttttacgtcttcatccaaaggctgctagtggaagactgacttccaggcaactaggatgagagtcttaaacccacatagtgacacacctattccaaccaggccacacctccagatggtgccactccctggtccaaaaatatacaaactatcacactaagtaatcaggcagctgaaatcacatacatgactaaaggattcaggaggagagggggccaggcaatggaacggctccatggcaagggcccaggaaagagaatagctgcaagggaggctgcaatgctatgggcagagactcactgccctgcctgcttccttagcaagcttatatctggtccatagagttgcaggtaagataaggacagaaagacacagctcttggactcagacaatttatttaatattcagagtctccgtatgtgtgtaaaatggagatgaaaaactcaacccaagcccttctgatggccctgaagtctatttgatcccaggcatcatgaaggacagataagaaaagagcaatgcaggactaaacaggccaatgtgaaggccgtggcggacagtccttcagaagggcttaccttagatggatgagggaaagtgacgaatttgagacatatggaagaggtccactctcgaggacttgagagttggttgtgtgaaggggaagggagagacacataaatcccagggctttggcttgagttttgcactggtcggtgacagctagtagttactttcttggtaatatggaggaaaagcagcagcactagggtgtattgcgtactcttctgttaccatgataaaataccatgaccagaagcaacaagggagaaagggtttgatttagcatatggttccacagggattgagtccatcaggcaggaaatatatgccatggtaacagaaacaggaagcagagataggaaaggcctatccctagtaatgtgtttcctccggcaagactccacctcctaaaagtcctataacctcccctaactgtgagtgtcaccagtgggggaccggataacattggggaccaaatggacaccatttctcattcaaaccatgccataggggtaagtaccgagtttaccgtgcttctggaacatccattagtacacctggtgatgatcattgcctagatggtacttgatatgttagtgcttgcggtgtgatcatactctgaaagctgcacagagggtagtgacttggagacaaaaggctcaaccgaaactgttcagaagatattctatcatccaagaggcaccagcacttccccgggcccttaccagttctctattccttcccttctgtgctaaaatttctaaggaaggacattagcatctccctgagtacatacatgagggaaggtcaaaccatatgtaacacatgggacaaagagagtggtgtgttggagaagtatggatgaaaagctagggaacatatttgttgattcactcagaagtcacactataaacctgtcttagttagggttttactgctgtgaagagacaccatgaccaaggcaactcttttaagaacaaaatttagttgtggctggcttagaggttcaaaggttcagttcattatcattaaggtgggagcatggcagcatccaggcaggcatggtgcaggaggagctgagagttctccatcttcatctgaaggccgctagagaagactgacttcttaaagggtcttaaagctcacacccacagtgacacacctattccaacaaggcacacccactccaacagggtcacaccttctaatagtgtcactccctgggctgagcatattcaaaccatcttaaaacccatgacgcattaacaaaatatcttgtaaaattatgatccttcataatttcaagagtagtattgctttctatttctgtgtatctctttaatggctggcataaaggccaacatgaatcccgttcttgtttcagcctggagtctgtgtccatgtgtcactttgaggagtttgaatctctggtcttatacagatgtgtatttggacgaagaaatgatttcaatgtgtccatttatgttattcaggtctgtctcctctctctctctctctctctctctctctctctctctcttcctcccccttccttgctttcttcctccctcctttctctctcccttcctttctttctttctttctttctttctttctttctttctttctttctttctttctctctctctttctctttctctttctctctgtctctctctcttccttcctctcctttcctttccctttccctttcttcttctttctttctttctttctttctttctttctttctttctttctttctttctttctttctttctttctttctttttttcttaccagaacttgaaaaatagtgatttcttaatattaggtgcaatgtggagtctggagccttatccatacatttgcctatgcatagctgggtccattgatcaccatttgagtacattcttcttacccatagtttgtactcatgctttggaaaatacccctctcactgaaccgctctcaccgagctgtgctgatccctgaaatgttgacatatgttattatgtaatattttttaagtcacactcattcatatcactagcagagtctttgagtatggaaggatgtgagctcatgcaatgagaggtgggttttatgaaattctgttttgctttaggagctcagtgttggttgttagcaaaaagaaatgatgctattcccttggtgtcaccagctcatttttgatacaaagtctgctaaatacttgcctctaaataaactagactcatagtttctatgtcagtggcttgtgttacataaaaataaccacacttcctgggaacggtgggggagctcttttgcttccacagtttgttctgtagggccagagatttgtgtccactgaatgcaagtgactttctgacccgtgtcctcagtcatgcatagtatgtctgcatgaaccttctgtctatcatcaggatctaggagagtgagaccagcaagcagggcaaggcagagagaagagctctgggactggactctgatgaccctgatgttagatgtttgggcttaggcttaggctcaaactatagcacttttcgattcaggagaagcagctgtgattaattaggcatctctgagacactggtgagcagtagctagctggtggtgtatcgcttaatactctataaccctggcctcatctctagtctgtccacgaggagacagaatcttcaggcgtaaatggaccacttaggatcataaacccagtttgagaggtacttggtattcaagcaagacttgcttgtgttcagaatggccaggcccagaacctaagctatagagcagtggtctttaaccttcctaatgctgcaacccattgatacagttccttgtgtttgcggtggcattcttttgttcctacttcataagtgtaattttgctactcttctgaatcctaatgtaaatatctgatatgcaggatatctgatacgtgacctccaaaggggtcacgactcacaggataagaaccactttgtagaggatgcagtgcagtggacacaggggagtgaatatagccaccaccagaaaaatctgcctttgtccagcttatggccaccgggtatgttggataatggatcacggtgtccagatccaggtagtattcaggcatcaagatgggtggagatggtgctgcagcagccttgtcagtaggtagatgtttctaagttcggcgcaagtgttcaagatgagagttcagagctgggatgcagctgggtggtgtggcacttactttgtggaaggccctggcttcaatggccagcactcctccaaagataattcaacttccattctttggaatacacagcaaggtttctctcataaaaggcctggagtattggagtttataacagagtttattaacagagggctagaagttagaaccatgataaaatggtcttcagctcacatgtcagagccacactgctgtgccaagacaagatccacaagagagattcagagtgctgcactagaactcttggaaagttactttgtagcttagactctagggtgaagggtaccacctaaaacagtggttctcagcctgtgggtcataacccctttggtagaatcaaatgattcttttacggtgttgccattggaactatcagatatttgcattgtgactcatatcaatagcaaaattacagttatgaagtagcaattaaataagtttatggttgagggttcattgcaacatgaggaattgtttgaaagggttgcaacataatgggaaggttgaggacccaggatctagcactatgtagtgcataatttatacagtcatccatttgggggctctatctaaagatgggattggttcattgggaagggatgaagttgggaatcaaaggaagcagtaactgctgtagatttaggggtaatggcagtaaccagcggtagatcttggatgtcttttattggtgtctgcatgtgtgtagtgctggactcctgatactcagaagctcattggactgcagtcaaaccgctgattgaatggattcatttcaaaagtttgtccctctctttttacaaactgccatcaaggacagaaaccagaatacacataagatcagggcaggaagagagcaagggacacatggcatttccctctttatctgatctgtgctgggcacattttggttttctaggaagtcacctgggctgggtagacctcaactctgaaataatacttctttcttgtatagaatcacctgcaacatttgttttctaaaaatgactgtatggatgtgttgtatgtgttcatgtatatgtagggctcgtgcctgtgatgtatatacagaggccagaagaggatgtcaatgtctttttctattggatgtctgtctctaaaatcattttatttggtatatatgggtgttttgcccccacatgcatgcttgcataccatgtgtgtgcctggtgcccgtggagactaggaaagggtattggatcaagtacaaccggagtgacagacagctgtgagccatcatgtgggggctgagaatcaaatctgggtcctctggaaaagcagccagtgctcttagctgctgtctctccaggccctccactttgtttcttgagacagtttcacacttagcctgacttttggcattttgcctaggctggctgagcagtgagccctcagaatccatctgtctgtcccctctggggaagtgcaggcttttataggtactcaggctttacacaggtcctggagatttgaactcaagtcctcttgctaccgcagcagccttcttacccactgagctctctcaagccccataaacccaacttggaaataaaaaatgtaaaacagtggctaagactaccgaagatattttataaaagtatactttatactttcataggatatcagatgcaaatctacttccttcattacttttttttttttttttttggtaaattcaaaataaccctttctctactctatatattacactatttgttcctttgtaaattttggctcgctgagtctagaacccagtgctttgcctgtgttaggcaaatcctctgtcactgagtcccagcccagcctatgatcctttggggtggatatatatgaaattagaagaggagagcattagataagtccatagctgtgaaatatattgtgtttggagatggtctcactccctagccctggctggcctggaaatcaatccatagataaggatggtctagaatcaccggtctctgcctcccgagtgctgagattaaaggcatgtgtggccatgctgggccatgatggtagaatttcaggtttatttgcttccctctaaccatagaatagtaaaaatagcagccttactaatacatagagggccccgtggcctgggcactgttcaaacagcagaacttcacaagttacttggttcttcactaggtctgtctagggaacatgctagctttcattctgatcttagaaaaagtttggatacctaattcttactgccttctttggaccagggctgcattttgtttgtttgtttgttttttgaaagctactagattgccaagtaaccagaaagagcaagcataaataagttatcaggtagcaggtgtgagaggcgtgcaccacgggtcctcgtcatcctttttaacctagtgcctatgtgtggcacacagataaccaaggaatgatgggaagggatagcattgcaagcactgagggataacaagaaacacgaaatcccagtgaaaaccaaagcggtcctgtttcacacacacacacacacacacacacacacacacacacacacacacacactttggagctcagtctgatttccctctgtaactgagttcacttgcattaggcacccagagacgctgcctgtttcacacacacacacacacacacacacactttggagctcagtctgatttccctctgtaactgagttcacttgcattcttccttccagcggctgggaggcgcccagagacgctgcctgaaggagccaggccccatctgtgttctctttccatggagaggctgctgcccccttctggggggaagtggatatttttaggggaaatgcttcatgggcttctgccgtggtgttcttcttagttctcactccaaggatgaaatttcagggcagacccaagtagcttgtgcttggagaaagaagctgtacacatagtggtgtgcgccttgggggttctgcagagggagttcgctttagtagaatttaaaacaggagcctcttgttatgggagagacaaggcaggcggagtctagaccagtgtccaacccgcagctgcagcactctgagcctctgtttcctaggagtttggaggggctgagctgtttttcagatggggtgatgggttcagttagaagatggaaaactaggctgttcgctacttttatacccccctctgtcttcagagcaccttagctctgagcagttttagttactgggagtcaagaatgaacttggcagggggggaaaatgtcctcaaaagtccgcaaggcgctgaactacacggcttctgagatccttttgaactctgatgtgatttttatgaacttgagcccaaggcttggaagctgaagacacgtgccaaaaaatgtgtgtatgtgttgtggatgttttgcaggcggacagccctgaggacatgcacagctggatcgaggggattggagcagctgtccaggctctgaagtgccaccctagggtaagtcacttcctctctgtgccgcagcgtcagcttaaagataaattatctctgaaccggtcgtgttttatttggttatgtaggcaggcagcccggccttaagtgctggttcacttgtttttctctctctgctaacttgggtacattttcccctctctctctctctctctctctctctctctctctctctctctctctttctggtttgtaagtggacatgaagtcggtctggacagagatgtgaagtttctgatgtgttcctacaagtccagcatcaggcagaacactgcaaacatgcggaacgagctctgcttagtatcattttaaaatttatgcatttatttatttttacaatagggttctcgctgtgtggtccagactactactgcaagccatcctcctgccttagccttctgggaaactgggactgaaggtgtccctggcttctagacaattacttgagtctgtagccagtgtccctgtttgaattgaccatctgagtgggttcttgagacttggagacaagcattgtaaggaaaaccccttactttgtcttctctttctgtgtttaggagccgtccttttcaaggtccatttctttgactcgacctggaagttctacccttacaagcgcgcctaactccatcttgtcaagaaggcggccaccagcagaagagaaaagaggtctctgtaaggccccttcggtggcctcctcctggcaaccctggacacctgtcccccaggctgaggaaaagccgttgtcggtggagcatgctccagaggactctctattcatgcctaaccctggggagagcacagctacaggggtgctggcaagttctcgagtcaggcacaggtcggagccccagcaccccaaggagaagccatttgtattcaaccttgatgacgaaaacatacgaacctctgatgtgtgatatgcagtgcccgttgcgtgcaggagagccaggggctgtgacttattttctctgccatggtagaggacagagtctaatggcactcacagtggaggggctcgtctagctggctttggttttgctattattgacaccatttatttaactggggaaagccactaggttagacccacaggcatactctattacctcttgaatgtccccatttccccaggtttcctagtgaggggttagttttcatacttcctgtctggaggaggctagagtccagtttcacccataagcttttccctcttgtatttcttttatagtcttggttttgcacaggatctcaggctaagaactgctttcatctacccctgtttattgactgaagtctggggatcagtcagaccattagcatccagactgacaggcatcgggtgagactcaggttatacagttccgattgggatctatctgagagcggtcgtaagagtctggggagtgaaaggtgaatttttgggatatctcccccaggcagttctttcaggatacctcccaggggagcagacaggacctcttgtgagtcatgagggctaattaaactgctataaccacttgtaggaatcatgtcgtcctcttgatgctccatgaccccaaatgacatagaactgagtgacagagccaccagtctattttccgtgtcatgtcccgaggatatgcggttatcagggtcaaatgttatgattgcagagaccagaacagagacttcccttgaaactgaggtgtgtgtgtgtgtgtgtgtgtgtgtgtgtgtgaaagagagagaaagagagagagagagagagagagagagagagagagagagagagagagagaaaaccactcatgttaggacaatctctctctcagaggcttacattaatataaagcagctactgagaagagatggatggttgtttattgcaataagcatctttgatccatgttttccagacaggagaatgactctttcttggcacagtgaatcttgaattcctgtctcacagctcttttatagccagtcgacttttgtgtaatgctaagtgcttgtatactgtgcagcctgctggcccacttgctctttgctttattgcactgcctgttaaatgaagtcatgcacacaccaggtggaactctagcgtctgataagagcctatatactcactagtgaagagacttaaatgtgatttttcccccccagtacttacatttttcatggaatagaaactgggaataaagaaattgaatcagaggatgaattgttggctaggaatttcctaggttctagaagagtttagaagattagatttccacccaaaatttagggtatggcttttccactgggcaagatactatttccagtgcctttggggtcatttctatcagccttcaatgaactgtgctaccagaaaattatggccatttcctacagggagagaggtcatggctcattcctatctgtgtaacttttatctgctaggtaaattaaccctgtttttaattagaaatttgtagctctaagagactaggaggcattttttatttaagctagttagcactctgtgtccatagttaatgcaaaagcaaaaacaggcataaagctctccgggtgagaggaagcatgctctttcaaatgtgactgtgaccctgaatctggtgccacactgaagacttctgggctccgtgtgtgggagctgtcccccgactttgtctggccttgtgatcctgatgaaaagaaaaccaaacaaaaatcagtgggcttctttctctttctgttcatgatcttgtgtgtctcccatcccctaaaaaaaaaaaaaaacaaaaaaaaaaaaaaaccaaaaaaaaaaaaaaaaacttttgtgtgttttggtttttcagggttcggggattatttatttaggagcgaataaggttacaacctacttcaaaagtcagtgccctttgtctctggtttcagcttaaaatcttcccctagaaaattctttggctgctcaacagaattgctcaatgtgaagatgaggaacgaatgaaaaataaatcaggaactcctgaagggcctcgaacatgccctggctcaaggaaatgaggtcatcttttggcgtttaaattgcaaaatctgtctgtccctctcttagaaactgttggcttggttattagtgctgcatcaacgggtccttacagaaagtcgagaggtttcggtacacactctgagatcatgttaaacacaatgcggtgtatattatgcaaacaaaggaaaagtacagtttcagtgaccctaaccagcccatacatgagacttgcaagttagaacattgttaatagcggtgcccagaaaatataattatctttgtgaagcctcaaaacatttaaagtctcaattcttgtttcagaattccccttctgtctgtatttacacacatacacacaccctttaaatttgttttttgctagagtcttgctacggagtccaggctggctttgaactgataatcctcctgcctcagcctcctgagtgcttggattacaagtctatgccaccatatccagcctaggacagtattttaatgtgagccaaagatggtgcataaacctttagttttcaaggtgtgatggcgtgtgggtttgtggttaagcatagattgtggataaatccgaagggatttctggattataaaagatactgcatttcctgtgtggaataaaagcagtctctggggttgggtccttctataaagcttcgaaggtattgttctctgtagctgaagtatgtcctatccattactcttcaatgctttggtggacttgcttactcgggtcaggtgataatcaggggaaaaaaaaaaaaagaagcgtgtgtttttcattctccgaaccacaccgaggatatgggagaccgcaaactaaagtggcacctctggtcaaagtggcggagtgacagctctacttccaagtagaaggctgcccctccgggaagatttaaggtccatcgtcctagtttactggaagcaaactggtttggtttggttttcccctttctacacaggacttatatgaccctctgagtaagcagtggactggtaattgagcggtagacttgatacttgttttcagtgtcaaccaaataaacagctatctggtagcagacggcagtgtttttgaaattaggcttcccatgtcgcctgtttaacctcctcccccacccccaccccccaaaatctgttttcctcagtccctcgttctctctctgtgttattgcctgcctgagtcaattatagtcacttataccaggtaggcgttgaatcaagtgaatatttggcaaaaacacacagtgtgactgctgggccctctgtttatgaaggtgtggcatgccccgtttgagccagtgtttgagccgtgaaacacctcctgcaagcactgagcttagtgcatggaaactccagcttcttacgttgtgtgagctcctaattggtatgtagcaaaacgtcattttctaaaaactggttggttgcttgttttgtaataaaaacatgtgaaataggaaatctggttgtgtgttttcctggtcagatctcgtggccgtgggtgggtggtcacgtttctcccttgccccaagactggtttttgagtggacccctcccttcatggctttggggtggatggcccttgtcctgggatggcatgggtggtgggtgatatatgggtgtgtgtgtgtagaagtgagccagactctgacctttataaagtccgaaggctggctgaggcagcatccaggccaggaaaaacagtcgaatcgacgaggtcagggagcaagatgagcttccagcggttgtgggctgtgcgaacacagtttctcctgctgtggttgctgctaccagccgtgcctgttccgtgggccgaggccaggaggtccagagtctcgctgccctgtcccgatgcctgcgatcccacgcgctgcccgactctgcctacctgctcggccggcttggcgccggttcccgatcgctgcggctgctgccgagtgtgcgccgcggccgagggccaggagtgtggcggggcgcggggccggccgtgcgccccaaggctgcgctgcggcgccccgttctcccgggatccctcggggggcgcgtggctgggcacctgcggctgcgcggagggtgctgaggatgcggtagtgtgcggcagcgatgggcgcacctaccccagcctatgtgcgctccgcaaggagaaccgagccgctcgccagcggggcgcgctcccggctgtgccagtgcagaagggtgcctgcgaggaagcaggtgagcggggcgcgggcgaatctcctgacacttctcttacttttcagagggagatgaagtgagtgctctaacttcgctcgctcgcgaattcagtgggccttccttcgccatctctagggattcaacctgttgtggttgttcctggtgttcttgcctggttaattttggtctctttactggctgccactgggcttccctttctccttttcttccctctggtaggacagggagggtcctttcatctcctggtctggagaaccttcagagaaagagggacggggagatgctggggaatgttgagatgcgacacctgcatccagggacgcactcactgtggaccgtttattcacagggaccacaagagcagggcggctccggagaaagtacaacttcatcgccgcagtggtggagaaggtggcgccgtctgtggtccacttgcagctgttccgcaggtaaaggtcccatctaggatcaactacctcacctgctggttgccagatttctgaccattaaaaccgctgtgaggaaacacagattcaaagagttggctggggtgtaggtgggcagtagaattccgcaaagcctgcaggagacctgacttgctaagagttatttcgctaaagagcaaagagccaagcgcaaggattctggcttctaaattgaagctacagcagtgcatattggtgactggtgtttctttctccccggtatcccacagcaaaactaaaggctgactgtaggagctagtagtgagcatttggtgggcttgtttagccttagcactcgcttgcatgcaaggaaacccaaatggagagcaaacttagtttgttctgagtcacaacgccagttggtagtgggaactaagagctagattctgacgctgtggcagtagtgtgagcacagggttagcaccaggtttggcctgttcgctgcagatgacagacacacaggttcccacactgatctaaaggaggagacaccatcctggacccagatctcagttgtgttcagaaaagatggccaggacgagcttcaggcagctcacaaagcacatggaagtgggtaaggcaagagtaaatgcatgagaaaactggaaacgtagctgataaacgtgaggcttcctgcgactcacacacaaaggctggattccctgatttccctcccttctgctcacgctactgacttgttccggaacagatcacctctcaccaaccaggaaatcccttcctccagcggctctgggttcatagtgtctgaggatgggctcattgtcaccaatgcccacgtcctcaccaaccagcagaagatccaggtagagctccagagcggggcccggtatgaagccaccgtcaaagacatcgaccataaactggaccttgcactgattaagatcgagccagatgtgagtacctgagagagctgctgagtcagagccttcacatgtgaggatttcacagttcatgctggaattcttttgtaattctcactgtgccttttctttgtatgtagagtatatgcccgcaccctacccccagtatcccagccagcagaggctactgctgctgctcctcccccctcttctttttctctccctcttcctcctcttctcctccctcttcctcttcttcctcttcttcttctcctcctccttccccttcctctcttcttgtcttcttcttgttcttcctctgttcttctttcgcctcttttcttgttcttgttgttcttgttctccttctccccctcctctcgttgttgttgttgttgttcttcttcttctcctcctcctcctccttctcctcctcctcatccttcttctccttctccttcttttcctcctcccctccttctccttcttcttcgagaccacagtgatgagtgatgtggaagttaaaatctagagtatcactgaccctcacaccccctctaacacctccctccgcacttctgcccctacctgttgtgattccaagctcccgtcagtaaatgaagaacttagttcccgaagctgcggtggtacagactccgggttctcttcccatagcttctcccactttcctctggcccccatccctggccatgtataggagagcccagagtgaggacagggatggaaggaaaagcttatcctcatgaaaagaggtggcatacagcattgtaaagtcagctcctctagcttgggttaccaacaggactcggtatacagcagtggttctcgaactgtaggtcacgaccccttttggccaaacaaacaaccccaaaagggttccatatcggatatcctgcatatcaatcagatatttacattatgattcataactagcaaaattacagctatgaagtagtaatgaaaataactttatggttgtgggtcaccacaacgtgaggaactctattaaggggttgttgcagcattaggagggttaagaaccactagtttagaggagaggacacagctcctcctagtccctgaggaaagagaccctacagcctttggaaacaatgtttgattgtttgcccttctggcatgggttacagggtccggctggaccacatcctcctctgaccacggctgctctgcaatggggctgacgtgttgcagggtgggcttcttgaactgcagggacaaactccccagcctccctctcactccgttcttgatattcatgtactttcccttgtgggcctgtaccaggacagtggggccacagctcacacaactctgagactgagttgcagagctgccaagcgactgaacacttttccaaagagaatgcccaggcgcccctgccatcagcctgggcgcaccccagccttattcttgcctgctttagcagcttggcgggatgtcccaggtctttctgcaggacttctatgtcctggaactcttggagggcttggtttctacttcactttctcaacctttgaggcacctgggtggcagctaaaggctcaggggagatcctctccaagttgctttccactctggctcctatctggcttcaaggtcttgtggcttactctgcccaaaaggcctactctgaactgaggtctacagtagccaccttgtcacagaactcctgccctggtagggatggggagatcttgtacacgttgagaacttgtgacccctagcttgattccaggctcatccacagggccctgtaagtgtagtcaggtccacccagctcgactccaggctttttgacccatcactgccaccaggcagcaggaatgagaaatctaaagccaaggtgttcaaccatggtgaacaggaatctcaaatgggagtctcatgggaggaggcctggccaagggagtcactccctcttcacatttttgctgtttccggtcacccatcaatatatcctcaacaatctccattaattgtctagcattgctgctccccatgttcctcgttttccatcctatgatttattcttcaacagatgtaccttttggctaaatcatttgcaatgtgctcaaccccgctaagaacattttttttaaaagatttttttttaaattttatttaatgtatatgagttcactgtagcagtgtaaccagaagagggcatcagatcccattacagaaggttgtgagtcaccatgtggttgagtcaccatgtggttgctgggtgttgaactcaggacctctggaagagcagttttagccaccaagccatctctccagcccctgctaagaacattttgaactccttgctgtagacacatagtctgcacctagggctcgttagaaatcctggatcccggacccacccagatctaccagagcctgcattctgataagcccctagaagttttgtgaacacagtctagcttgggaagtgctattctgggtgatctccatcctgttcgtgactcggacaagaaatgtttgagcagagatagagctaagtgaatctctagtgccggccatttcatgatcacttatagtagtttccacaccacttcagtttatattttatttttaattatgtgtatgtgtttgtgcaagtgagtgttaagtgcccatgggggcccgaagaggaagttgtattccctggagctggagttagaggtggttgtggactggccaatagaggtacagggaaccaaatgtggatcctctggaagagcaacacctgctcttaacctgtaagccatcggttctcaaccttcctaatgcttcgaccctttaatacagttccaaatgttgtggtgacccccagccataaaatcacttcattgttacttcaagactgtaatttcactatggcgttataacttgtaatgtaaatgtctgatatgtacgatatctgatatgtgactcctttggggatgtaatgcacaggtcttgagccactgttctaagccatctccctggaagctagaagcacaaatttcaatcttagagatgatttgattatcttaacaaagggagagtttggtgggacctgagtctgaggaagaaggaaagcaaggacctgtgtgtgtgtgtgtgtgtgtgtgtgtgtgtgtgtgctggttcaggccagcatcactgtcagtagatattgcttgactgtattcttacattgccatctttctcttctttgctcctctcgggcatgcatagactgagcttccagtactgctgctgggccgatcctctgacctccgggctggagagtttgtggtagctttgggcagcccattttctctgcagaacaccgtgactgcagggattgtcagcaccacacagagaggcggcagagagctgggactgaagaattcagacatagactatatccagacggatgccatcattaacgtaagtcactctgggagtctgttcacagcctagaagatacagccaggatgtagcaagaagaaagctttagagtcatctcttttcctttgggatttttgaggactctcagaagtcaaccctaaggcaggggtatagttggatgctctgtgtttgatataaccagcaccatgctcagggcttgatgcagaggtcactgctgcaatacagtgcggggtccttttgctttgccctgtacccaccccaactttaggattaggaaggtaaggggaatatttatttatttatttatttattttggtttggttttttaagacagggtttctctgtatagctctggctgtcctggaactcactttgtagaccaggctggcctcgaactcagaaatccacctgcctctgcctcccgagtgctgggattaaaggcgtgcgccaccacgccgggcaaggggaatatttttgcctgcgttggagaagcaggctgctctggtgaaactcattaggaactatgtataagtgatgtagaggaatgtatcgatttgctaactgatggctcttgtcaatttgcctttagcatggaaattctgggggtccgctggtgaacttggtaagtggctgttttccttgctgcttcgtatgtcttcctaactttaaagtgttttaacatctgcaaatgtagacttgggtgacagtctctagagagattaaggaatggtgtcttttattatggggtctctaggaaatagctaaggaatattttagagtccatgaagggtttgtccatctggttagctggagactggcaggcacccaagcaaatcccatccagccaatcacaagccatccctgctgtatgctgtctgaccacccccccccccaccctgcaaccaaaagcccaactctgctatgttgtgtacgtccttgagagccccttgcttttgcatatgaatacacactgattatataattctggaattttagtcttcagcttgctcagagatgacaataaagccataaccag

SEQ ID NO: 2075 - DNA, 1560 bp, Mus musculus
cacgtttgcagcggcgaaacttctccgaggttcaagcacaggggtggtagcccctcaaggactgcccgggcagcgggtaggggaggagcgcagagaacgtcccaggcaaggtgatgtgaacagagcccaggaatgccttatgtggatcggcagaaccgaatctgtgggtttctggatattgaagacaatgagaacagtggcaaattcctccggagatactttatcctggatacccaggccaactgcctcctctggtacatggacaatccccagaacctggccgttggggcaggagctgtcggatctctgcagctgacctacatctcgaaggtgagcatagctaccccaaagcagaaacctaaaacaccattctgcttcgttatcaatgccctgtctcagagatattttcttcaagccaatgaccagaaagatctgaaggactgggtagaagccttgaaccaagccagcaagatcactgtacccaaagctgggacagtacccttggccacagaagttctcaaaaacttaacagctcctcccaccctagagaagaagccgcaggtggcctacaagactgagatcatcgggggtgtggtggtacaaacgcctatcagccagaacggtggggatgggcaggaagggtgcgagccagggactcacgccttcctgcgaaggtctcagagctacatccccacgtcaggctgccgcccttccactgggcctcccctcattaagagtggctactgtgtgaagcaagggaatgtgcggaagagttggaaacgacgcttctttgccctcgatgactttaccatctgctacttcaagtgtgagcaggacagagagcctctgcgtaccataccgctcaaggatgttctcaagactcacgagtgtctggtcaagtctggtgatctcttaatgagggacaacctgtttgaaatcataaccacctccaggacgttctacgtacaggcggacagccctgaggacatgcacagctggatcgaggggattggagcagctgtccaggctctgaagtgccaccctagggagccgtccttttcaaggtccatttctttgactcgacctggaagttctacccttacaagcgcgcctaactccatcttgtcaagaaggcggccaccagcagaagagaaaagaggtctctgtaaggccccttcggtggcctcctcctggcaaccctggacacctgtcccccaggctgaggaaaagccgttgtcggtggagcatgctccagaggactctctattcatgcctaaccctggggagagcacagctacaggggtgctggcaagttctcgagtcaggcacaggtcggagccccagcaccccaaggagaagccatttgtattcaaccttgatgacgaaaacatacgaacctctgatgtgtgatatgcagtgcccgttgcgtgcaggagagccaggggctgtgacttattttctctgccatggtagaggacagagtctaatggcactcacagtggaggggctcgtctagctggctttggttttgctattattgacaccatttatttaactggg

SEQ ID NO: 2076 - protein, 423 aa, Mus musculus
MPYVDRQNRICGFLDIEDNENSGKFLRRYFILDTQANCLLWYMDNPQNLAVGAGAVGSLQLTYISKVSIATPKQKPKTPFCFVINALSQRYFLQANDQKDLKDWVEALNQASKITVPKAGTVPLATEVLKNLTAPPTLEKKPQVAYKTEIIGGVVVQTPISQNGGDGQEGCEPGTHAFLRRSQSYIPTSGCRPSTGPPLIKSGYCVKQGNVRKSWKRRFFALDDFTICYFKCEQDREPLRTIPLKDVLKTHECLVKSGDLLMRDNLFEIITTSRTFYVQADSPEDMHSWIEGIGAAVQALKCHPREPSFSRSISLWGSSTLTSAPNSILSRRRPPAEEKRGLCKAPSVASSWQPWTPVPQAEEKPLSVEHAPEDSLFMPNPGESTATGVLASSRVRHRSEPQHPKEKPFVFNLDDENIRTSDV
